United States Patent Application Publication US 2025/0130221 A1 - sequence listing, part 3

SEQ ID NO: 274 - DNA, 110277 bp, Homo sapiens
  source 1..110277: mol_type = genomic DNA; note = NC_000008.11:c8893630-8783354 MFHAS1 [organism=Homo sapiens] [GeneID=9258] [chromosome=8]
gccgcttcccaatcgcgccctcccagcgccggggacgcggcgcccgcgctcccgcccgagcccggggaaacggagacaaggaggcgccgccgccccctccccgcggctgcgccccagccctgcgcccgcagcatgcccgccgccgggccgagcgccgccctcccccaggagctcgaggaggcgacgccgctgccggccgcgggaccgcggctgcgagggtagcggggccggagccgggccccccgaggcgccgcgcggcgggcggagagggaggaggagcaggcatcctccgcggcgcgcgggcggcggccctgctgcccggcgcgcccatggcccggccgcagggagaatgcaagctgctctccacgcgctcggcgtcccccggagccgctcgcgtcgccgccgccccctagccgccagcgctcggccgctggctgcgctaggacccgcggccgccggccgccgagcgcgggagggcaggcaggggcaggagccggagggcccggggcgcggcgcggcatgtagctgcgggctcccgcgtccgcgtgaggctgtcggcccggggccccgccatggctgggatggacagtggcaacctgaagaccgcgaggctgtggcgggacgccgccctgcgtgccaggaagctgcggagcaacctgcgccagctcacgcttaccgccgccggggcctgccccggggccggggccgacgcgctcgagtcccccgcctccccccagctcgtgctgccggccaacctcggggacattgaggcactgaacctggggaacaacggcctggaggaggtacccgaggggctggggtcggcgctgggcagcctgcgcgtcctggtcctgcgcaggaaccgcttcgcccggctgcccccggcggtggccgagctcggccaccacctcaccgagctggacgtgagccacaaccggctgaccgccctgggcgcggaggtggtgagtgctctgagggagctgcggaagctcaacctcagccacaaccagctgcccgccctgcccgcccagctgggcgctctcgctcacctggaggagctggatgtcagctttaaccggctggcgcacctgcctgactccctctcctgcctctcccgcctgcgcaccctggacgtggatcacaaccagctcactgccttcccccggcagctgctgcagctggtggccctggaggagctggacgtgtccagcaaccggctgcggggcctgcctgaggatatcagtgccctgcgtgccctcaagatcctctggctgagtggggccgagcttggcacgctgcccgccggcttctgcgagctggccagtttggagagcctcatgctagacaacaacgggctgcaggctctgcccgcccagttcagctgcctgcagcggctcaaaatgctcaacctctcctccaacctcttcgaggagttccctgccgcgctgctgcccctggctggtctggaggagctctaccttagtcgcaaccagctcacctcggtgccatcccttatctcgggcctgggccggcttctcaccttgtggctggataataaccgcatccgctacctgccggactccatcgtggagctgaccggcctggaggagctcgtgctgcaggggaaccagatcgcggtgctgcccgaccactttggccagctctcccgggtgggtttgtggaagatcaaagacaacccactgatccagcccccctacgaggtctgcatgaaggggatcccctacatcgcagcctaccagaaggaactggctcattcccagccggcggtgcagccccggctcaagctgctcctgatggggcataaggctgcaggaaagactttgctgcgccactgcctcaccgaggagagagtggagggatgcccaggaggaggggacaaggagaagtgctacccaccgtcacctccccctgtgagcaagggcatcgaggtgaccagctggacggccgatgcctcccggggcctgcggttcatcgtgtatgacttagctggggatgaaagttatgaggtgatccagcccttcttcctgtccccaggggccctatacgtgctggtggtcaacttggccacctatgagcctcgccactttcctaccaccgtgggctccttcttgcatcgggtcggggcgagagtgccccacgcggtggtgtgcatcgtgggcacccacgcagacctgtgcggagagcgtgagctggaggagaaatgtctggacattcaccgccagatcgccctgcaggagaagcacgacgcggagggactgagccgcttggccaaggtggtggacgaggcactggcccgggacttcgagctgcgctctgccagcccccacgcagcctactatggcgtttcggacaagaaccttcgacggcgcaaggcccattttcaatacctgctcaaccaccggctgcagatcctctcccccgtgttgcctgttagctgcagggacccgcgccacttacgacgccttcgggacaagttgctgtcagttgctgagcaccgagagatcttccccaacttacacagagtactgcctcgatcctggcaggtgctggaggaactgcatttccagccacctcaggcccagcgactgtggctaagctggtgggactcggcgcgcttgggcctgcaggcgggtctgaccgaggaccgactgcagagtgccctctcctacctgcatgagagcggcaagctactctactttgaggacagtccggctctcaaggagcacgtcttccacaacctcacccgcctcatcgacatcctcaatgtcttcttccagagggatccctctttgctgctgcataagctgctcctagggaccagtggagagggcaaggcggagggggaaagctccccgcccatggcgcggtccacccccagccaggaactgctccgggccacccagctccatcagtatgtggagggctttctgttgcatgggctcttgccagctcatgtcattcggttgctgcttaagcctcatgtccaggcccagcaggacttgcagctgttgctggagctgctggagaagatgggactctgttactgcctcaataaacccaagggcaagcctttgaatgggtccacagcttggtacaagttcccatgctatgtgcagaacgaggtgccccatgcagaagcctggattaatgggaccaacctagctgggcagtcttttgtggctgagcagttgcagattgaatatagctttccttttacttttccacttgggttgtttgcacgctacagtgtccagatcaacagccatgtggtgcacaggtcggatggtaaatttcagatctttgcctatagagggaaagttcctgtggttgtgagttacagacctgccaggggagtcctgcagccagacaccctgtccattgctagccatgcatcattaccaaatatatggaccgcatggcaagccataacccccttggtggaggaactgaatgtcctacttcaggaatggcctggactgcactacaccgtgcacattctctgttctaagtgccttaagagaggatcgcccaatccacatgcttttccaggtaagtggagagagggagaagttcttctgtggtatgctgtaagatatgtttttggagatacttggttgtcatttggcagaatgtttgtttaacttcacgggttctccaggaaagcttcgtaagggaaacacagggagatttggagatgagcaaaaggtagtaagtacctgagccttatgaaatgcagtcacaagtgtcatcctctcctaacagactcagacttccaaaatgggttccagtcacaacatttgccatctcctttcccctcttgtcgatgtagcccacatttggtggaaggaaatttcaggtggttgaacagatagattctggacagtgtccgatgttagcctcttactgatcgttggctaaagtgttcattagacacgtctcaaaggggtagatgagtttgagtttcaagtgtccagtgtcacaattttttaaaaaacttaaattttcgtgagtacataggtttgtatatttgtggggtgcatgagatgttttgatacaggcatgcaatgcatagaaatcagattgtaaaatgcggtatccatcccctcaagcatttaagcactctgcttacattcagaatgtaattagaaagtaaaaattactgctcacttttcttaagaaattccagagaaaatcttttgtaattggagtgaacaatggatgagtaaagacagaaatttcagactgtaatgcatgactaaatcctggggctgctgctcccctccgcccactcagggacatggaagatagatgactgaaatctttgaggggcgtttcctcgggaatttcctggcagtttcgagttttatagacgtcttaaggtttgttttttggtaagtgttaagcaaatgaagctttctggcagtgcttaataattgagacggaagggacagaaagctaagagttttctggagagtgttttccagtagacttttttttcgttttctttttttaaaccatcataagcaagtggaagaattccaggactagttgtctggggttttttgttttttttttttttgaagacttttttttttttcttagagcagttttaagtttatagcaaaactgaacagaaggtacagagatttcccatatatccccttccccacatgcgtagcttcaccaacgtcaacatctcccaccagagcagtacatttgtttcagttgataaacctgcagtgacacatcagtaccagccaaaggtcatagtttacacagggtttactctgtgttgggcattctgtgggtttggacaaatgtccaatgacctgtatcccccattatagtatcatacagagtagttctactgctttaaaaatcctctgtgctctgccaattcattccccccaaccccggcaaccacagatctttttactgtctccataagttttgcgttttacttatatgggatttttttcttttgagcctggttaattggtatcaaactagtttttagttgggaacgtgtccatttcctcatcctttgtagttctttaaacaactgtttttgtgtgtgtgtgtgtgtgtgtgttttgttttttgtttttttgtggagcaggtggttaacaacattccaagtgtcctaagcacaaaccagacagaacaatagcatccttgcacgtttctcacctgggtccccacccccaggggacccggaggggtgatgaaatggaagactgcgtcccactctgatctttgtcctggtcagagagggacaacaagaatgcagctggtaatagtatcaggaaggaattgaataccaatatttccgaaggtgacatctttccgttgccctggatctaggttgaatttaattcttaagcatgaaaaaagccagcgtattcagttaccagtcaactgagacatccattctgtatgtttatctggaatcttgtcacactccatgacttggtagactcttcagtttgttttatatttgtcattgtgtgttattcatggaagcaagatacttctttattgtgataccaaatggaataaagtgactgggagttacgcatttacagggtagtttactgaaggagcaacctgaagccattcttaatccaaagtaataaaaacgaatgttattaacaacaaaaggagagacataggttattgagcaagtaaagatcttctaagaactttgaggagttaggggcgaggctggaggtttttttttttttttttttgttttttttgctaacgtcagctctttatgtttaatttttaccagtcataaattccacagacaagcttgtactgagatgcagaaacaagccccttgtcttgtgttgtctatttgcctttcaaatgaggcacacctggttttgcaatccaggctataaggaagagattttttttcaatgtggaaaacaaatgattgaaaaattgtaaaattatcttatagattgaataggaataaatcatcagttgtttttagagcacgattataaaatatatacatatacatataattataaaatatgtacatataaaatatatatgtatatatacaccaacgtacatatttttgtcttatagtctttttgtttttttttgaattgtgttgtttttcaaaagtagcagagggtatagaatagtagaaaacatgattatagtacatttctcgttacattaagaagatgcaaaaaacattttcctcttctgtatttttctgtgatagccatcatttgttagtaattgttacagttacgaaagatttggtaaaagttaaaataatgagttagaaataaaagctaaatgtgggaacagaattatgttgagtgtttaagtagagcatacattaaaaatagattcattgaatccctagattattaaaatatatattaattcagcagaaaccctttgaatctattggcagcctttgccttttcatgtttttttgtttgtttgtttgtttttgagatggagtcttgctctgttgcccaggctggagtgcagtggagtgatcttgactcactgcaacctctgcctcctggattcaagcgattctcctgcctcagcctcccaagtagctggaattagaggcatgcgccaccacacctggctaatttttgtatttttagtagaggcgggggtttcgccaggttggccaggctggtcttgaactcctgacctcagatgatccacccacctcagtctcgcaaagtgctgggattataagcgtgagccactaggcttggccacctttgtctttttaagaagtcattttgcttctggggacattaaaaattgtttacttttatgttttataaaagcgttaagttgtcctataaactataacaattttatatgcaacgctgaaaaagttggactttgaattttcttaactttgggatgttacagtaaaagtaaatagtaaattactgtctctcttgattttatacagaaaaaatgtataaagttgcactaatatcttttaaagtatttttatgtgaaaagcctattttggccttgtcctgttggattttctggcctgagctgccctactgtagttgaccacgggaagtataatggtaaatttctcttttcttattttggtttatacaagaaaagtaatgggcagcgtgcagtggctcagggctgtaatccctttgctttgggaggctgaggcaggaggatcacttgggtcaaggagttcgagaccagcctgagtaatgtagccagactccgtgtctacaaaaaaaaataaaaaataaaaatcagctaagcgtgcacacttgtggtcccagctagttggggggctgaggtgggacaatcacttgagcatgggagtttgaggttgcagtgaactatgattgtgccattgcactctgaccctgtctcttaaaaaaaaaaaaagaaatgattggaaaatgcacatccagcaatcactagtttcatagttttttgtaaaaataaatcacattgtcagagagaagacctatttgtcttatttaaaataggtaatctgacaacgtgattatctttttaagacatcttatttaagacaaatgggttgagtgacaggagattcttttggaaactcggagatggcctatgatgaagcctaaatgtcactgtgaaagtcttgacctgctttctccatcctggccaacatcctagcctggtcaacctggtgaaaccccatctctacaaaaaatacaaaaaaattagctgggcatggtggctcatgcctgtaatcccagctcctgggaagaatgaggcacgagaatcccttgaacttgggaggcggaggttgcagtgagctgagattgtgccactgcgctccagcctgggcgacagggcaagaccctggctccgaaaagaaagtctttacctgcttcctgcaggtaccctttcttttttgcagacttgctgcccatagctggtagccaggattcccttccttttgctgttttccttctcattggttggtcctgtatacttgtcttagagcaagtttcttcttgtgggatatttgtttatgcttttattctgttctaccagtatgacctctaaactcaaagagttggtactcttgaagttgagtgagggtacattaagatgtggtggttaggacacgggcctgcagcaagattcaagtgctttgatattccttttaagcagatgagtgaatactgtgtttttgaattggaagagtgtgtcttagtgagttaaacttgcattgactgcagattttcactaaatatcctactctccaaattatttaaggtcattttaaaaaataaggagaaagcaacccaaatcagtagacagaatgagttatgtggctttctttagctttactgtctttcatttactcagtaacttgatgcctttttgtatctcatgccaaatgtcttctgtccctcagtttcttgcacacggagtgtacctctccgacaacacagcatatttgacttgttttgttggtgtttggttgcgtcatgatatatctttgattaggttgttcacttgctgcttctgagccagagacacacccgagacttagtagcttctgcagagcctctcagatgtttgctgaatgatagtttggtctttttgtgagaaataactttttttttgggggggtgggggcagggtctcactctgtcaccgaggttggaatgcattggggcaataatggcttactgcagcctcgacctcttgggctcaggtgatgatcctcctacttcagcctcctgagtagctgggactccagaaacaccctaccatgcctggctaatttttgtgttgttttgtagagacagggtttcgctgtgttgctcaggctggtctcaaagtctgcctgcctcagccttccaaagtgctgggattataggcttgagccaccatgccctgcctgagaactatctctttttctttgttattcacacactcagtgaaaatcccaggtagtattgtaatgattatctggctttgtttagcttcccaactccctccccctcacagtgttcctccagcattcccattgtgcgtctatgactggtcttacccttgaatgggtccttcattttgaccactgaagcaaagcaaaattcttgccttattatatctaagttttagaattactggaatttgagcatgacctagttgtttggattgaattagtcattgtttttaattttacaaaggtttttcaatatctctttggttaagctttattaatattgatgcttcttggcttttctttttatgaataggcctctgaactccctgggactttgttttatgtaaaaatcaaaaccttaatcaggcactaggataaacaaatactgtgcagaatagagttctagaaggctagaaaggcctttggagtatttgaattattttaaatattaggtgcctcttctttaaaccctggaatagactcttaagtccatctctgcacaagtagtttagaatttcctaaagtattttttctttaattttttttttctttttgtgtgtgtgtgtgtgtgtgtgtgtgtgtgtgtgtgtgtgtttgtgaaatagagatagggcctttttatgttgcccaagctggtcttgatctcctggcctcaaatggtcctccccactcagcctcccaaaatgttgggattagaggcgtgagccaccatacccaaccagtattttttatttagtggatattttatgtcatactctgaggttattcccctttgtccgtgaagaggtgaggggctttaactctgtattataggaggggaatgagtggggaaaggaggaattggacatttctgtttttcttctcatctacctattaacttgcttctatccatgggagccctttcttttttttttttttttttttttttgagactgagtctcgctctgttgcccaggctggagtgtagtggcgctgtctgagctcattgcaacctccacctcctgggttcaagtgattctcctgcctcagcctcccgagtagctgggattacaggcatgcaccaccacgcccagctaatttttgtaattttagtagaaacgaggtttcaccatgttggccaggctcgtcttgaactcctgacctcacgtgatccacccaccttggctgcccaaagtgctgggattacaggcatgagccactgcgcctggcccatgggagccctttttgattaaggacacctgaccatccatccattagggcatcagaatgcctgctgattttgttttgttttgttttgaaaaccagcgggtgggtgcaggcccagtactgccctctcttgtctctggcagccttggcgtccctgttccctggggatggaggtctgctttgtgtttccagtctttgtggaaagcacatcaggtaggctcaggtctcagtcctctctggttcagcttttcttttcttttctttttgtttttgttttgagacggagtcttgctctggcgcccaggctggagtgcagtggcacagtcatggctcactgcaacctccacctcctgggtccaagtgatcctcctgctccagcctcctgaatagctgggactacaggggtgcaccaccatgcctggctaatttttgtatttttagtagacacagggtttcaccatgttggccaggctggtctcaaactcctgacctcagatgatcctccctcctcggcctcccaaagtgctgggattacaggcatgagccaccgcacccagcctggttcagcttttctgattgcaacattaattgctggggggtggttgtcaggtttaccttcttctgggggctggcagccttcacttcagcagggagggattaggaacccctgtttggcctgccttctccaaggctgctctagcatgaatgaagctgtgcaatgcctggcacagggcagatcaggtagaaggggtcagagcaggttggttattttgaaagaactcaaactctcatttttattttattttatttatttttttgagatggagtctcactctgtcgcccagggtggagtgcaatggcgcgatctcagctcactgcaacgtctgcttcccgggttcaagtgattcttctgcctcagcctcctgagtagctgggattacaggcgtgtgccaccacgcacggctatttcttaattgatgcctggcaagtgcttttttggttgtttatgatattttgtttgtttgtttgtttgtttgttttgagactgagtctcgctctgtctccaggctggagtgcagtgccactatctgagctcactgcaacctccacctcctgggttcaagtgattctcctgccccagcctcccacgtagctgggattacaggcacataccaccacccccagctaatttttgtgtgtgtttttttttagtagagatgggggtttcactatgttagtgaggctggtctcgaactcctgacctcaggtggtctgcccgctttggcctcccagagtgctgggattacaggtgtgagccaccatgctcggcctgtgatgttctttatctttatgcattttaaaggaagccattgtcattgtcccatgtggtttttctggtatacatattcctgccttccatatctaccgcctaattcttacagaaatgggggaagagtgggcaaggggcacttagcagcaggatgcaaatgtgcatttaatgcaggagctggccacagaaagccttctaccacctggccttgaggcagtgaatactccaacctcccaaagctgatggttcactggctgctgctttctttttttttttttttttttgagacggagtcttactctgtcaccaggttggagtgcagtggctcaattctcctgcctaagttcaagtgattctcctgtctcagcctctcgagtagctgggattacaggcaactgccaccacgcctgactaatttttgtatttttagtagagacagcgtttcaccatggtggccaggctgatctcaaactcctgacctcaggtgatccgcccgcctcagcctcccaaagtgggattacaggcgtgagccaccatgcccagccaacattctatagtggggagcatatagatggtgaggagcgtgaggtctgatggtggaggtggaataggtgcaggaaggaagatgttttcagtggttcccggaaagtgtgtacaggttacacctgctggtgtgagttcctggaaggtcatggaagggtggctggcgtaatgcagagatgattgcatgtgtactctatatgatggtggctgcgtggataacagttcccagaatccactgctagcagggctgacttatttctggagaccaagaaggaaacattctgagttatttttatttttggcactaaatccttcagaacatttttccttcctcaatctcttagctgaaaatactggggctttgtttattaaaagagtaaatttaatgaaaagctatcaccaacaagtttttttcttttgctgtaaatttatagaagcaaagagtctaaaaagtgcacgttggagcaggagaagaatgtgggcagaggaagacagaggcatcgggttactgctggtgggcttgcagggacattgtgagtttggagcctgtttcacccatcttaggaaggtatgggtcaggcgtgatggctcacacctgtaatcacatcactttgggaggctgaggaggtggatcacttgaggtcaggagttcgagaacaggttggccaatgcggtgaaccctcatctctactaaaaatacaaaaattagccaggtgtggtggtgtgtgcctgtaatcccagctacttgggaggctgaggcaggagaatcacttgaacccaagaggcggaggttgcagtgagctgagattgcgccgctatactccaacctgggcgacaaaacaagactccatctgggggaaaaaaaaaaaaaacaaaaaaggaagggatgtcctgccctagaccgacagcccccagcacccagcctattgcaaatggtttctttcacttttgcaaatctgaacaagcatgcttgggagaagggcgaggaggcagggaaactggagtcatgttaagactactctctggaggtttctgttgtgcgtgtgccattctgccttttgggtgatgtggcttaatgagtcaagccctgatgactgatgctgcttttcttcctcatcttcctcctcctcttcctcctattgagtgaaagtcacataatatgaaaaagccattttaaagtaaactattccctgtcatttagtacattcccagtgttgtgcacctgccacatctcagccaagcacctttggaggggtggggcagatacattggtgtcattcttcctggggccaagtgactgggaattcttttgccaggctttgtagcaactttctttccaaggtgtaacttaagagtaggggttttggggctaggcctggagatgccatgttgattggagatcttggacacggttgtggggatcctcttagtgtggatgagaggacagaaaggagggcatccaagcctcctggtctgttctagggtgtatgtgatttaatgaggggtgacatacacgagctccgtaaagaacacgtagaagagaagtacaaataaatgttgtgtaattcttgtcttctgcatagagcttttttttaaagataaattttaagtttaactcctggaatgactggcaagacctaatgaaggtagagtggcagcgggtggtgatggtggcagtgatacaaatgtagatgattaccagattagataagtgtcgtcaatcactgttgaatacctgctctatacagaagtttgtactgaactgggagttctaggaaaataaaatacctgatcttgggcttggggagctgtgttgggatcttggttaatgtcattgttgattcttgtaaatacggaatctgaccccatatggagaaaatcatttgcatatttgaatgttactttggggggaaccctggcttttgatttttccagaaaaaaaatgtgatcctactgagcaaagcaggccacagctttgaatttccttcagatgtatgagtaggtggaaagtaatggtcaagtccttcttttgagttgactttcagtttggattacttgtttgcgagaaatctcaggcagaacttgtgaggatgctggaaaaaggaaattcattgtatatgaggatctctaaaaacttcccaaacgaatcagcctttccaaggaaaagaaatgccttttcttcaggagtccttaccttttttttttgagatgggagtctctctctgccacccaggcttgagtgcagtgatgcgatcttggctcactgcagcttccgcctcccgggttcaagtgattctcctgcctcatctcccaactagctgggactacaggcatgtgccaccacacccagctagttttttttgtatttttagtagagacggggtttcatcgtgttggccagcctggtctcaatctcctgacctcaagtgatcctcctgcctcggcctcccaaagtgctgggattacaggcgtgagtcaccatgcctggcagtagtccttaccttttttgtcatttatagacttgctcccatctggggaaggattcaaatcatcagtcatttctgaacaccaaagactatatgaatgctgactccaaagacagcatccattaaagtgcatatcatcataataaaaatatatgactgctggatttctttgctgagagatgctttgaagtacttttgtactattagcatattaaatgttgagaaaattaaagagtttaattttcttagatcctccttattcctaaaatgaagtctatgctattaacattgtattagtactaggttatagcagtagtgaattttaggtctctagaacaagcctccctcccttcctcctcactctttctgtccttccctccttttttcctttttttttttctttttttgaaaagaaggaatttttaaaaacgcaatggaaagggaaaacataaaaccagaaaaatatttcgcctgggtgccgttgtttgacttaccaactttattattgttttaatatgattcttgtttttcatgtcataaaggtaattgtgttaatcatcacatcagtctccctatttttggagaaaaatagaagaggtgacaatgttgacgttttctcatgttgcagagacagtgctaagtgcctcctaggggtgatcttatttaatccccacagcagccctaggaagtaggtattattactgtctttgctttcagaaggagaaattgacatttagaaattaagtgaattccccagagttagagaactctaggatatcagccccaaacctctgctctgacccaccgtcacttgggtctcagttaggttgccattgatttccagagtacaccagctcacctcctctcccttcatattctaagttctgggcagacagtctggtactgcacaggagctgcccgtgcagaggtcagcggaggtcatggtcaggtggaggtaaggtggggagagcgccatcaggggtctcagagaagggttcccagaaaggccacactgtagttgagtgtcagaggatgatttctagttaaccacctgaagaagggaggtgggtggagcatttcaagttagaatgccatttaaaaggcagggagcagacaaagacttcagcaggcctaggggtgggcatgtgtgggcacagatgcgttttgcatttagaaattatagtaagggagagacttctttgtttaaatggcattcatggactggtagacacttgccagtgacccactggcccatcaactagagttttaaaagcattgttctagcctgtccctttgtcattgggctgggctctcttgagaccttggaagagatttatggctgggaaaacggaagggtagtttcacattatttgctcagactcataatcaagttattgttaagctgacagaacacctgctctgcagagccatgtctaagcgtgctgctggtcactttcactatgtcggagtagagggagaagagtagcattggttattcattctaacatcagccagagagccgcatgcctctgtaatccctaggaatgtattccagaacatcgattttccctgctctaaatcttaccctaatagaccctgcaataaaggcaaattcggatctgacacaattaccattttattgtgggctgtttaagtttcactatatttactttatgcttttttgtgtgtgacactactcactgactgaaaatgccatttttattaaatttgcattaatggaacaccgtagtttttttttttttttttttgaggcagggtctcactctgtcacccaggctggagtgtgcagtggcacagtcacagctcactaaagccttgaccttctgggctccagtgatcctcccacctcagcctccccagtagttgggactacaggtacatgccaccatgcccagttagtttttatattttttatagagacaggattttgccacgttgcctgggctggtctcaaattcctgggctccagcagtccactcaccttggcctctcaaagtgctgggattacaggtgtgtgccactgcgcccagccctggaccaccatgtcttatgcacttcatttgttggacaccacttaccgcactatgacagtggtttcattttttttcttttttttttgactgagtcttgctctgtcatgcaggctggagtgcagtggcatgatcttggctcactgcaacctctgcctcctgggttcaagtgattctcttaccttagcctcccgagtaactgggaccactatttagaagagtgataagtttgtggataaaaagtcttttcttcatagaagaggtggaatacagtatgatctctgttcatatgaacaccttatgctcttttaaaagtactttttcccctttataaaaacttataggccaggtgtggtggctcacacctgtaatcccagcactttgggaggccgaggcgggaggatcacgatgcatacaccactatgcccggctaatttttgtatttttaatagagacggggtttcaccacgttagccacactggtctcgaactgctgacctgaggcagtctgcctgcctcatcctcccaaagtgctgggattataggcatgtgccaccacgcccggccgacaacagtggtttcttgcatcttatcatcatttgagtttgtcttcccttgcctgccaacttatcaaagtttcctcaattacatttaatcaaatcctaggaagtacaaggtatttttaagtcttaggttatattttgtttgtatttgctttatagattgacttgaaacagttgggattttgtgtagttttcaaattgaagcattataatatggtggttagttgcaagagctcttggagtagactgctgggctctaatccctgtgccactgcttcttagttatgtgactttaggcatcataatagtttgtgttggttctgaagattgagttatatgtgttaaatgcttagaacaatgcttgacacctggcaagagctcagtaggagtttgctgctgtttccaccattccagaaggtacaagagtctaaacatacttttagaagagtgataagtttgtggatcaaaactcttttcttcatagaagaggtggaatacagtatgatctctgttcatatgaacaccttatgctcttttaaaaatgctttttcccctttataaaaacttataggccgggcatggtggctcacacctgtaatgccagcactttgggaggccgaggcgggcggatcacgaggtcacgagttcgagagcagtctgacatggtgaaaccccgtctctagtaaaaaattgcaaaaattagctgagcgtggtggcacgcacctgtaatcccagctactcaggaggctgaggcaggagaatcgcttgaacccaggaggcagaggttacggtgagctgagatcgtgccactgtactccagcctgggtgacagagcgagactgactcaaaaaaacataaaaaatttggagagtagaagaaaaaaaagtttctcatggtgggtatctaaagtaatcactacacattttgctctgtgtcttttagctttgtttcctccttaagcttaggttttaaaaatatgtagttataattgtataaataattcaaatattgattttttaaacttatgctaacatggatataatttcctgtgattagtatttatacagtaattaaaaatgcttgcataatagtacatcaaggtgatttttcacctttgtttatttaaccttgtgttctttttgtttatccaaccatttgtgctcttgttcccagttttttttgtgagtgattctctgatgactgtatttctttataaaaactcttttttatttgggcagtaatccccgaagtagagtcattgagtcaaaggcaaaaaatgtcattaaatctcaatgcacgtttacgttgcttcccatgaggatgggcacgtcagatgcaagatctttttcactgtacctcctcaacattgggtatcatctataaaatgcactaccgtttaatggaaacaatatgtcactggtgactgaagattttaactagtggatgtgaacgttttcttgtataaatgttgcctaattgtgttgcttcttttctgaatcctctaataacatcttctggcatcatcttggtggtttttctttttttttttttaatcacagtgttttatcagtttatattaactcttcatatataaaagataaccttttgtctatcatacttaaggcatttttttctagcttgttcccctctttgctttaaaaacctttaacgttttgaagtttcaaatttcattcagtatattaatagcttcctctgtgatttcttctagagcttaaaaaaacctcataacatttttctaaatacagaggtgacagcgggaatcacatagtgattcttcacccttataactttaactgaaaataaaaaaagtgctatccatatgtggatggtagattcattagcaaagccccctttttcataacccctccccaaactgtctcctctgtaaaatgtttcttgctgatttcttccagggaaaataaagcatgtatttgcatatattttaacaggaatgagatcatgctgtactccttgttctgcacctcgcatttgatcacttcaaaatatatttttgagatgcctccatatgaacagttagaaccctgttatagaagattattatgtgtgtgtgtgtgtgtgtgtgtgtgtgtgtgtgtgtgtgtgtagaatgttatagtatatcctacaaatatagcatagtagtctaccaatggatgtattgttcagtcacacctataccggcagacctttgatcctttccagattgttaaactaagtacgttctccaccttccagaggtgtaagaaatactcagttttatttccttcagggttaataatccctctctgtgctcggaacactcttgagatgcaattagaaaaagacaaatctctaaatcaaagtggtgggacctaaaaaaagcctcgagggttatgaaggcttcgctttgtgatttgaaacaaggtaatttttttaaattggctttggtgatgtgtattggaacaccattgttttcagcataattacgcatttcacagcttaattcagccattacacgtgatgcagtgtttagacatagcaataattacaaattgtacatgtttacagatagatataccgctgatcaaaataaaacagtggcagcaagaatgatgttctgtccatgtaagaaatcaatgaaatataattaagaacgaactgtatctcattgactcaaaacattgcatctgcctttctgtcccatctgttttctaaacaaaaatcttcccgcgctgcgtggttgtttttatttgtatcctagaaccatcctctcgagttccacaccgttgtattttctacacctaagcttggtgtgttctgcacaggaaatgtttcttggatgttttatcctcataccaagtgggaatttaaaatttaagagattacccacactctttgcctttctgtacatgtgatgaagaaagagtgggtgtaacccagcactctaaaatgtgtttgacctgtaaaaaaaaaaaaaaaaagtaagcaattaaatcctgttatagttgcttctgtgtttaaaacatacttaatgacgtatatatttatttcaagctaacaaagtccccagtcaggttcttgggagtttttttcacaggactcattgaagtgtttggtctttaaaatccttcatttcatgctaactgccaagtcaatgcagacagtatggccgaacagagctggtcacattttccctgaacatgctattaaaaaatatattcactgggattctcttgactcatggcatagctgaggtgactttgattccggagggctattgcttatgaattgcatgtggaagaactaaaaatagaaatgtgaattttccaaaagaacactatgataccaaaaatggctcactggcttgcctagagctgggctgttttgtgcccaaggtacagtaataagaactgggatgcaaagccctgtagggtgcatctgtccccttccctgacacccctcactcccagatggctcacgagtggcactgcccggttgtctccgtctcactcttgcacgatgttctgctgcctgtctgggatggagcaggtgttcttttgaatgtatttgttaagcctctgaaatatatgcatttccccctccccaagaaaaacacacatgtgcatgctctgtgcttttccctggttactgtattgttcccatctttttttttatttttattttttcccttggaatagggaatatccactcattttctatttagtcccttcaggaatttgccttaggggctgttgggccaggcctcactgcagccagccagagcttatcagctgtgtgttaacctctcccagacacttcttgaatgctgttcatgcatccgagcctatgcatctgagcctcctctgtgtaatgtggtgcggcattaaaagcttacccaaatagcagggatgattgcatcttgttgattaccagggctgataacattttcttgcttagctaaaaagaaaagccagatgactgtttccaggaagtgataaactgccatgcatccggccccaggtggtccgcatgaaggaagctgcaaggttggaatcctcctgccgtccccttttacagttcataaatcttctgatttatggggccatttgtgattgcagacacatttattcatggggggatttccatcgagatcataacccactgtaaagcaggaggaagaatcaggaattagaacggtgtacattcctctttgttagaaaagaatcccgattctttggtcatagacaaatatttgcttttgaagaatctggtggtgtgtcgctggctttgttcatatccgtgcacagtcacatgctcccttgcctcccatggacccagaagcttatgttacacagatcgttttataatgcttgccatccgggcatgtttatgcaaagtgtgaataactttttgccttagcctcctcttccttccttctccctcctttgatttagctcatttctggaatggggcagattttcatctcagggagttgatacggtttcctaggtagggtgacagaacaagtgtcaccttagctgtagctagagatgaatattgccatgcagcttacttgctttatattaaaccagcattagagaaagaggccttgcatcttttatcagcagtatgttaacctctcccaggcacttcttgaatgccattcatacatctgagcccatgcatctgagccttggatgtaattaaatcagtggattaggaagtcgggggcctggacctctgggaagccacttggcctccctgggcctcaatttcgtctgtaaataggtaaaaataattctaacagttcccaagcatttacacctgctatcagagtctccttagatgttgtgagggggaaatgaatgaatagatgtcaagtccccaagtagttttttctttgtttgcgtgtttgtgatcactctgttgcccaggctggagtgcagtggagtgatcttggctcactgcaacctccacctccctggttcaaatgattcttgtgcctcattgtcatgagtagcagggattacaggcatgtgccaccatgcccagctaatttttgtatttttagtagaaactgggtttcaccaagttggcgagggtggtctcaaactcccgacctcaagtgatccagccccctcggcctcccagagtgctgggattacaggtgtgagccatcacgcccagctgcaagtagtttttaccatataataagggctcagtaaacattagctctgattaccatcatcctggtttacagatgaggagtggagacagaggagggctaagtcatatggccaggggcacacagcatgtagcagagcccaggttgtcctcaggaacctatggtctttgctgtcaccctgtgctgcttctcaggaaggcaatagcttgtcacccattaaaaatgggtagttatttgaatgaaaagcagaataacccccggaggcagaggttgcaatgagctgagattgcaccattgcactccagcctgggcaacagagtgacgctcctgtcaccaaaaaaagaaaaaaagtaaggactccttgtgtgaaatgcacatggttgcttttaacattgcagtactggactataaacatttgctggggattggcagtgaccagccatggggcagagcatggggcatgggaggggagcaaggccttgaccccgggaagctgcagtccagggaagcagtgtggacagtaagcagagatttgcagggctgtgtaataaattccaggagaaaaagatctccaggggctcggagaggcctgcgggatggaatctgtcttgatccacgtgtgtgtgtgtggggtggttagatggatgggaggtctccaggggaggtgagtcgtagggactttctgtaaaaccagggcccctgacgtgtgatgggctgtacaaattactggcagcccaactattcatttatcaatgcacgtctgtaaatatttttgttttctttttaaaccttttttgttttcctgggagacagagtcttgctctgtcatttaggctggagtgaggtggcgcgatttcagcttaccacagcctcaacttcctgggctcaagctatccttccactgcagcctcccgagttagctgagactgtaggtgcgtgccaccatgtctggctaatttttttttttttttttttttttttgtagagacagggtctcactatgttgcctaggctggtcttgaactcctgtgcttaagtgatctgtgcatcttgtcctcccgaagtgctgggattacaggttgaaccactgtacatatcccgtgtaaataacttttagcctatctattcactagctaacactttttcaccagaaggaacttctggcatctgggtgttaagctaaattaaagcctgatggtttttttcagagggtgagaggaaaatactgaagggtcaaatggggaaatgtcaaatttccattttgtcagcacactcagggcagcagtgtggaagatggatttcaatggagtaagaatggagtcagagggaccacttagaggtaattcagacaataataaacaatagaggcccccaggtaggtccttggggatgaaggcaattgagtcttggatgttaatgaggcagagtcctgggcctctctcctcctagctctgagctcttgaaccttcccaggctccggtttcctcatccattagacagaaagcatgactgatttaagtgtatgtttcaagaaaaattttaaccacagcgggaagaagactgcagcatgttttaaaaaacagaaagcggaagtgatttgataagattaatttcaacaggactgatgtggaacggctgctagcttaattggtttattagggtcgtgtagccaccctcttatgatggataccaggtgaattccaggagatatatagtcttaggtttgtaagcagtgccatttgcagaggaataaggttctttatttcttaaatttggaagggtctcatagaaataagagactttataaatatctagtaacctgtcaccgctttaaaataccgcaaagataaatgatgctgattgtcgcgtgcttggcatgatgaattatgtatgtagcgtgccccggagttctttatggttgtgcataacgaatcagcttttgttctagcttattttcagtggtagtgcttgtaaaagcagaggtcaaagcagatgcactgaagagatgtggttggtgcaggatgatcgggttttgctatcctgttctgtgcattgcttttgtttgtgctttgatttttcattatcaactttggggagggtgggagagcagccttgtggcattaacagctgcatgatggcacagagcaggcagcgactcttcttggttcatgcacctcaaaagcggccctctttttgccttcctcctcctcctctctgcacctgctttgcatagctgttaactacttttccacctaataataaaggaaattgaaataaatggttaggaacatgcccataatcttttttctcactgactttctctaaactctagacgaaactagagaggattaagaaatgtaaaacacagcagagaatgtcttttttttcctctccctttttctcttcccctagcaaagatttctttagaatctgagtgagatatcagaggtgctgtttgcatatgaagtagcgatgactatgggtggaagccagttgtaaggttgcatagtcatttataacttctttctatgttaaggttactaccgactttatgagaggagcctcccagactcaggtgtcatgcctgactcatgagtaattcattagagagggcccaagccatgtatttcattgtgggtttgtgagcggcctcatcttccataagatgctcatttgttgggctgatccaaggcaaagatccgagtagttgggagtagctccaaattgggatgagcccaggcctactgtgcatatctgtttggaagggcacatctgtctaccaagggctggttccagtgtattagccgagtggcactaggtaatcagtttacagtcagtttaaaaaagttgaggctatccttctcggtgattaattatggcttttagttcatactagattaaaaaaaatctttgcatctttgcaagaataatcattaacttagtttgtctatattattagccgaaagatacaacacagtgctcatgcagtgtagagaaatgagataacatctagagtttacatgtaagtagctatttgtcaggatatttattcattgattctagattcataaagcaggagtttccagaggccttgcagcaaggaataagcacctgggagattcaactgaatccccctcagagcctgtgcgttgggaacttggtctagaaaatggatcaggtttgtgcgctataccacttattataataaatgataaaagtcagtctggacagagtgccacagaagttcaggcgagaaagaggattcttccaactgagtggggccatggaaaaactcgagttccatttattagcggtaggaaacacatgttgagaatgaagaatggagttaaacaattggtctttccctcagatcccagggtttttaacctgttactaaaaaagtatagcaatttatggccaggcacggtggctcacgcctgtaatcccagcactttgggaggccgaggtgggcccatcacgaggtcaggagatcgagacaatcctgcctaacacggtgaaaccccgtctctagtaaaaatacaaaaaattagccgggtgtggtggcgggtgcctgtagtcccagctacttgggaggctgaggcaggagaatggcatgaacccgggaggcggagcttttggtgagccgagattgcgccactgcactccagcctaggagacagcgagactccacctcaaaaaaaaaaaaaagtatagcaatttataatgtttgaattatcattagcttattggcgtgtaataatactttgcatacttttaaaattctggggttggattaataataaaagagtagaaacattgtttttataaaaaaaattttctgtgcgacacctataggcaagtacctatgggcctccttttaattttggactgttttaggaatgttttattttatttttggtatcttaggaaccataagaagcatactttcaaaaatgtgagggtatatttttaacttttgttataaaaatgtaacaaaaagtttatatggtgaagaatttagtgggtttgcatatgctgatgaccattgtgactttcataaaaccccacagcctgtgtttaattccatttcctactagtacagacttgaagagctcagtccatctcctttattatcttgtttcctttaatctatattaatgcaccttagcagtatcagaaattttgttaatatattatgtgtagctgaactgtaagctaaaaatagatcataccaacccatctctctttctctttcttttttttcccactgtcaccttcacatttattcttagtgacttgcaaatgatgggattacaccttaaaaattgtcttgtatcagatatgtatttccccattctctaaagaaggctaattatgcaagtacacggttctttcctgattcatgaattcatatcacgattttattttcagattcctcaaggtaattgcttgttagactggttcacaggatgagagatatccaagtagtcatatgaaccgtttccgtcccattcatgccattctgtcttctgcagaaaataagtgagtcaatcactgtttatgagaatgtgtaagagactggggagagagaagggactcagtggccattttgtatcacggatcctttttactagggataagagtgatccttactggctgactgcagtggctcatgcctgtaatcccaaaactttgagaggttgaggtgggaggatcgcttgagcccaggagttgaagaccagcctgggcaacatggcaaaaccccatttctacaaaaaataaaaaattagctgggcgtggtggtgcatgcctgtagttgcagccgttggggaggctgaggtgggaggattgtttgagccagggcggcagaggctacggtgagctgagattacgccaccgtactccagcctagaggacagtaagaccctgtctcaaaaaagaaaaaaaaaaaaacaaaaaagaagtgatccttgctaagttgccatagatccctgttctaggttcccattcagcgtcagagttttatcgtctgataaaacagggatcagttagagagcttttcgcaggcaaaatgacactgattttactgaaccaatggtaaagagaagtgctcctaggttcccaggccctgttcttctgtattcttcctgcttagaaaaagagaataataaaagcacttcagctaggagtagagctttctaaaaattggccagccaaatccccagggaaaccaggatttcagcttctctgtcatcacctctgtttgaggttggcatgctttggcactttttccgtggctgcactgtcaggagagtaggccaagccgcctgaacaaggagaggtgtggaggacagtcattctgtagctgcagtaatccctgccctagtttttctgccttcctgagagaaataatagacaccacttgttttacatcaaccaggcttctgacctttttggactatgaaaattaaattcttctaagacactaagtgttaaatttgggacccaaaaatagttggactaagtggctgcctggtttaatagtggcaactcagttcagataataattactagaaatttcaaagaagttataggagcctcaccttgagtagactaggatttgacagttgagtgatatacaattgtacttaacagccattttctaaaatgaagttttctggacagtaattcatgtcaagtgtcatctgttgcttttctatgtgattccacttcaccagggctgtcctgggaggggtccttggttgtgtttagctttcatcgagttagggtagtaactcctagtctccttcctctccatcctctgtaccttgtgtctcttttcccatttctgatttttgtatccaggagtttctgatttttgccttttgagttttgtttcttaaactaagtggagctaggtttttatggggaaataatttctcagcctgtcatcttgacagtgaaacatttcttttttttttttttttttttttttgagatggagtctcactctgtcatccagggttgagtgcagtggcacaatcttggcttactgcaacctccagctcctgggttcgagcgattctcctgcctcggcctcctgagtgactgggattacaggtgcatgccaccgtgcccagctaactttttgtatttttagtagaaatggggtttcaccatgttggccaggctggtcttgaactgctgacctcaagtgatccacccaccttgccctcctcaagtgctgggattaccggcatgagccaccagacctggcctgaaacatgtttttggtttgttttttaatctaggtggaaactagataccctttctagtaactaatatgtggttcatacctaaagccaaaagaaatctcaagtaattttttggatgagacaatttcggcaccatgttatataactttatgatatcatcttatctgagtcctctctctctccctctctccttccctttccttttttccctagtgcctgtaggtgtgagtttaaagataaaatgactgccaagtgaccccaagttcaaggacttttatcctggcatgcaactggaaaattcagtttacatgatacatttcaaaagtgtctggtgggtagctggtacaaatgataggaagagagtagctaattttatgctcattgtggttctgtaagatgatgtaaatatatgaggattttaggagaaataaaaagtgatctcactgaaacagttatttgtagattgcattttgacttgtctgaaacacatcaaggttaacataagaatatttaggatatgaatttggtccaaggaacattaaaaatatttttacttggtgattctgataggaagacattgtttctactaatgtgggagggtgggcaaagaggaggaggagtcgggcagggccattttgttgcttggtgtgaatggcatccttgaatcgtgcagtgggcggccctcatggccagtagcagcagatttggttgagcataggggcagaaaatggctttgtttttttaacttacccttctgtgtttatgttaccagaacaccagagatttggtttaggtcctgctgcttgccgcacagaaagccaatcactgctgagacaagtgttgccagggaagaaggctttaatcgggtactgcagccatggagatgggagctcagtctcaaatccatctccctgaccaactaaaattgggggcttatatagtgggaaggcaatgtaactacatgccggtaaacaggaattaggaaggtataaggaagaggagttggtcaacaggaagctggtggtcactgaggcagccataatgggtgaagggtctggtgtctccttgtccaaatgcagtgatctggtgagtttcagctccttgatatctgggagccctgatggttggttttctgagaaaggaattcagataaaacaaatgcaactttcttaagttttaagacagggtgggtcaatttctaagctcattagaaactgcatattaatagattagttctgtgagatgatggggtgggtttcagttacaggtaagggccagactcttagtgaaaacaggccatggtctgggttaaggaccagtatgttagggaaatgattctctgaggaagtccaaataggtaggaatcagatggtcaaaacagaggttagaaacattttaatgatatggtctggaaaaatctaaggactagagaccacgggtgcaaggggttatggccagtggaacaagaaaagatcatacgtggtaataaatataggtaacagtccattctggatgaggtcaactgggcaggaattctttatgctccatctaggcaggaaatacatggaggcctttgaagtcccactggcatgtgtgcaaggagccactgttaatttacacaggaaaaaggaatggagggagtaacagcatcagtttgaggtcctgtgatatatccattgggggtgaattgtcccacagttattaaattatttaaaaatcagtactgtattctaagttacactgcctgatttcagtgcttactttccggctatagtaattaagacagtgtagtattggcgtaagtataaacagatagattgatggaacagaatagacccacacatacatgcccaattgattatggacaaaggtacaaatataattcagtgaggaaagaatattttcaagtggtgccaaaacaatcagataattgtattaataaaaatgaaccttgagtcattccttgtactatatacacaaattaacttgaaatgggtaatcgatctaaatgtaagtgctaaaaatatacagtcttaccaaggaagcataggagaaactcttagtgaccttcagacgggcaaagatttttactgttaaatagactatgttttagagaagttttaggttcacagcaaaattgcacagaaggcatgagattgcccatctgttccctgtccccacacatgcgcagcctcctccattagtagcatccccaaccacagtgggactggttacaatcgatgaacctacattgacacaacattgtcacacgaagtccagtagttcacactaggtagggttcactcttagtgttctatgagtttggacaaatgtgtaattagatgtatccaccgttatagtatcatacggaagagttttactgccctaaaattcctctgagctctgcctgttcatcacctccaccccctaacagcagacattttttctttttagcatagaaactaaataattttttagtttaagaaatttttttaacttaatctaaatttaaaactttgggtcttcaaaagatctgttaagatgaagagacaatctatagtctaggagaaaatatttgaaaaatatatatctgattaaaaaaaaaaaacctcttatagctgagacaacccagttaaacatgagtaacatattttgaatagagattttccaaaatatgatacatgaatagcaggtaagtataagatgtcaacatcattaatcattagagaaatgtaaattaaaccactaggagatactagtgcatgttccctagagtggctaagatgaaaaagactgaccataccaaatgttgacgaggagctgtgacaactggagctttcctacgctgctcttgggagtggaaaatgatacagcatttggggaaacagtttgctagtttcatataaagttaaacacatgtttactagctaactcagcaatttcattctgagttaattcacccaagggaaatgaaaatacattttaaaaagatacacaaatgttcataacagctttttccacaattgccacatactggaaacaacttgtctggtgcacagataaacacattgtggtatgcgacatagcaaggaaaagagatgaactactgataaagcgacatggatgactctcaaaagcattatgctgagtgaaagaagccagtcgagtacatattgtatgactccatttatatgaagttctagaaaaggcaaaactgatacactgtcagaaagcaggtctggggccggtggtatggggaagggatttactgcagaggggtacaagagaacctttttgtggtgacgggaatattctacctcatgactgtagtggaggttacgagactatatctgtcaaaatgcatcaagttctacgtttaaaattggtgaattttattacacgtaaaatgcctttattatatcttgttaatttaaaaaataagttttgattatacgatttccttagatgtcctgaaacatgctgttttcacactaatttggtatataccttgtgattatatcctttgtatatgaatattgtggtaagtggaacattgttgttggagatatatccagattttctaccttagtttgtgtgattgattatattctgttagactgaaccacatgaaattgttgatatccaatcattcttgacctacaaaagcagcaatttcacgtggcataagtatagtagaaattttgtttgctttttaattcattggaaagacttggcaatggtcacatctcgattgtgaagtttcaaggattttgtaagacacaaggcctgagtgttctgttttacattacatgttttattttgctttaattcagttcggtagatgttttatatatgtctaccacttttcaggcattctacttgaaattacagtggatgaatgtaaagatgagtttgatattacctcagcccaagaaacgttaagtgatgaaattaaaaggcacgtgtagactttctgtcataatcgctaatagggactgtgaaatagaactcccagttcttgtcatgtccattgcagtgattataataaggtatttgggctttcatagtgatgaaataagtggttgtgggtttgtatacgtatgtatacataaatatgtatgcgtatgagcccagaagaaatggaaacgagaccaatgatttaatttgcatgaaaattagaactgtctgccaagagcaaacatctctctcaccctttttcaagagaaaaaaaggtcttgtagtttggcatgactcagtggatgacctcacactgattctcctttagttattgcttgaatgcgtggagccctcagtcctaagtgaggcggtctgggtgatgttatggcatttcatttgggaaagcggctgtcacttcatccttaagcctcctgtttgctgtgatggtggcagagccactctcagcaccacaggaagagccccggggaattcctgaagacacattctagagaatccggtacaagtgtatgtaggttggtcaccttgatgccttattttctcaggcttctagtagagatgcatgccagcaaaatggaaaggaacagagggcgttcttgaagtttcctaactggcgtattttctccttctctttttctaataattaagtacaggggactgagaaggcaggggttgttgttatttttacatggaatggacctaacctagcagtcagatgagattgttgacgcgtagcacagtctgttatctttgggcatctgccaccaaagagagtgtacccaagaagggctgtcgtgtgagtgggatgggtttccatcttttgttctgtgctctttctgtggaatctcaggcctgcgtgtgctccctctgaccgtaccttgactcttgatgaaggatttgcagccctgagagggagcaggcagacccaaattaattatttccattttttttgtggcactgtgggacaatgggagagaatacaggctttggagccagccaaatgtgtttcagatcctaaatcctccacctaaggtatgcagtcctgatgggtaagttattttaatttgtttgaactgccacttaactgaaaatgggattaataccagatatcacttaaaattagtaaaaaatacagttgacccttgaacaatgcaggcattgggggcaccgaccccccattcagttgaacatctaacttttgactttgcagaatttaactactaatagcctactgttgactggaagtcttactgatagcattaacagtcaatagcacatattttgtacattatagatattagatactatattcttacaatatagtaaactagagcaaagaaaatgttactgagaaaaccgtaaggaagaggaaatatatttactgttccttaaatggaagtaaatcatcggtgaaggtcttcatccttgtcatgttaaaattgagtagactgaggaggaggaagaagaggaggggttggtcttgctgtctcaggcatggtaggggtggaagaaaactgtcatataagtagaccagcacagttcacacccgtgttgttaaacgatcaactgtattttattaagctgtctttgaatagcaccaagtatcttagtgtatgagaaggcctctgagaagttccacagttaggaaacatggtgaacttttttttttggtgtgaggggcacagagtcttgctctgtcacccaggctagagtgcagtggtgtgatcttggctcactacaacttccacctcctgggttcaagtgattctcctgcctcagcctcccaggtggctgggactacaggcgtgtgccactacacccatgtaatttttgtagagacggggtttcgccatgttggccaggctggtctcgaactcctgacctcaagtgatccttgcatctcagcctcccaaagttttgggattacaggcatgagccatcactaccagccgtggtgagctttgtttaaccaagcatttttcaaacttattgactgaagaatctttatgtgtgtgtgtatgtgtgtgcatatgtaagaagtaacatccgctggagctggtattgtgcagaaaatatgttgagaaatataaaacagatatctggcttgtgttcctctatatagtcttttttgactgagaatgctttatccttgttgttacggatattttcactttgtttatttctattttggtctgaatcatgagtgtagttgatccttgaacaacatagatttgaactgcttgggtccacctcgacgccacctgtgcatacggagggctggctcatctcatatgcaggtcccgagggccaacttcaggactttatgcatagattttggtgtgctggggatgggggccctagaacccaaccccccatatatataccgagggaggactgtctatttttgttttttacctgtgaggccatcgccacaatgaagagagtatcccccaaaaggcatatttttaatatagttgtaattatagcattgcataatcgttttcagtaacataggtctcatctgttgctctaggtcttagtaaaataaatcactcttgttgaacccttcctaggctccaaaactggatgggccatttaatataattttaaatattaaatttaaattttctttcatttattagaattttcaaagggtaataatgttatatatttagattttgatgacatggagacatctgagacttgcttagttttaaaaaagcaaaatttatgtcatacagctcttgtaaggactgaataaaataatgcatataaaaatgcctaagacaatgcttggcatgtagtgggcacttactaaacaatttccttccttcccttgctggcttcttaactactccctgccttgtataccccctgtgctccgtcccaatttctgttcagatactagacagatggctgttgctttgggataggtcaaaggctgtcaggcgtggaggcaggcaaatgacccagatcagtgaacaccagtcattgtctcagagcattttgttttgttcagctcagctatttgaatcatcttggattttctcatttgtttagaaaaaggtttccccaaaattggtggtgttgggttcctgatagcaaaatgtatcaacaagtgggcagtcagcatatggaatttgcccaactctacagggaaacttgctttaggtattttaaaagttaacttgtcaatgtcactgtaggacagttatatatctactgagtttacaaacaaaagatttttttttgttttttttttgagacggagtcttgctctgttgcccaggctagagtgccttggtgcgatcttggctcactgcaacctctgcctcccgggttcaagcgattctcctgccttagcctcctgagtagctgagactacaggcacccgccaccatgcctggctaatttttatatattttttggtagagacggggtttcacaatattggccaggctggtctcgagctcctgaccttgtgatccacctgcctgggactcccaaagtgctgggattacaggcgttagacaccgcgccgggcctgaactcatttttaattagaattcttattatttcagtggctgaatggaggaaaaaagaaaggacctaagcccagaaaattcacaggtttgtttcagggtagaaaaatttggcatattttggcctggaagatatctcattatggaatcagaaatctgaaagggatattaaattaggagcaaacttgtgctgtgttggttaaccactgaaagttgcattggcagtttagtaactaaacaatagggccacacgcggaatttattgatgtctcatgaactttctgtttaaatctttattgctttgaattgataggcttcttttttcccttccactttgcttaagggactgaatctgtttttggcattctaagactctttttagaatttggcagtgcctctctaggatgttttcttctgcactgcctccaaaacaaaattatgaacagcctggctctttcggtatctctcctcttttttttttttttttttttttttttttcactttcctgatgtgaaagtgtcaggttttgagccagtttgaaagatgagaactagaatatatttctctttctgatctagagaatcctagtggcttctagggcagtgtataaacaaagccctgtggctgcaaggtttcccgtgtgcagcaataaactgatacatgccggtgacaggaatctggctcatgggcttgaaaccatccattaactcattaattgaccagacatcatgggggtctgctgagtgccatggggatgctctgtgctgggaaagatgcaaagatgaataggctaggaataaaagaccaatttcattttttaatgtgtcagtatttttaatattgaaatgtaggaccttgcaagtaaaatactattaagctaatttcccaatttagagtctttgaattattgtcttggatattaaatatattcagtgtttcccaccagtggatcccaaagcctcacctgatatgtttggcaattgtcaggccctcttttttatactccagaggaattccaacaggaaatatgtacacaccatcccttacctcccttgcttcttttcttttctgcgtcctactttgtttgatcttgaaatacggggaagtatcttctgggcaagtgctgtttctgtgccaggctgtgcaggtcatgcttgccccagtgccatgagaaagacactcgagtgagctcgggacagatctctccagcactgtcctggcttgaccccacctgaccagtgactcttgtaccatgcccagctcctttggctgctggagcaaaaagatctagggagtttgttttccaaataagggccccagatcttactttcagagctgtgcatgtgaggagttcatggggaatccctcatctcagcagacatggggaagaccgtcttctaaactgtagttctgaaacaggtaaacattcagtccccgctcgctttcaaagcacaaaagtgaggaggcttatttggcattgaaataactgagcatcttttctcatctgtgtttctgaatctgttatggccagtgttttataacccccttcacattaccttgtcagtaacttgcttcagatgaaaataacggcagaaagcataattttttgtttttttcttttttgagacggcgtctcactctgttgccgaagctggagtgcagtggcgtgatctcggctcactgcaacctcagcctcccaggttcaagtgcttctcctgtctcagcctcccaagtagctgggattacaggtgcctgccaccatgcctggctaaattttgtatttttagtagagagtaggttttgccatgttggccaggctggtcttgaacttctgacctcaagtaatccacccgcctcggcctaccaaagcgccaggattacaggtgtgagccaccgtgcctggctgaaaacactgtagcgagttcatgaatcaggattaaagaatctgtgggatatatagaatgatagaataaattctataacgttcattttcattgtgcaggatggagacattagtgtgcatctcagttaggatttaattgctccttccctgtgttcttgaaagcgcttggaaagcgcctccaatcctccattgtatgattctagttcaggtctggctctttcaccagacaatgagctcctgtggtaagatgccatgtcttaattcatctgttttccgcttgtcctaatacaatgttaagattgccagataaaatacaggatgtcggctgagtgtggtggctcacgcctgtgatcccagcactttgggaggccgaggcgggtggatcccctgagcccaggagttcgagaccagcctgggcgacatggcgagacctctctcaacaagaaataaaaaataattttggtatgctgggggtgggggccctagaaccaaaccccccatatatactgagggaggaccacgactgtggtcccagcttcttgacaggctgagatgggagaatcacttgagcccaggagatggaggctgcagtgagctgtgatagtatcactgcactccagcgtggggtatagagtgagatcctgtatcaaaaacaaagaaacaaacaaacaaaaccccaaaaacccaaaaccaaaaaaacaggatagccagttaaatttgaatttcagataaacaataaagtgttgcttatgggtgggtctcatgtatacatctattcttacatctgaatttcacgtaagcaacgaataatttttagtgtaaatatgttccatgtgatgttctgatttagtcataatacatatttttttctttcttcctttttttttttttgagacaaagtccccctctgtcatccaggctggagtgcagtggtgcaatcttggctcactgcaacctccacctccaaggttcaagcaattctcatacctcggcctcctgagttgctgggactagaggcatgcaccacctcacctggctaatttttttttttttttgagacagagtctcgctctgttgcccaggctggagtgcagtggtgcgatctcagctcactgcaagtacggcctcccgggttcactccattatcctgcctcagcctccggagtagctgggactgtaggcgcccaccaccaagcctggctgattttttgtatttttagtagagacggggtttcactgtgttagccaggatggtcttgatctcctgacctcttcttgacctcccaaagtgctgggattacaggcgtgagccactgcacctggcctaatttttatgtttttagtagacacggggtttcaccatgttggccaggctggtcttgaactcctgacctcaagtcatcctgccaccttggcctcctagagtgctgggattacagctgtgagccaccacacccagcgtatatttttgttttgtaaattgggcaaccttatacaatgcccatgacttacaaaggattttttgctcctaaatcagtgtaatttaataatgtgaacacaactaagacaaatcaaggtgttcatggagttggttggtgtcttttatggaatgcaacatgggaattggaaatagtaattatccaccttcaccagtgtgttagtgagtatggaccatttaacctacaacagttggataaccttgacaatagaaataggtagctaagccaggggtggtggctcctagtactttgggaggccgaagtagggggatcacttgaggtcaggagttcgagactagcctgcccaacatagtgaaaccctgtctctactaaaaacacaaaatttgccaggagtggtggcgcatagctgtaatctcagctactcaggaggctgagacaggagaatcgcttgaaccctggaggcggagtttgcagtgagctgagattgcgccattgcactccagcctgggcgacagaacaagactccatctcaaatatatatacgtagctaggacctgacctaatggttgtacccacactgtttgccttgtacgtgccaggcactagcaatctaagttgtgtgtggttttttttttttttttttttttttaagaatgagcagacaccttgtgcgattgtccaggttaactaacaaaaatagttgtctgggtttatggaactgtaattacgagtcagatcctggttcccttccgctttctctgctatttctggttgctcctttttattcccaaaaggtagaaaggggcaggtaggacaggagcttgccgcctgttgaactagagggagtagcttccgagcaaactgtgacaaaatggggtattttaagcctccattttttttggggggtatgtgagtgtgtgtgtgagtcggtgtatatgtacacagtgcaagtaaataagcctgagtgggtggcaagagccttgtttgtgtagtaggagaaatggagcctgcaggggcatagtcggggtcttgagagcagacacacggactgagccaggcagttgctgctgagaacagaatcaggacctcctgcttcctttgggtgatattgggttttttaggccaccttcccagccacaaagtaggactctgaaatacatccgggtataaatgttcttatggaaatgcaatcacttctgactttaagtatgtagaagtgagggctcatacccttctcccagaatgtaaatttgactcatcggggctaacaacaatgatagcctaatataagaaactgtttaccggactctgttctgatgtcagccaagctagagctttgcatggtgggatgctttctcttggctgtgccctattagggaaggcaaaaatagaaagctttttctctggacttcagaacggaattaatgcatggttattaaaagcatcaatggcaaatggccatggaagtcagaatctcagccttaatgaagggcgatggtgtccacagaaccaattattttgcaaagaaataaaataataaaatcctcccattggttttagagtggctgaaaccagcaggcaccaggtctaaaccctcttgtgggtgtgtgtgtttgtgtgtatgtgtgtgtgtgtgtgtgtgtgtttgagagagggtctcgctttgttgcttacgctggagtggcgtgatctcagttcactgcagcctccgcctcccaggttcaagcgattctcttgcctcagcctcccaagtagctgggattacaggtgcatgccaccacacccagctaatttttgtatttttagtagagatgaggtttcaccatgttgcacaggctggtctcgaattcctgacctcaagtgatctgcccgcctcggcttcccaaatgtgattacaggtgtgagtcaccgcacctggacattgtggtatgttttaagtactcacgctaatgacatttataccttgcttggcactcctgaaacctcagctctctggaggacagaatatctgctaagggtgcgactcccatggtgctggagaggggtctccttcgaatggaagccggcattccaccacccactccctatgtatccaaaactgggcttggcatcgctgttcctgagggagcgctctgtccttattagggatccgcctggtgacctcagatttacacttaagcttcaactttgttgagggaaaacattttttctctgtcaccaagagaatggagaacactgtgatcgcttttcaagtctcacctgccaggaaatctttattttgcggggggcatcacaacttcctctttttccatgtaccttagtttactattactttaagtgttttggttggattaacttcctgtatttgttcttattttaaatacattctttagttaaagtgttactcagtgaatggaaagagaaaaacaaggcaagaggaaggggtataatatgaaagaatagagttttgtttccagttttgttttgcaacagtagataagaactgtaaactttctagtccctggttttttaatagtatatggaaacacgattttgttgtactacatggtaggatgaatttaattaagctgccaagcaaacttgttgatttagataacaactccacacgtagagtttgaagagcctgttttgtggtatctagacctcacttttaagagtatttccctgaacctgtccatgcatttctgagacgtttgtgtgctgactgtttgttttatgtttgtgcaaagcctagtgtcctactgacttgtagggactcattgaaatggcagaaactgtgtgcattttaagtgctggaggaatgctaaatattaatatttgggatcaaccacaaaatatagtttctatttataagacacccaagactaaataaactgtaggacaaatgaagtgtgcacattctttttggtaacattcagcatcctgaaaaccaccaagggttaggaaaaagagaaaaatgtatttttcatcttctgtaattcatctagccttgggattttctcctaacctcttgaggcacgcttatatacgtgaccctatgtaagacttttgggtgataaagtcgaggagattcactaaggaggaacagagcaggtgtagtgcccagggtggtaaaaccacagatggagctatggggtgaatatggaacctgctagctggagatggggaaagagaagagatcgctgagattacgtgagtgttgaagggttagatgaattggtgtgtagcgggtgctgacctgatctttctgggtgttctgatttttttttttttttttttttttgagacggagtttcactcctgttgcccaggcacgatcgccactcactgtaaccttcgcctcctggattcaagcgattctcctgcttcagcctcctgattataggtgtgcgccaccaagcgaggctaattttggggtttttagtagagacagggttttgccatgttggccaggctggtctcctgaccttagtgatccacctggcttggcctcccaaagtgctgaaattacaggcgtgagctaccgcacccgaccctgggtgttctgattttatatttactaataaactctgtggctttggacatttcagaggctctggttctatctcctaatctttaaaatgagaagctggatgaaatgatctctaaagtctgttccaatttaaaaattctgtcgtttgctaggaaaatattagcaccacagtctatctctctaatatgggaagttttttcagattgggtatcagtgctattaaacatttaataaaaagtgggaaattattagtgtgtattgtcacagacatgttaagctatttgcattttaatgaatgaaagagaactttaactgttaacatttaccaaggggtgtagctgagagttaatagtttacaaggggtgtaggtgagagttaatggtttataaatgttaactagtttaatagctgttagttgcctcgggatttaaaggtatacacactgatttttggttttggtagcctcaaacctagtcaagaatcatacaaaattatcttcattagaacaagcatagtattagccatcagtgctatgtaaggtaaagatttcaaactctctctgaggcttcattaaattcctttgctttcctgaaagtttctaccatcctgagaaagtctagcagcttcttcagagacctggttgctttctgtctcagaatatttaaaggaaagtacattttcttaaaatggagttttccctgggtcataccaggcaattagggctttgagccatgaaccgtcttcaggatttggttccctctgagagaaagggaaaggagataacttttgcccttgctagaaagtaaagcttatctacccttacctgtttgaagtttagacaaatagtttatttatacaaaagcatagtttcccttgaccacaatgaagtgtccacttggactgctcatttcttgaccaggagacacaaaatgcattttcagcccaggggaggctctttggggccacagttggactgaacaggaccgcagctgtgaaggtctaatttgcaactggcaaatatctttataataaccccacgtttcttactgacacagaatacacacacgtgtaagtgcacacacattatgcacatgtggggtggtgaaggcagaaaatcagtgaactgaaattacttgctgcaagtattactttctgcaaggctttcagaattacttgctacaaggctgggtgcggtggctcacacttgtaatcccagcacttcaggaggctgaggcaggcaggccacttgaggccaggagttcaagagcagcctgaacaacatggcaaaaccctgtctctattaaaaatacaaaaattagctgggcatggtggctcacgcctgtagtcccagctactcgggaggctaaggcaggagaatcgcttgaacacgggaggcagaggttgcagtgagctgagatcgtgccattgctcttcagcctgggcaacagagctagactctatgtctccaaaaaaaaaaaaaaaaaaaaaaaaaaaaaaaggtaaaaaggaattaattgctgcagagctgttctttgcattgtgtacctttaccctgctagtgggaggaagtggtcaattccatcatgtagcaatttaagaaaaaagtaagtataatagtgttttgaattcagaagtaaatccctcttcctaccttcagaagaaaaaaggtaacttgatttaaccagtttttaaaaacaccagctttgagaacggaaaccgacttcgcactgtttgattaaattggttctgtggctatttaattcatttgtgttaagtagcctgtgggccgactgcttgccatagcagtctgtgtttttcatttgtttgctttaaaaaacacgtcctaatgtaaggaccaaaatctttgtccattctctattgagtactcaatttatggtttaaaaataactacctcttgcgagatctgattgtttaaaaaaaattaataactgcccagctccgttagtagtaaaagggcttgtctttatctcatgaagtattttaattcaatttccagttaaatgatcaggggtttttgagttctgcctgagccgtttgccctttacgtgtgtctctttatgttaatggctttcacttttattcctttgcctgcagtggagaggaaaatgaagtgggatggcatggcttcttttttttttttttttcttcctctttaggcctgactggccctttttaaaatggaaagtagaggcactccctccaaatggctaacacgggttcagcggtgtgtaaattggagtcataatcccttctttgaagactaggaggaggctattatgataaatgttggagaaatgattaaagagatgagaacagcaggatgcagatggcaactgcaaaccctgtggtgtcaggtggaacactctgggagctcggctaaaagggacagagaagcaaagggactagccagtgcagccctgggcgggctgggtggaaagcagccgtcccagatgattgtcccagcagttcagttgcaacccagtgtctaggctgtgctttgttttttctcaccttttatcctaggatggggaaaatatcccctaacagggaaggatgtttggatagtgtttttaatgttacatgtgtgcatcacagcaagtatactgcctctttcaatatttacaaatctttttttaaagcataactgtggtgtgaaattgaggttgttcagcaacatgggctataccagatattgattagactaagctgagcatcccttaatgaatgaattgactttaaacacctgctgtctgaagcggttgggaatagaaactctcctatcactgttgatgataaaatggaattttagttcatacacattttctgaaggtccagagtgtgcagggaatttactgcaaaattgttttatacgtctgtcatgagatgtcttcatcaggtagttagtaaatgacaattctaagcatagggctctttttatttcttagtatataaccaccagctgtcttatcaataatgaatttccattctgtcttttgtcaagtagatcctgcctgcttctgagtagatcctttctgcttctttgtttcttaagatatttctggccgggcgtggtgactcacacctgtcatcttaacactttgacaggccaaggcaggtgcatcacctgaggtcaggagtttgagaccagcctggccaacatggtgaaaccccgtctctactaaaaatacaaaaattagctgggtgcggtggcacattcctctaatcccagctactcaggagactgaggcaggagaatcacttcaacctgggaggtggaggttgcagtgagcccacatcaagccattgtactccagcctggatgacaagagcaaaactctgtctcaaaagaaaaaaaacaaaaaatatttctaactagcgagtatacacaagtacctgtgtctccagtcttcctgccaattacgaaaaatatcattggtgttagcctcattttggtgattcctctgaaaaatctaagacaattgtttttctgagtgtgtttggaggagggatgttggaattcactcattcatttattcatccattcaacaaatatttattgtgtctggcatatagtagatgcataataagtttattccttcattctgcaagcatttgttgaatgcagtgtatcaaaggtcatcgtagacactgcacaaagtcattgtttttatgggttttacatacttgtgatgagagacagaatgatgggcggggtgggtcgctgctattttaaataaagcagccaaggaaaacctgtctaggagggctaattcagcagaaccttgaatgaagtaagggaatgagcaatcttattatgtgagggaagagcatttgaggcagggagaacaagtgcagaggccccgagacagctgtgttcttggtttgtttgaggcacaacaggaaggctgcaagcaggggaagaaggagaaaagagatcagagaggtgccagcagcagaggggagattctgtgaggcttgggaactttgagctgagaacattttaaatgaactagttttaaaaggtcctggagagtgtgtggtgaataggtaagggtgaaggcagggaggtaaggcaggagacttttgcagtagtttgggcaaggaacactgataccttggacttgcatagtagcagtggagctggtgaccagtggtcattttcttctccttctccttctcctcctccccctcctccccctcctccccctcctactcctccttctcctccttcccctcctccttcttatcctcctccccctcctcctccttcccccccccccttttttttggagacagagtctcgctctgtcgctcaggctggagtgcagtggcatgttctcagctcactgcagcctccacctcccaggttcgagcgattctcctgcctcagcttcctgagtagctgggattacagatgcgtgccaccatgtccagctaatttttgtgtttttagtagagacagggtttcgccatgttgtccaggctggtctcaacctcctgacctcaagtgatccgcctgccttggcctcccaaactgctgggaatacaggtgttagccactgtgccaggcccattttctagatctgtttggaggatcgagttgaaggggttgttgatggatttgttctgggttttgagagaaagaggtaaagacaaaggtttttggcctgacaaccagaaagatggagttgctatttattgaactgggaaagctagggagaggagcagattttgtggggaaaattaaaattgggtgtgggacccatttagttttttgctgtggttgttatgaaaagctattattgtctcattcagtcttctctatgcttttctatagggataagtgtgcttttgttaacaaatctcagagtataacactaagcttaagatagggaaatattaagtcaaaaaaaggaaaattcaggataaagactagaaaagaccactgaggaagaagcattccccggagcctgccatgggccccccagcaggagggtcttgtcaaaggccatttaatgaaattataagtgtctcattgagaacctgtttccggcagcctcacagatgccactcataatcttctgctcctgggtctgccgctagataagcgtgcacccaggcttgggtttcactacccggtatgctctgtgatatgctaatattactgaaaaggaatatgattttctgctgcttcacagatacatcaattgtaatcttgccaatattggtattgatgatgaaagcacctttttaaaaaagtttttaagtgtctataggactgtttctgacttttatgtgaactaacctagaaaactaccattatttgttcagctgattaaatctgaaaaagaatggcagttgaagcagaacataaaaaatccacttgattttatcctctttgcatatgaatgacagagggtcagtttaaatttctgttcgtaactctaaagggaaaaacacatgtgcattcagaatactgagggtagttgtatcttaatccattttataggtcttcttagttttcctcttactccaacaaaaatgaattcttttcttcttcttcttcttttgttgctcttgttcttatcttcatccaaggattgctttgtcatgcagatagttttgggccttcttcttgaaaatacagcaacaacctcactgaccagtattagaacttaaatttgcttatttggccagtggttatggcctctgtgccagacactgttttgatgtagtagtagtgccaggtaacacccctcctctctaggagttgaaaatcaagttggggaagaggaatggtcagtaatccaatatgccaattataatttaagctttgagaagatgtaagagaggttcaggggatagagtgtgatgggtggtgcatgagagatggtctgagaaggaggcatctgaagcagagagctgaccttgcggagcttcccgtttatgcccgagaaggtggacagaagccagccctgcctctgcagaattagagcacgccagttgtgtcatttttagatcttttcagataagaagctggtgcaagagtcatgctaactttaaacaatgacaggtgtgctgtgtatatgcctaggcttatttgtattttggtaaacaagactggctaagtgtgaatagagtcatgttttgaagaagtctggactatttcctaaaatgagcaaatgacacatttgaagcctgcatctggtgagactacctgtgagtcatttttcccattttaaagagaaatagtaatattgagacaatgattaactgacttagaatcatacagtttttagggctcctatggaaggacctttggagacaacgttggttgatttttcctgtttctttggatgacaaagctgagcctgagaaactgcccacagttctcttgctaggttagtagtagaagggctgacactgcattctgggcttgctgacttcagagttctttcttctccatctgtcattcttttcaaaaggattagaatttgcgtttctgtgcctttcagcatgacacccatgtaggtagagtcccagagaacagtggattgttaattacttaaattgatcccacaatcccttataaaataagattctgctattttttaatattttgtcctctttaggcaggtaatactgctttggttaatgataaaacagaggtaattaattcttcaatttctacctttccatttttggaccttagcgtaaaagttaaatttaagagaaatgtgactccttttccagcctgtaagatagggatgagttcgctgatgtttatgggagcaggtgcagggtgacgtgtggggagaaatgagcctctgccctctcttctgacctgcttcttccacaccggacctgctcacctttcactttcttctttttctctcccaaacagaccccgctccctgctttctctctcactttctttttatttatgtgtttatttatttttgaaacggagtcccactctttagcccaggctggcatgcagtggcatgatcaccactcgctacggccttaacctcctgggctcaatccatcctcctgcttcagcatcctgagtagctgggactaaaggtgcacaacaccgtatctgagtttctttattttttgtagagatggggtcttgaaatgttgcctaggctggtctcgaactcctggcctcaagtgatttgcccacctgagcctcccgaaatgttgggattacaggtgtgagtcacagcacctggccctctttcgctttctttttttttttttgagacggagtctcgctctgtcgcccaggcgggactgcggactgcagtggcgcaatctcggctcactgcaagctccgcttccggggttcacgccattctcctgcctcagcctcccgagtagctgggactacaggcgcccgccaccgcgcccggctaattttttttttgtatttttagtagagaccgggtttcaccttgttagccaggatggtctcgatctcctgacctcatgatccacccgcctcggcctcccaaagtgctgggattacaggcgtgagccaccgcgcccggcctctttcgctttcttagatgctaaccagatactactcttttgtttttctgttaattcaaaccatgctaatttgtaaatgcagattgcaaaggcccaagtgagaaattggagagatcacagggagcactatgagcatccgtcctgtgtcctgcagcatcaggtgggaaggaagaggaggcagtgtctgggatttctcatgatggtgcatgggttactaggattagggcattgcttctctagctttaacgtgctgtccgatcacctgggcaccttgctcaaaatggatgatgctgagtccagagattggggcaggggctgaggttctcctttccttaccagctcctgggtgatgccggtgctgctggtgcagaccacacttgatagcaaggctgtacggatgaggcttctagtgcgatttacacgtgcgtcctgtgtcactttgatgttgtgagttactgtgtaccgaggaaatgttagcattcaaaatcagacgtggggtcgggcatggtggctcacgcctattacaatcccagcactttgggaggctgaggtgggtggatctcctgaagtcaggagttcgagatcagcctggtgaacgtggtgaaaccctgtctctactaaaaatacaaaaattagctgggcttggtggtgggtgcctgtaatcctagctactcaggaggctgaggcaggagaatcgcttgaacctgggaggcagaggttgcagtgagccgaggttgagccaccgcactccagcctgggcaacagagcgaaattccgtttcaaaaaaaaaaagaaaagaaaatcagacctgtgaagttacagtttctccggaagaaggtagggtgggtcgtgctgcttctttcaggacttcccttgaaaacctgcagcaggctgtccggttactaagatgattataaaggcgcagccttgttggcactcagcctcccacattgcttggctcattctttcaccgtagagaaacaccggctctgattatttttaactgcatgccttgctgagactgagtaggggtttttatttctggagctaatgcagaacacacatccctctttctttaaatgcagaaaatctcacataaggttgccaaagtaggatggcatatttcctaaaattctgcagcaacataagggtggcttattctgggatacgaacaggaagatcaagtctttttggttcaacccaaactctcgtacccgtggggtgtggcccatgtggggtctggaaggcttcgtggagcagggaagagtataaccaggggctggcttcttattcctgttcagtctctctgcagcctggaaggagctacttaacttccttttggccttaccattgccatttttgaaataaaagtcctccactcgactgtctgaccgagtgattgtcagctcacaaggcctcttacattcagcatgtttgcttgaggggaatgagtgagtgttttacatgtggtggatccattcccagcaaacaacaaaaagaagtctttttttttttttgagacgaagtcttgatctgtcgcccaggctgtagtgcagtggtgcattcccggctcactctgcctcctgggttcaagcgattctcctgcctcagcctcccgagtagctgggattacaggcgtgcgccaccacgcccagctcatttttgtatttttagtagagatggggtttcactatgttggccaggctggtcttaaactcatgaccgcaggtgatccgcctgcctcggcctcccaaagtgctaggattacggttgtgagccaccacgcccgacccaaaaagaagtcttgaagtacagcccgccatcggtatttttagcacatgaagaatatcttaaggaatatgcgaaggagatgttacataggtagcttgacctttattaaggcacttggtaattgccctacattttattattttttacttatttaaggttaaatgaagacatttaaaatattacatgtgatggggcttatagttttacatacaatgtcatagtttgtgtgccttgtttaaaacaaatccaatatgagaatatgctcttgtgtaagaagtgtatcattttactaaaggatttataagatatttgaatcaggaatcctgtagtactttaaaaagtggtaccttctacaccatctttttaggagcatgtttatcacacaaggcaaggcaaatcactaggttaggcatccagtacatagaattcgactagaagtgtagtgaggtgtgagatttagggggacagggattctaagaaccaacggcatctaactaatggacttgttcctaaaggaatgttgaagaagtgatcatccatcttaaaagattgtgccttcagaagaactgaaggatacttttgctttcgtgtacagtgtgccgagtttgatggtatgtcattaccgggtcgggtccatgaatgaccggcaccatcatggctgccaagtccttgagatttgaacaagatgttccagatggtaatgaaccattctttttttttttttttttttttgtattgagatggagtctcactctgtggcccaggctagagtgcagtggcacaatctcggctcactgcaagctccgtctcccaggttcaagtgattctcatgcctcagcctcctgagtagctgggacgacaggtgtgtgccaccatacctggctaatttttgtatttttagtagacacagggttttgccatgttggccaggctagcctgaaactcctgacctcaagtgatctgcccgcttcggcctcccaaagtgctgagattacaggcgtgagtcactgtgcccggccagtaatgagcattttgttgcgtccctggagtcttcctaataatgaggtagtggcagtggggttggaacagtaggtgcttggatatgtcttttgatggataacaattccttaaaaacattgagttacactgtacaaacatatatgtgtatatatacgtatatgtatatccatttactagaattaagagaatgcattcaaatactagtgggtttgtatcttttttttctttttcctccaattattgtgtttatcttgacttgctattaaagctctggaaatactcatctgagacagtccaggcatggtaggttctggatcttccactgtaatactatgtgaaatgagatattctttgtttcttagaaacaggtggattcagccaggtgaccgttactctttgggctcgtgttacaaggatatcatgatggtgtttcattgatatatgtaatcaataatatattacgttatttcagccagacctaggaataaataatactgctctcttttattgagagtggcttggtgattttcaaagtttgtttatatgccatcatcagatctgcagagcaagcttatgagatgaggaaggcatggattggtggacataagaaatggagggttaaggcaagtggttacttacccacagtcactaatttcataattggtagatttgggaccagaactaggatatctcatttccagcctagtgttctttctgtgatatttgttaaaggggccatctggttaaaaggatagtctggctctttaatgatgatagctttcaaatatataacactttacagtttgacaggcttttacatagatagcacattttcttcacaaaaagacaaataatggctttacatatgttggatgaagatgtggagaaattagagtctttgcatactgttgagaagaaaaaaaaactttatttttctctttctcagtcagtttttgcagcaagtcttttatagtccttattttttttttaattctctcttccccaggtttaattttcttaagaggcagatttataatactaagtaatatccagaatagatagttcctgcaggaaatgggtttattgttctcataaattttagtggtctagtttgtcaatattactgtcatttcttaatagcatttgtctttctgagtagtaacttgtacttgaattaaaatctttcacatgtatagagtggagcaaagagaccctgcatatattataaaatggtacatgcctttgcttagttgtcattgtgttagatcagagaaagagaaagtcctttaaaatatgaaaataactggtactcaggaagggagaagagaagcttgaaggtacgtggattttttttttttttttgaggcagggtctcgccctgttgctcagtctggagtgcagtggtgcagtctcgactcactacaacctctgcctcccagttcaaccgattctcctgcctcaccctcctgagtagctggaattacaggcacccgcctccatgcccagctaatttttgtatttttagtagagacacggttttgccatgttggccagggtggtcttgaactcctgacctcaggtgatccgcccgcctctgcctcccaaagtgctgggattacaggcatgagccaacgtgcccagctgatatatggaattttatgtgaggcttattagaaggtgtggggtatagggggaagaaggacagcttcgcttcttttcatctttcaatatgaaaacacagcaggatagcgtaaaatttttttaatgatgtatagtttgcatacaataaaatgtaccattttaactatacatttgggtgaattgtgacagatttaggtatctaccaccacaatcaagaatatagacccttcccctcaatcctggggttgctttctgcctcttcccagccaggcctccctcatgccagcctcaggcaaccactgatgggctttttgtcactatagattagatctgccttgtctagagcttcgtagaaatcctaacggatagtcttttgtctgaccttttcactcagtgtaatgtatttgacactcactcttgaggtgttgcacaggtcagtacttcatccatcttattgctgaatatgccggtttatttatccattcaccagctgatagacatagaggctgtttccagtttggggtgattataaataaaattgttatgaacatgcatgtacaagtctttgtgtgctggacatgtcattgtttctcctgagtaaacatgtaggggtggaatggtgggtcacatggtgttaaatcatttcgctgattttactgagcagtcataatactgttttctgtagcggttgtaccattttacattcccacccacagtgcacaagagttccagtttctccacatcctagctaacacttgttatttatttatttttttaatagtagccctcctaatgggtgtgcagtggtatctcattgtgttttaaatttgcatgttcctaatgataagtggtgttgagcatcttcttcctcttctttttttttttcagttgagatggggtctcactctgtcgcccaggctggagtgcagtggcgcgatcttggctcactgcaacctccgcctcctgggttcaaggaattcttgtgcctcagcctctcgagtagcttgggagtataggtgtgcgccaccacgcttggctaatttttgtatttttagtaaagacagagtttcaccatgttggccagactggtttcgaactcctgatctctcaagtgatccgcccgccttgcctcccaaagtgttgagattaggcgtgagccactgcgcctggccaagcatcttcttatgtacttattggatgttcttctttggagaaatgtctattcaactcctttgctgcattgctttttaaaatatttggacttgaaagcccagcaaggataactattttgttcttctgctctaagaatatataaagatcttgctcaactcagcagaacatttgtatcatcatttcagaactgcagtggtatgaacatctagttgctaattacatatttagaatagttcatatttcaaaatgctaaataaatatttgtgggcactgagcctagttattatgttttgccaaagtcacaagttccgccattgcacgtcccaatccagttcagcttgtacaaaaatgcttaaaatctcttttgcatgaaactatgttttggtcatgacattaagcagacagaatgagacttaatatgtctttaaagggtcattttaaataaacaacaagatgactgtcactgcggcggaacaaaaagaggaaagaagaaaggttggttaacttagagaaaaatggcaagattcagatgggaaagggaatcagaatttttagacccctgtgtgcagaaaggaaactaaaggaagttatctagctctacttcatttgttctccccaaccttgagttcatggatagagatgaatggagataccaggaagtgttcaaaaaggaaaagtggatggttgggcgaggtggctcatgcatttaatctcaacactttgggagactgaggtgggaggatcacttgaggccaggggtttgagactaacctgggcaacataggaagaccctgcctccacagaaaaaacaaaattggctgggtgtggtggtggacacctgtagtctccagctttttggaggctgaggtgggaggttcactcgagcccgggagtttgagactgcagtgagttccgatcatgccactgcactccagcctgggcagcagaacaagaccctgtctctaaaaaacaaaacaaaacaataaagtagaaaggaaagctgggtactttttctaagaagccaagagccattgataattacaactcacagaagcagactttttgagagggacgccacccagaacctgaggctactcaaactattattttgtcagaagcaacagggttgcctgaaatttgcaattgaaacagtgtgcttttctcacatacacagcctttatgtaattgttcagttgtgttttaaaaagaaataacatcactgaggtgtttggttttctccttttctttcctctctgtcttgcatggttcagcatgttgttttaggtcaacagatatattatagattggagttcagcacactttttctttgaagggctagatagtaattatttctcgcttcgcaggctatagcctgtgtggcaaccacctacctgtgccactgtagtagcatcggttagcagaattgcactaccttggaaagcagtcgtagataatatgtaaatgactggctgtggttaagttccaataaaactttatttacaagaacaggcagcgggccatgttttgccaacttttgttctaaataatcacaagaggccatgaaaagtttaatttccatacatgagaactgggtctgaatattgactcttctacgtagtataatgggtgtcccaaatactcttacccagtaaaggatcttttaaaattttaagttgaaaccatattcagtggcaggaatcctgaggaagtgagagagaaaagctttataaatattaataagtgctgaaaattaagttgttgaaaaaattgttcacataaaagatcattatatagcaagtttggaatttagtttcaattttcatttccttgtagaaacatcttcatcgtgaggaaaatgagggaattaatgaacatttgtttcctgagtgtgagctgtgataccttgtagtcactgagatggcggctgcatgatgggtatctcgtaactctgctccgggatgcccaccatctagaaagatgctcaagacccgtgggacaggatagtgtttaggaatgtgtgttttaaacttttcttgcagtatttaatttctaaataaactttattaaggtataatttatatacagtaaaaatgcacctatttttttaagtgtgtgatagattctatgggttttgacatgcattcactcccaatcaagatagagagcattcactcccattaccccaaatgtaccctcactcccctaatgctcaccctcgaacaaccactcatctgctttctgtccatgggaattaggttgccctattagagagcttcctatacattcagtcatttagtatgtactttttttgtgtctggtttagaggtttgcaaacttccttggttcacagtgcctttagaatccataattttttatggtgttgaaagttaaaagggatacctaccagttccattagatccagagaactcattaaaagtagcttacatggtgtcccacaattattgctgtttccctccaagatttaaaatatccagtggcatgtctgtgagttcactgggggccctggggtggtttcgtgcacagttgaggaaccacagatctggcttcttctacttagcataatgttttggaggtttatttatgttgttacatgaatgaatacagtcatgcatcccttaatgatggggatactgagaaatgtgtcattaggcaatttcattgttgtatgaacatcatagagtggacccacataacttacatgttacaacctattatgcacctaggctatatggtcaagcctgttgctcctagaatagaaacctgtgcagcatgttactgtaatcaatactataggcaattataacacagtggtacttgtgtatctcaaatgtgaacacagaagaggtactgtcaaaatacagtataaaagacagaaaatggtgcacttgtatagggcacgtctcgtgaatggagcctgcgtactggaagtgtctctgggtgagtcagtgaatgagtaatgagtaaatgtgaaggcctagtacattactgcacattactgtaggctttataaacatggaacacttaggcaacactaaatttattttaaaaaattgagttatggcggctatgatgtcactccgtgataggaatttttccactccattataatcttatgggaccaccatagtataaaatgtcattatgctgcatgtgacagtagtctgttcctgttttttgtttgtttgtttgtttgttttgttttttttgttttttttgacagagtctcactcggttgcccaggctggagtgcagtggcacgatcttggctcactgcagcctccgcctcccgggttcaagcgattctcatgcctcaacctcctgagtagctgggattacagacatgtaccaccatgcccagctaatttttgtatttttagtagagacggggttttaccatgttggccaggcaggtgttgaactcctgtcctcaggtgatccgcccacctcagcttcccaaagtgtaggctgtttctttttgttgttgagtagtattccattttaggaagtactgcagtatgttcattcatttgatgggacatttgggttcttctcatttttttggcaatgtgaataaagtcactatgaacattcacatgtaaggctttgtgtaagcatatattgtcattgctctaagattagaattgctaggtcatatggaaagtgcatgtctagctttttgtttatttgttgatttaatttatttattcttaaagacagggtcttgttctgtcacccaggctagagtgtggtcgtgcaatcgtggctcactgcagccttgaactcctggtttcaagcagtcttcctacctcagcctcctgagtagctgagacttcaggcatgtaccaccacgcctggctaatttttaatttttttgtagacatggggtctccctgtgttgcccaggctggtcttgaactcctggcctcaagcgatcctcccacttccgcctctccatatgttaggattatggcatgaatcactgcactcagcccatgtctagctttataggaagctgccaaatttttccagagtgtttgtaccattacattctgatatgatttggatctatgtccccacacaaatctcatgttgaaatgcaatccccagtgctgaaggtggggcctggtgggagatgattggatcagggggtggtctctaatggtgtagcaccagtccccctttggtggtgttgtcacgatggtgaattctcatgggatctggttgtttaaaagtgtgtggcaccttcccttctctttcttcctcctgctcctgccatgtaagacacctgctcccccgttgccctctgtgatgagtaaaagctcgttgaggccctcctagaagcagatgcttccgtgctttttgtacagcctgcagaactgtgagccaattaagcctcttttctttataaattacccggtctcaagtatttctttatagcagtgtaagaatgggctactacacaattcgaccaatagtttgtaaaaattcttagcctgggcaactaaaagagacctcgcctcgacaaaaaattaaaagtgaaaacttagcatgtagtaatggcatgtgcctgtagtctcggcgagtcaggaggctgaagtgggaggaacgcttgagcctaggagttcaaggtggccgtcagctatgattgagccaccacactccagcctgggcaacagagagagactctgtcttgaaaaaaaaaaaaaaaaaagaaaaaaattctggttgcatcacatgttcatcagtacttggtattgtcagtcattttaattgcaggcattctagtggttatgttgtgtatcttcgtaaggtttctgtttgtgtttctgatagctaatgatgagcatctttgctcattgtgccatttctgtggttactggctctgtgtgtgtgtgtgtgtgtgtgtgtgtgtgaagtatcttgttctaatttttgcccatttttaatagggttgcttgtcgtcttatcattgagctgtatgagtttttaaatatattctagaaacaagtcctttgccagatgtatgtattacaaacatgttctcccagtgggtggcttgctttttcattttcttcaagtgtcttttgaagagcaagagttcaacatttcaatttgtcgaagtcttctggttagtacttttttttttctttctttctgtccctctcaaggttaagaagaccttcacctagaagtttgtgattttggcttttgcatttaggtctaggatctatttcaagttactttggtgcgtgtgtgtgtgtgtgtgtgtgtgtgtgcgcgcgcgcgcgcgtgcatgtgcgccttgaagtaaggattgaggtttattttcttttccatacagatatccagttgttttagcaccatttgctgaaaaaagctattctttctcctttaaattgcctgggctcttgtcaaaaatcaattgacggctgggggcggtagctcacacctgtaatcccagcactttgggaggctgaggcaggcagacggatcacgtgaggtcaagagtttgagactagcatggctaacatggtgaaacccgtctctactaaaaatataaaagttagatgggtgtggtggcgcatgcctgtaatcccagctactcaggaggctgaggcacaagaatcgcttgaacctgggaggcggaggttgcagtgagctgagattgcaccactccagcctgggcgaccgagtgagactgtctcaaaaaaaaaaaaaaaaattgaccatttatgtgtttgtctatttctgaactctattctgttctattgatctatatgtctgttcacattaccctgattcttgtagctttgtggtacgttttgaaatcaggtgattgtggagatgtatttttcccatccaagtactaacgaggcccgaccctgcttagctttccagatcaggtagtatggctgtagacaagaaggtgtatttttaagttggatttattcgatcaaacttttatcaaatgcattattctactcatattggaaaaatgaagtaagagtatcatttttcaaagttggcattgcttgggactgatttgtgactcccaaattatatgttgaagccccaacccccaatgtatattggagatagagtctataaggaggttttaaggttaaatgagatcatgagggtggttgctgattcagtggggttagtgtccttattggaagagacccccgagagcccactgtgtctctctctgccatgtgaggacataacaagaaggcagcattctacaagctagggagaggccctcaccagacaccaaccatgcaggcaccctgatcttggacctcccagcctctggactgtgagaaactacatttctgtagtttaaactacccaatccgtagtattttggtatagcaacctgagcagactaagacaaagagcaagctgactttaaaggaagggaaagtatactgagaatattggctgggcacggtggctcatgcctgtaatcccagcactttgggaggccgaggtgggcggatcacctgaggtcaggagtttgagaccagcctgccaacatggcaaaactccgcctctactaaaaatacaaaaattagccgggcatggtggtgctgtaatcccagctactcgggaggctgaggcatgtgaattacttgaaaccgggtggcggaggttgcactgagccaagatcacaccactgcactgcagcctagaagaaagagcaagaatccatctcaaaaagaaatatataggataggattccttgctttagggccaactttggtgaccttgggtacatgtttcctttcctgtaaaattagaaaattggtccagagaactctagaatagcccccactaatgtcctatttaaatttaataacctgtaattttagatggattatgagtgattttctcttttacttgtattctctgccctgattcaggttttaaaatagctgaacaaaaacaatactgaaagccaaatcgtttgatgaaaacggtggctgacacttaataataacttagtcttcttttagttaaaatgcttcaggaaaatcctgatatagatagaaccagactctagtttattttaggagtttttacagtcatttcttccttgagccttttgcttggtgtttcctgacacagaactcgaagccatgctttctccttagttaatggctccccacgccagaggtgtggggccacctcatatatgtgtcctgggacagatcccaggattggagagaaattagaggtcatctagtcccgggcatttcaaatgtggtccctggactagcagcttcgacctcccctgggagaatattaggaatgcagaatcccaggccacaccccagacctgccgaagcaggcacactctaaagcaaggctgagaagcactgttctagttgaacagtgaagaatcttctgtatggtcttcccagcagaccatctggcctctgggcacctctgaacgtgacctcacgtgaggcaatctgttccatttgtggacagttctgttcaagtctcttttttgtatttatctgaaatgtgtcttcccctcccttctagtttaacttgctgtcatccattggtcctgccattgtgtcaggcactgaggataccccacgcaatctcctttctcaaagatctcgcaatcttttgtttgttggtttgagacagagtctcactctttcgcccaggctgaagtgcagtggcgtgatctcggctcactgcaacctccacctactgggttcaagcgattctcctgcctcagcctcctcagtagctgggattacaggtgcctgccaccttgcttggctaatttttgtatttttagtagagatggggtttcaccatgttggccaggctggtcttgaactcctgacctcaagtgatctacccacctaggcctcccaacgtgctctgattacaggcatgggccatggcgctggacagatctcacgatctgatatagaaatagagatgtccatgaatgaactagagcacagtgtgagaaaggcagtgaagaagatgatgtccagggtgctgagctgcacggagaagggtgctggagaggacctccaggtgggggtgcagcccggtacacatactgagttggaatctgccagactcaggatggggaaggggttctgggagggcgctccgcacccagagaagagcttagcagaggcatgagaggtgacgtattggggtccctgaaaagtttgatttccttatgttaaagtagcaaggagctgggaaagtgggcagggggctggatcacaaagggcccattctgcagtgtccaaggagttcacttgaatgtgagaggctggggagaatagatttgcattgtaggaagaaggctgctggctgcagtaacgggccggaagagggaggcaggggtgctcttagcagattgacagagcctgatctaaaggaaagacatgaaggactgagctaggggcgggataagagctcggccactagtctctaaggaatctacctcataaatctaaagcagcaaatcctgtcccctcagttctccacttttgctcaatgcttattcattaggggccagctctttccaggctatgcacgccgtgaggactgcacagataaaggtggcgtgggccttgcccgcattacagagtgtcactgcttagtgggcagtgggcatctccagttattccttcttcatgtgatattgttttaaatgcccttagcttttgcgtttttcctccgtggagtggtctagttgatattccccttaactggtcgtgtctgaaactgaattgcaggctctaggtaatggtgtgagcaatgtggactagggcccgggctgttaccttctttctgtgaagacggcctaagatacagtatggccctgcgtctttgaaggccatctgagaacactgcagcttcagactgccctaggtcagagctactggcagtgtcccaaggaggccttggcatgtgttctgcctccccactatttctcttctgtatttgatggctttgatttcaccgcacctaagtgtaagttcaaactatatcctattagacattatcttgttaaacagttcctgttgctccatgcttttgagatgttttttaatctctggtttcatcctgttaatttattctcttggttgtaagcgacacaaatgattgacgagttcccttgtatatttgcatcagcatcattcactgaaacattctcgaaggtagggcatatgtcagagtcctggcagatgtaggctgcttcacactgtgcctccagattgggaaaaggtggcattcctaatcaccgggggaagtaaattcatcaataaatgtggtttaggacagctgaagagctgttagaaaaaaaagggagctggggtccctccaacattccttagataaaaataaactacataacaaagaaagtctcttaaaaaaaaagaaattaaattgtctgaaagatttagacttaaataatgaactcataaaaattattagacgaaacatgagtaaattttaaatatatcttggaatgtagacagaagacttttttccccccaaagcgtgtcacaaaacacagaagctgtaaagaaaaaggctaactttcctaaaagaaaaatttcatgaggaaaatttaaagttctgttgggcaaaaattccataaatgtggtcaaaaaacaagtaatatattggagaaaaatatttgcagcctatgtgtcagagctaattcctttcacatggaaagaagtcttagaagtcaataggaaaaatgaaaaatggaatagttaaaccaatgttcattgctagaagtgagcttgtgaaaacatagtaaacttcactttgtttaaaaatgcaaaggaaaataaagaggtctcattgttttcatctgtgaaattggatgtggctaagtctgataatacccaccttgctggtgaaaggatgagaaaacagacatattgagttgaccagtgctgttgaagggcatttctacaatatccttagactagaatttaaaaggttcgtattcttagactcagtcattccactaatgaccctgtaaatgttttccagcatgtacacaaaaataactacgcagatatttgtaataatagcatttatactagcaaaaaatagaggtagcttatatgaccatctgtaggtgtccagcaaaatattgtgtagtgttaaaaatggcacaattctctacgtactaactaggaaaggttcaggatactaaatggaaaagcaaatcactatgcataggaggatgttgtgttaaaaattaaaaagatatacgggatatcagtaaggaagatattagctataaattaacaaaaatgaagggaatgtatttaccttgtacaacaagacatcttcatatgtcagcagtgcagggttgggacagggtctcactatgccatccctgcctcagatgccatctttctcctctgcggtactaattatgtgggtgtgtttccttatggcagcaagatggctgcactgtaccggacctcacatctgcatttctgatggaaaaaagatgtaaggaggaaggtaagaagttggaatcggaaaacccaaaatatttccagaaatgtccaaccagctcttttttgagatggagcctcactctgtcacccaggctggagtgcagtggcgtgatctcagctcactgcagcctccaccttctgggttcaagcgattgtcctgcctcagcctcccgagtagctgggactacaggcgcccgccaccacgctcggctaatttttgtatttttagtagagatgaggtttcgccgtgttggccaggcaggtcttgaactcgtgaccttaagtgatctaccctcctgggtctctcaaagtgctgggattacaggcgtgagccaccatgcctggcccaacttctgcttacatttcattggctagaactatcccatggctacccagaccttcagggaatctgtcaaggcaaaaattttgattaggcacgtgttcttccctgacacacaatccagagttctgtgaatatggaagaagaggagaagggatattgggtaggcagcagtgtgcgacacacacacacacacacacacacacacactctttgtgtttgcatgcagtatttctggaaggcgcctgagaaatgggtaacagtagttacctctgtggaatagactggccgtcaggaggaaggtggacatttatttttcactttatagtgttctttcctgcaaattttttaaaaaaacaatgaatatgtgttaactttaaaggaaggaagttgataggaagctgacaactatccattatcagaacctcttgggtacagctgtccaaccagttactcagaaccaggtcatttaacctctgtgaacttcagcctcaactgcaaaatgagaggctagaatagatagtatcttaggctccttctacctctgagcctcctccagttaattacacaatctccaggagctgaaggagagaactaagagtcagctcctttagcaagaaaagacatccaggattttaaacaggttcttacttagcctttgttatggctgaattgtgttccctctaaaattcatatttggaaatcttaatctccagaaggtagtatttggagttagggtctttaaagaggtaattatggttcaatgaggtcattaggttgggccctaatccagtaggactggggttcttacaagaagaggaaatttgtacccaaacatcctcagagggaaggccacgtgaagacaccgggagaaggcagccacctgcaagcagaggagagaggcctcagaagaaaccaaccctgccagcaccttgatcttggacttccagactccagaatttgagaaaataaatacctgttcttaggctgggcatggtggctcacacccataatcccagcactttgggaggctgaggcagatggatcacttgagatcaggagtttgacaccagcctggccaacatggtgaaactctgtctctgctacaaacacaaaaattagctgagtgtggtgacgcacacctgtaatcctagctattctggaggctgacgccggagaattccttgaacccgggaggcggaggttgcagtgagcagagattgcgccactgtactccagcctgggcaatagagggagactccatctcaaaaaacaaaaaaaccgcaacccttttctttaagttctccagcctgtagtcctgtgttatgatagccttagcaagctgatgcagtcttctgtccctttacactttgtgaggggagctctgcattttgcagaatctctaggacagcatgagattgcactgacttagctactgcctctattcccttccttggtgaaagcaggtcccctaggagtctagcctgggaacctgcaaatgctaaacgtggcctgggggcagagaagcgcatctgactggaagaagcaaatctgttcccgtgaggccagcgcagccttcctccagggtgcgatcgctgtgcacacctccttcctgggttccttggggccttgcctccaacttgcttacctgttctctaatctattttctttccttgaacttcagaattgatggataccctgtctcactctagattccttgcctggcttctgaccgctaaacccatctggactacaaatggtttatcttttagagatgatctatatctcttcagctggtgagatttgagggcaggatcttatgttacatgagtgaccttcttatagatattggcaagaatcattttcttcttctgatggagcagaaaggggtgtgtgtgtgtgtgtgtgtgtgtgtgtgtgtgtgtgtgtgtgtgtgaaagagagagaaagagaaagactttcattgccctttaagccctcaccctagcactgcatctgagccagaagactctgaaatggcctgcagtgttccaggccatttaagggagactggatcttttctgaggctaaatgagggctggttttcctgtgctggagtgggtaaggactccggggtaccctgtgtgcttggagggaggcagtcctgtatttcttaagatgcttaagaagatgcaagatgtgagatgcttagatgatggaaggtgaggagagattggcctccaggcatcctgctccccgcagagcccctgagaaggtggccttatttatggagtttgcctgtctgtttactggcttcttctcaagggagcatagaggaccccactggtcaggtgtcagacaaaagagctgtacggatgcatagatttagttctgcctcacaggcaggtagcctgagctcctagggggaactgtttttgctaagtagggaatgaaaagcatgtttatttaagcacaaaattaaatctctcctatttttatatgatttcccgttgttttcttccctgtagggaaatctgctgtgatagagaactgcgtaacaggccttttctgtgagcgctcactcatacattatgcacgacgtggctaagatctttgaagcgcatggagacaggcacatctctgagaggcgagattctttcttttctcagcccccactatcttctgtgctacatcagagatggagcacagccaccgtgggtcttgaaatttcgcaggtgatgctcttctcggtgacctgtgggttcattacctgtgtcaaagactgaagacgggagaattagggaagtggtggcctgggagaaccaaggacatgtttgtgtgccctatttaggcgattgttctacttcatgctaaatttgtgaggagttttatgaagcctagaaaattaagtagaaaatatatttttacagtattttaagctggaacagactatttaaagctcgaagagaccctagagataaaccagttcagtctcttccttttgcagtagaagggacgaggcccagaggactcacggtgtttcgggaacttgcagggagttagcgcagcaccaggatcggagcgcggggccccgtgtccagctccttactctttttgttctggcagcgatgcccaccgggccttcacagtacatttctctggatacagagagaaacattattcatctgaaagcaaggcttcagaagctgtttttataataatttgttagagccacatagtaacttgcaaataaacatttacagttaatgagaaaaatggatacccctgagaaaaaccgtttgtagttactgtgttctagtcagagctcttgagctaatttgaaaggaaagtcaggattctggcaggaggagagctatccccagattccaaggatggggaagagaatctctgtatggactagaattcgagactgtcctgtgtccctctgtctctccttcccggtcttctgtctgtgtcctctgtgcgggatcccatgcctggctctgttaccctcccttcccgccaccagcctgtcggtacctcctgtcctgattttctggttttcagtcattccaaccccttctcagtttccctgacttggtccctgtgcccgtctcagtccccctgacttggttcctgtccctgtgtcagtccccctgacttggtccctgtccccttctaaatccccctggcttggttccctgtcaccatctcagtccccctgacttggttccctgtcctcatctcagtctccctgacttggtccctgcccccatctcagtccccctgacttggtccctgtccccgtctcagtccccctgacttgggtccctgtctccatctcagtccccctgacttgggtccctgtctccatctcattccccctgatttggtccctgtcctcacctcaggccccctgacttgggtcactgtctccatctcaatccccctgacgtgatccctgtccccatctcagtccccctgacttgggtccctgtctccatctcaatcccccctgacttggtccctgtccccatctcagtgcccctggcgtggtcccctgtctcccgctccatcccctgcccccatctctgtccctctgcatcaggcatggtcacgtctcagtgccatctcaccctctccctgaggactcgctccattttcctctcccctcagaccagcttgctctgcagctgcgcacgatgcaaatgaccgccccagcctctcttggcttcagtcccccaccacagactaattctatctctcaccccaatttcaaatccccagggagctgtctgatctgcctgcttcagctcctctcagcctgcctggtgctgccgcacagaggaattggctgcccgtggccgggtggagagtcctcgtcttgtgtgtggccagggtctcaaggcctcatgctacacacttgcgtatagcatctcgtgcaggcttcaccacagtcttacgaggcatgcggtgaccttgcccttagacgtgtgcactcaggcctagagctgtcagagccatttgtcgagcgacccgctgctaggagatggcagagctggagccagaccccaaagccagcgctgcgctgttctccttttgacgcgggcttatccacagttaatcagtgatttcctcagatgtccacatgctcctacggtgactaaacccagctgtcttttgcacatagttggaaaagttactattaggcacctagactaggtttgatagcaataggattttattaaaaccttgatggaaaacctgcgtagtatctgctaacatctttgcatgcttggaggcagaggaggatttaatatacatcaagtctgtgtagcaacatcaaaggaagatttaaacactgctggcttttttgtgcgatatttaaaaagcaccccccaccttttaagaaaatgtgaagttctggcataaatcaaagtgtgattaatcagtgatgattgactggtattttcataacctgtggcattaataacaactttgtatggacataagagttgtaagcaaatttgggagggaggttactgcttcatgctattctccatgccgatcttcgatctttgtacatacttacttgcattctgtaaaattcggcgtgatgaaatccaagaaccaaaaatgcagggtggaaataggcttagtagtaagtgaccttctatttccacttcccacctccttgttaagattctttgacctcctgccacaggggccttagaggcatcctgtaagctttgcacagaagctgctaatcccccggcaggcagttcaggcaggcagttcattccgtttccacctggcagctgctccctctgacacccaaggactcgcagggagtggccgttggacctgcagacccctgggaacaggcagggggaagatatgtggaactgagacccagaggcctccccacttccctgtgctgactcacgtaggctgtcatctctgttggcttttaaaggaagaggggtaggaaggacagtgaaattagaagcattgccaggtcttgcttgagagcttctctctctcactgctgctattttttcttcattaaatgtgtgatgtgggtttgttcaaagcatccagtggctctccacttagatcatttaattccacgatgcaaatggcagcacagctttggcctggaatcatgcttcgcacttggtcaaggccacctttaactgcctggccagacggctagagattttcccggggcacccctggagtttttcccatcctgactagagataatctcagagcgggagccagccccaagtgagagggcctctgaaagaccacaggatgggaacatggacgtgtagcctcatttcctcaaggggatgcaaggagattgattaggcaatgggggattccatgaaaaaaaaattcatgatattagtctacttacgtaaaattgtttgggtgagcacgggtggaggggcagggtggggaagagaaagacattgagatcaagtgaataaaggaattgggaccaaataccattctcacgctaacctgactgtcagatgaaagaagagaatgttgcagttatgcttatggcttgattctgcttggaagaaaagaaatcaacacaaaaaattcctgatgtgtgcatgcgcttttggaaaaaggtgtagggaagggcacacagcagtctaatcctggggacttgagaagggggagcacagcagtcccaaccctggggacttgggaagggggagcatagcagtctaactctggggacttgggaagggggagtaagggaaaggattatattcttttctttgcacatctttatatttatttccttattcaaaccagcactgttaatttttgtaattaaataaatttagagaaagactttttaaatgtgagagagctgttctgggggaaaaatcagaacaaaaactaaatttacactgggattgtttattttaagttttgtgtttcatagatagtctgtatagactgggtgtggtggctcatgcctgcagtcccaacactttgggaggccgaggcgggaggatagtttgaactcaggagtttgagaccagcctgggtaatgtaaagaccccgtctctatcaaaaatagaaaaagtcagctgggcatggtggtgcgcacctgtggtctcagaaactcgggaggctgaggcagaaggattgcttgagcctgggaggctgaggctgcaatgagctgtgatcataccaccacactccagcctgggtgactcaaaaggtacaaaaggctctttggggaaaaggaagttgtctgttctgtccacagccatgtatttccctttctggaggcagccactttggccagattcttggatattcttttttttttttttttttgttttgagttggagtcttgctctgtcgcctaggctggagtgcagtggcgtgatcttggctcactgcaagctccgcctcccgattcacgccattctcctgcctcagcctcccgagtagctgggactgcaggcacccgccaccatgcccggctaattttttgtgtttttagtagagatggggtttcaccctgttagccaggatggtctcgatctcctgacctcgtgatccgcccacctcggcctcccaaagtgctgggattacaggcgtgagccaccgcacccggccaattcttggatattcttaaagaaatgctctatggtttaaaaaatctagagatttgtttataatatatatatttgcatgtatataatgagtagggagagaaagtctcccaccccaaaatggtagtagaatagaaacagtgttttgtatgctttttaaaagtttaatatatacactgcaaaatattgatatatagagagctgtttgattcttttttactggccacgtgatattccattatataagccgactttatttagccagccttctattgatgagcattttgattattttcaatattttactccagaaacaacactaaagactcgagattgtattctttgacacatgttagtatatccgtagaataaataccttgaagcagaataatttttctccaaaaaggggctacaaataatacacttccttcagaaacatgtgaaagtgctagatattctttatagaacaaggtctgcattggaagtgggatgaaatataatgatagcgacagggactttagagaaggaagtaggaaagtcagggcccttgcagttgcttctctcatagacacctctctttctagaagatatttttgcccaaactttggtttttatatttcagggtaacaaggatgtgaggaaggaagtcaacattgagtgagttgctattatgtgccaagcctagggttaagtcagttgcaagtattgtttaattcttgtagtgttcctataaggtccatatttggcatttactatccacagagcacagatgagaaaaatgaggctcaggaggctaagtcagttccacagggttatccagtggataaatggcagagtcacctttcagacttcatgaaagtactctagctttttacagtccttctccttctcttcctcgtagaaaaatagaaatctctgtagctcttgctttgtgaaggatctggggatgcatgaaccaggaactaggtggaagaccagtttcacctgaggttgacctgtgatgtatgactttgcttgtacttaagaagtcacttttaataaggttgtagggtgtgcagagaaaatttactgttggattatgtggattgtcttcaaccacaaagggctgtgttccagaaactcttctgagtctactgactttaaaggagaagagccagccccgaagtatgacgctctgaaagctggtcaggtttcaaggtggacccacaaagcccacctaacttagaacattctgaaagagtatgacgtatgggtggccatgatttcttggtgttcttagtccataatgggatgcataggtgagaatgtatgtatagatacgggctagagcaggggtcctcagtccccgggccacagaccagtaccagttcatgggctgttaggaactgggctgcagggcaggagtgagcagtttcatctgtgtttatagctgctccccgtagctcacatttctgcctgagctctgcctcctgtccgatcagcggcagcattacattaggttctcataggagcttgaactctattgtgaattctgcatgctagggatccgtgcactccttatgagaatctaatgcctaatgatctgaagtggaacagcttcatccagaaaccatccccctcctccgccatccctggaaaaatcatcttccacgaaactggtttctagtgccaaacaggttggggactgctgggttagagccacagcaaggagaacaggaggggcgagagcccccccatctgcgggctgggatggagtccaggggcactgcggcagcactcgaggctgcagcaaggctggggctgtggccaaggatacagggcaataggtggcctcttaggtggaattgttgaaagcctcagagagagcactgtgaggaggaatgaggccatttattatttttgaaagtcaagtatgtgtaggttggcaactgcccatactttttatttcaaatggctttattaagcgaattacctctgatacaaatggacgtcaattaacaaagagcttggaggtaatttaatgtaatttctcagctcaagaaatcaagtgctttttttttttcctttcatagaagccagggtaaattttctcatagctgacagagattattatggtggttactcattttatcagaagtgatgtaatatccagtttagatggagagaggatggtgctctttggagctagttttcggagtctgccactagattgctgtgtgcttctatactgaaagcagccagtgtcctgatctctaattacccttagccttggtgtctctttgacatttcgagggggatagtgttggatgaactaaagctcgtgtctcacttttaagttacagttctctgaaccttgtaaacaggtagggagtcatttcctgaggctgaagaagaagaggagaaagaagccacgcttatatatgtctttagttgattagagatgggtaagagtatgttaaccttggcttacctttccctaaatgtcagctcttacatgtgggtccttcagtcagtaggtgtgtttccatgttattgctactccttcaaagtttataaccatcaactatgtttaactactttgacctactgatataataaccattggtaggtagtgtcatctaccaattattattagatagcatctagtattattaatatgagaactttctacatgtttgcgtagagcttcagcttgaatttcatctcatagaatatactttttttcttttaccaacaatacagtaaggcacaaatgaaataatcataaatatttcacagaacgatgcacgcttatatggcatttctgcctgtgtgtgcatttgatctatgagattccctgattctttagcatgaaactcatgggatatgatcagtgaaatttgtcccgctcagaatctgtcaagcattttattttcttggggaggatggtcatgccataaccccaattgatatttcttggtgatagtttaggttttgggttaaccatagggttttgtgtttttgtttgtttgtaattgagatataacttgcacacagaaaaatgcatagttgagggtccaatttgatagattttgatatatacatacacccataaaatcgtcaccccagaccccatcatgagtatgtccatcaccctcactccttgctcacttccattccttcctggctcccatcctcacccccagcagccactgatctgcttcctgtcactccagcttagcttgcattgtctagaattttgtataatggactcatccactatgcactctgtttttggtctggcttgttttactcaacatagttattcccaggtcatcgatgttggcgtatatatccatggctcattccttttccttcctagatagtagtctattgtacgaatatgccacaatttgtttatgtgccgaccttttaacggacacttgtattccttcaaatgagggagtttctactttttgactacttcagatgaagctgctacaagtctttgtatggatatatgctttgttgtctgttgagtaaatatctaggagcggcatagctgggtaacatggtaggtgtatgtttcaacttttcaagaaatgccacccacagtgtaggagagttccagttcccccacatcctcagcaacaattgattatgctgagtgtttttcattttataaattctagtaggcatgcaacaaacatatgaaaaaaagctcaacatcactggtcattagaaaaatgtgaatcaaaaccacaatgagataccatctcacaccagtcagaatggcaattattaaaaagtcaagaagcaacagatgctggcgaagctgtggagaaataggaatgcttttacactgttggtgggagtgcgaattagttcaaccattgtggaagacagtgtggcaattcctcaaagacctagaaccagaaataccgtttgacccagcaattccattactgggtatatacttaaaggaatataaatcattctgttataaagatacatgcatgtgtatgttcatcgcagcactattcacaataacaaagacgtggaatcaacccaaatgcccatcaatgatagactggataaagaaaatgtggtacatatacaccatggaatacaatgcagccataaaaaggaacaagatcatgtcctttgcagggacatggttggagctggaacccatcatcctcagcaaactaacacaggaacagaaaaccaaacaccgcatgttgtcactcataagtgggagctgaacaatgagaacccatggacacagggagggaaacaacacacactggggcctgtgtggggggcggtgagaaagggagggcattgagaagaatagctaatggatgctgggcttaatacctaggtgatgggttgatctatgcagcaaactcccatggcacacgtttacccatgtaacaaacctgcacatcctgtacatgtaccccagaacctaaaataagaaaaaaaaaaaaaaaaaagaaattctagcaggcatgaagtagtatctcatgtggttttcatttacagctccccaatatgcatcacgttgagtgtcttttcatgctcctatttaccatcggtttaccttctttggtgcctgttagaactttacccatttaaaaaaattattttatttattttcttaagttttcagagttctttacatatttggcacataggtcttttatcagatacatactttgcaaatattttctcccagtctgtgacttgtcttttcattcagcatttttggaagagcttaacttttttaactttcatgacaggcttaccatttaaataaagaaattgcagtcattccttgcttaacaatttgcatatgttctgagaaacgcacccttgggcgcttgtgtcatcgtgcgaacatgacagagtgcacttacacaaacctagatggtctagcctactacacacccaggctgtagggtctagcctattgctcttgggctacaaacctgtacagcatgtgactgtactgaatattgtgaccattgtaacaacgatggtaagtatttgtgcatctaaccttagaaaaggtacaatcaaaatacagtataaagataaaaaatggtgaccaggcatgctggctcatgcctgtaattccagcactgtgggaggctgaggtgggcagatcacttgaggtcaggagttcgaggccagcctggccaacatggcgaaaccctgtctctactaaaaatacaaaaattagctgggcgtggtggcacacacctgtaatcccagctacttgggaggctggggaacaagaatcgcttgaacctgggaggtgaaggttgcagtgaccgagatcatgcccctgcactccagcatgggcaacagagcaatactctgtctcaaaaaaaaaaaaaaaaagataaaaatgtggtatacacctgtgtagggcacttactataaatggagcttgtaggaatggaagttgctctgggtgagtcagtgtgggtgaatatggaggctcaggacgttactgctgctgtagacttcaacactgtacatttaggccacatccaatttattaagtctttatttctttaatagtaaattaaccttagcttactgtaacttttttactttataaacttttaatattttaactttttgattcttacagtaacacttagcttaaaatacaaacattgtacagctgtacaaaaatattgtttctttatatccttattgtatgagttttttctatttaaattttatagttttttaatttttaaagcttttttgttaaaatgaagacacacacacattggctcaggcctacacagggtcaggatcatcaatatcactgtcttctacctccacatcttgtcgcactggaagatcttcagggacaatgacagtgatggagctgttataccctgtaataaaaatgccttctcctggaacacctcccgaagggcctgcctgaggctgttttacagtaatgttttaaaataagtaggagtacaccctaaaagaatgataaaaagtatagtatagtaagcacataatccagtaacatagtcgtttgttattatatactgtacataattgtatgtgctagcattttatgactggcagtgaagtaggtggtttataccagcatcactgcaaacataagaataatgcattgctctacgacatcactaggtgataagaatttttcagctcttttgtaatcttatgggaccacccttataaatgtggggtctaccattgctcgaaaagtcattatatgaaggccaggtgcagtggttcatgcctgtaatcccagcactttgggaggctgaagtggacagatcacttgaggtcacaagtttgagaccatcctggccaacaaagtgaaaccccgtccctactaaaaatacaacctttagttgggcgtggtggtgcacgcctgtaaccccagctactcaggaggctgaggccagagaatcgcttgaacccaggaggtggaggttgcagtgagctcagatcactccactgcactctaagcctgggtgacagcgagactctatatcaaaaaggcaaaaaagaagtcattagacagtgcctgactgtattttattcacagtatcaagcactaaaaaacctatggcaaaaacaagcacaaagcaaaagcaaaacatgcctgtagccacattaccccttcccgccaagacagtgtcacaggaaccatattcatttgcacacctagggcaaaaaccccagtcaaatataagaagtaatgatttccaagaccatgagcatcaggcaacaaaggacagtgatcctgagctatgagaaatgaaggaggcaagccctgtcattgccccagcttactgtcttgagagtttccaggctgtggtgccaggagggtggcctagatagccgacccagaggagagaattgcagaaagaaagatctccagagatgtgcccaccaccctgggacccagcagcgtactgaccagcccgtgtaagtaaccaagactggaggacaaaaagggggatgctaagatcttacgccggcttcagtctccccctaccccacacccctgaaccactaaatgattcttcgtatctctgccctttccccctcaaaggaagccatttgcaactacgattcagaagaggacattttgcactacacttacgggcttctccgagccatgtaatcctcaaaattgagaaaatattctaagaggttggcattggagtcgccgcacatggaacttgactttgttgtggttttctctttagtttgaaaaagatccagtaatctggtaagacagcaaagcagggtgaccacttcctggagtgcttctggttttggggttttttgtttgcccttggatggcatgcggagaaggtagtactgcccagggaagtctggaagcttcctaggtggtgacttgtgtaccctgtggaagaagagggtgtggactctggcccccgcagcctaaccctgtgccccaccagtgtcggattcagaaccacacgcttgagggcacttgagagacctccgtgtttatgccccaacttatggattcggggatggatgagtttcgttctttaacatatatctagggcctgccgtgtgcctgacattgttctggatgcttgggatcccacagtgagtaaggaaaatcccactcttgtggagcttacgtccctgcagaggagacgcagcatcagctagtatgcgtcaggtggacgttagttacccaaaggagaataaccctggccttggccaggcatggcggctcacgccggtaatcccagcactttaggaggctgaagtgggaggatcacttgagaccatgagtctgagaccaggctgggcaacatggcgagacctcatctctacaaaaaataaaaataaaaaaatgaggtatgatggtgtgtgcctgtggtcccatttacttgggatgctgagactgcagtgagctatgattgcgccactgtactccagcctgggtgacagcgcaagaccctatctcaaaaaaaaaaaaatttttattctggtttgcaattataatttttcagaggttgaagaggcttggcagtgctgggtttaaattagttgtgcaatttagtgcttttcccgtcatcatagatgctgtgggtttcaaatggcctcaagtcccggctggattttattctgcggatgacacttgggtaggggagtagataaagaaaagctggtgttgagagaggattccagctggaatcctctccctgtagtgctgtgggagatgtttctgcctgcgcgagatattattcatgagcaaaaggagaaagttgagccatttcaaggttccttctggccttgaggtgctgtgggtccgattgcaagcctgtgggttttctcctctctcccaggactcttcagggaggcctcagctctaccagacctcccagtcccaaccttcactccttctccttcctccccttccttggagaaaaatgaatctgcagaaatgttaggagacaagaagcaagtacacttgacccttgaacaactcggggtttaggggcactgaccagccccctcccatggaatcacatccacatataacatttgactccttaactactgatagcctattgttgactggaagccttaacggataacatcagtagttcatcagcatgtatttcgtatgttttatgtattatatactgtgctcttacgataaactaagctaggggaaagaaaatgtttagaaaatcataggaagagaaaatgtatttactgttcagtggaagtggattgtcataaagatcttcatcatcgtcttcgtattgagtgagctgaggaggaggaagaggaggggttggacttgctctctcaggaggtggcagaagtggaagaaaatttcctgtaaatggacctgcatggttcaaacctttgttgttcaggagttgactgtatacgccttctgatcatttgttttttcccaagacggtcttgctttgccgcccatactggagtacagtggcatgatctaggctcactgcaacctccacctcccaggttcaagcgattctcctgcctcagcctcctgagtagttgagattacaggtgcccaccaccatgcctggctaatttttgtatttttagtaggatgaggttttaccatgtcggccaggctggtctcgaacttctggtctcaagcaatctgcccgcctcggcctcccaaagtgatgggattacaggcgcgagccactgcgcccggcctggcttctgatcattattaaggacttcacatgattccccttagtacttcaaagtcaggtagattttgataaggtccttgggcgctagttttataatttcaggtcataagggttcgtcctattttctcttgcaaggaaaatgaatgttggggagagaacgttgtcgtctgaatgcttttatgccgtctgcagtaacctctctgagtctggaaccattttccagtaagaagtaggtgacaggctatcaaaataaagagtaaccttttgaaagcacttcagtgcagcactgtgggctttttataatcttgacttgtgttttgtgagaggagagggctgagctaggtttgtgctctgctcctccccctccccctctccccaactgtctttgatctgtgaagcttgtctcatccttagccaagtctgctggaactttatccagagcaggaaaaggggaaatagttttcctttcttgggtggatttgtatttatataaacccttagcgagcaaaatggagccaagtggcacacgcgtctgcagggaggcgtggtgggacgagtgagtggcgggaagaggcggctttgacttgggtcacatggtgtcagacctttttagggtcagtgaggagaggatggtgtaagtccttgtgcacattttcttaaggacatacttacatgtcgggccattgtagagcaacaaagggcagggtgtgtgtgcatctcactgtatgtctatatcaccaagagcagctgtctccaaccttgttcggcaccacagactggggttggtgggatggtttcatgatgattcaagtgcattacatttgtcgtgcactttatttctactattattacattgtaatagataatgagataattatacaactcactataatgtggaatcagtgggagccctgagcttgttttcctgcaactagctggtcccatctggtggtgatgggagtgacaaatcattaagcattagattcttacaaggagcgcgcaacctagatccctcacatacaagttcacagtagggtttgcccactcttatgagaatctcatgctgccctgatctgacaggagatggagctccggtggtaatttgagcaatggggagtggctgtaaacagatgaagctttgcctgctcacctaccactcacctccctctgtgctgcccatggacgcgtaccagtccatggccctggcgttgggcacccttgctatagagtcattcctccaacccttatttgcgggggatgctttccaagtaccctactggatcctgaaaccaccaatggcaccaaacccaattgccatcaattggaaaacgtttccggtcatatcttttgcccacaaatgtaatgtctttttcatcttaactaagcacttagcaggtgctgtaaccataccttttgcagtttgaggtgtagcagcaaaactagcatggatttatttttcctttttcacagtttcacagaatattcattctcactgtagatctggtaatttcagcatgcaattttttttctttccttattaagtcaagacctttcagctttttactaaagcacttaacagcttctctttggcagatccaaatcgccagcatcactactcttacactttcgggccattatgaagtaaaataagggtgacgtattaagcactgcaacactttgacagtggatctgataaccgagaaagtgcctaagtgatgagcaggtggggagcgtttacagcgtggggacactgggcagaggagggttcccaggggagcgtctacagtgtggggacactgggcagaggagggttcccaggggagcgtctacagtgtggggacactgggcagaggagggttcccaggggagcgtctacagtgtgggggcactgggcagaggagggttcccaggggagagtctacagtgtggggacactgggcagaggagggttcccaggggagcgtctacagtgtggggacagtggacacaggagatttcatggtgctggggggtatggagctggacaggtcgagatttcatcatgctactagaatggtgctagatttaaaactgatgattgtttatttctggagtttttcatttaatattttcagacccagattgatggctggtagccgaaacctttggaagcaaaaaccacagatgatgggggaccactgtatatctaaatatatcactatatatagtgatacatacagatgaatgacaagttcaagttcattttgctttttaaattgttactaagagaataatgttgtagaaggccttagctctcctttgcaacattgacctcggaagttttagctacttacagtgtgtcccactattaatttacttccttgaattagtctcagcctttcacaccagctctggccacttcttgtggatggtgaggtttttaagtgtgcatgccatccacgcgaatgccttcttttcattgtagggggtacagggaaaactttccctttgctctcagaagaaggttcagtgaaaatcaactgatgaaaggcaaattaataagaataagaagattactaaggcaaataaatttattaacattcaaagggaatcacagtgggatacagaagctatacgctttttcataggggagggaagagatgagaatgtagacagctcttttgagaggcagtaagtgaggattagggagaatgaatggaccacagagaccgaaatgaaattgtaagtgattctctttggaatctgaatgggcctgagaggcagacattatctcgggaaaatgtctgtcaggtgtggtcacattcgtcaggctttttttctgagataatgagattccagggagggcatagaaagcatttatgtttcttttggtgagcgctcttggtcagataaggacgttccaggaatagtccctgcccttgtggtttggggaggcacaagacaaggttagagggaccttcattctgaggcttacttcaggggccgctcagctttcaaaagcgcccagcgtgctcaggtgccatattttgaggaatgattttctatacccccaacatcataaaaccacctcattgaagcttcaagtggtgcctcatggttcctttctgtgttttctttttttttttgagacagagtctggctgtgtccccagggctgtagtgcagtggcacaatctcggctctctgcaacctctgcctcccgggttcaagcgattctcctgcctcagcctcccaagttgctgggattacagatgtgtaccacctcgcctggctaatttttgtatgtttagtagagatggggtttcaacatgttggctaggctggcctcgaactcctgacctcaagtgatctgccagccttggcctcccaaagtgctgggattacaggcctgggtcaccggacccggcccctttctaggatttttagaaattccagagaaatctcatacaaaatctagagaaagcatctattgttcttgtgttattgcaatttgtatagtgtcagggttaatctgggactgatgaagatgctgagaacagtaagtttaaagaactttgatatagaacaatattttactttgctattgttctgtcttttagaaccaaaaataaagcccttcttagtaggtgactcagcttcctgcaacctcgctggggaaatttctccaaatattaatgcatgccacgtaagccaggttcacttgctggccctggatgtttattctggcccccagttatatttattttgtgtctggtagagcctcacacttcaaagtggaatgctcctgaagtttctacctggcctctcatcccagtgttgtaatggacacttggggaaggaaactccccagggactctggagatgccaagactctgacgcttttgcagcaggtgggcgtcccgtgaggaagagtggcttggaggaggggagatgggctctcctgttgcaggtattagaaacagagaaagcaggaggaagaggaattgcaaataaccaggcatgaggaagacgtagggaacaatgctacagaggattggatttgtatgaattatttttaaaacaaaacaaaacaaacaaacccccaaacggccaggcacagtggctcacgcctgtaatcccagcactttgggaggccaaggtgggcgggtcacctgaggtcacaggagttagagaccagtctggccaacatggcaaaaccccatctctactaaaaatacaaaaattagccagtcatggtggtgcgcgcctgtaatcccagctatttgggagtctgaggcaggagaatctcttgaacccggaaggtggaggttgtagtgagccaagatcatgccactgcactccagcctgggcaacagagtgagactctgtctcaaaaaagaaagcaaaacaaaacaaaaaaccctccaaacaaaaggttgtcatgaaagggaaatgcagttgacccttgaacacacacgagtttgaactgtgccggtccacttacagaaggattttcttccacttctgccacccctgagacaaccagaccaacccctcctcttccccctcctccccagcctcctcaatgaacagacaatgatgaggaagacctttatgatggtctacttccacttaatgaatagtaaatatattctctctcaagattgtctcaatagcattttcttttttctagcttattttattgtaagaatacagcacatgctatatgtgacacacaaaatatctgttaatcagctgattacattattggtaaggcttccagtcaacagtaggctttttgtagttaagttctgggggtggtcagaaatgatacgtggatttttgactgcttggggtgttgattgttcaagggtcaactatataagcttgtaatgtgagggaagagactaaattctggtagagatttgaaaaatagtagcagttttttccccttggctttctgtggttgaacgtttaccaaatgcattggaagggccgttgtgatctgaggcctcagctttttgatctagaagagacctgactgatgatccctcaaggggcccttggaccaactgcagctcttcttggtttagcaaacctgagatcatttagtcatccccttctccctcctatctttcaaaccaaaaaataattttaacaaagctttatgtaattagcaagcaaacattactgtcaggacgatcgtcttctgccaggagttgggctaaacaaggaaaagctgaggtcatgggctccaggtggagcacctgccatgaaaggaaaactgaaaggcgcccgtcatccgtgcccagtgtgtgggcctggcacggcttccctggcgttattcattgggagaatctgagaaccattgtgtgagtcgcagaagtaatcaagagtgtggccttttttcttccttctgcctataactatcaccactttggaggatgcttggaagaagtggaagaagccaagtgctgacactgagtttgtttagtgttgcctagtgaccaggccatgaatactcactgaagataggtgctgagggctttctgatttaagggcatctctgagaggccccaactggcctggtttatttaccctaccgattgtactctgtgactgctaagacttcacaaatggtttccaaagcttcaagacgctgaagggtgtttatgaatgttgtttttttgtttgtttgttttttgtttattttattttattgaagtttcagcattcaatatcaaaaccggacttgagaattccacaaatgcctgaaaatggaaatttccttacattgttaaattgcccagaactcagtggattcctacattttgaagagttgcagagatgtgtgctgaaaatgaaaacggttctaggagagggtcataatttttgatggtgtaagtttttgtagctgtcgttggaaccataccttaggatatattcaattatcaagtgagcctatgagtttgagtcgttttgaaaaggaatgatatctgtggggcactggttccaggacccccatgggtaccaaagtctttggatgctcaagtccctgatatccagtggcatggtatttgcacataacctacgaacatcctcccggatgctttattttattttagtttagttttctgagacagagtctcactctgtcgcccaggctggagtgcaatggcacagtctcggcttactgaaacctctgcctcctggattccagtgattctcctgcctcagcttctggagtagctgagattacaggcatgtgccacgatgccccgctaatttttgtttttttagtagagccgaggttccaccaggttggccaggctggtctctaattcctgacctcaggtgatttgcctgcctcggcctcccaaagtgctgggattacaggtgtgagccactgctcccagcctcctcccttactttaaatcatctctaggttacctataataactaatacaatacaaatgttatgtaaatagttgttatactattttgtttagggaataatgacaagaaaaaggtctatacatgttcagtacagatggaatttagttttctttttctttctttttttttttttttgagacagggtcttgctctgtcgcccaggctggagtgcagtggtgcgatttcggctcactgcaacctctgcctctcgggttcaagcgattcttctgcctcagcctcccaggtagctgggattacaggtgcctaccaccatccctggctaattttcatctttttagtagagaatgggggtttcaccatgttggccaggctggtcttgaactcctgacctcaaatgatctgcccccacccctcggcctcccaaagtgctggtattacaggcatgagccaccacgtccagcccaggtgcagtttaaaaacaattttttcgacctgcagttggttgaatccgtggatgcaaaactcactgataaggagggctaactctgtaattgagccaagagcaaaccttgttcacaggaagaatgcaacatccctacagttttggggaaccactctttgaatccccaaaaccccttaagagtatatgtggcttagtggtagaatatacctgtgggtaccccagctgacttgttagtggctatgcaggaagattgttgccaaatctaccgatagcctgcataccttgggtaagtctcttgcaagttcagcagcaactcagcccctttaaggatgttccacctgccttccccatgaattcagcatcccgtgtgggtggccttccagggaccacagctgttgcctcatcatgtttcccagaaagttctgtagcctgctttccgcacagcctgctccttcaccccccaagatagcttcccagggaatttgttggcacccagaggacagtcccctgcctgctagctttggccagctgatcatggacagtctggcctagggcagtccagccagcttctccaccatgcaaggagctgctccataccctacccttcattccttgtaactgggtagcttataaggaacagaaatctgtttctcacagtgtgggaggttggtaagtccaagatcaaggcaccagcagatttggtatctggtgaggggtttctcattcacatatggtgtcttctcgccatgtcctcacatgcgcttgtatgaactctttgtgtatttagaagagtaagcctttagagaatcttctcgtgactacagtaatagggtcaagtacttactaggtgccagatacagtgttcagtatgtttcgtgtatgtgttacctaatttaaacatcatgctatccttgacacaggatatctggtagtgatgagtttagtcagtcctactgtcagagttcagcacagccacttcttcctgtgaccattggcaaactacctcttgcatctgagcctcaatttcctcttctgtatataatgaggataataattgtccctcccttctggtgttgttgtgaagactgagatggtacataaacaacattaagccagtaaaaagtgctcgctcaatgtcagttgctgctgtggtcatcttttcttcttcctggattaacttaggcttattttgcagtttgacatacattacaccatgatggtaaggtaaagtgcacgcatcgttctccattctgataacaaaagttgctgggtccttcgtctaagtgttccccactctgaagtctttcccagtcctgtgaatcagtatgaatctctccttctccgaactccaccagcatctcctgtaaatttccttgggggcctcatcatacaggactgtagttctttgcacacctggcctcccctgtggacactgggatcctccatggtggaggctgtgccctcaactctcagacccctgcgtcttcttcagtcctcacccacagtaaggtctcaatagttagttactcagtgaaataatgcactttattttgaagatcaagtttatgttcaatttgagaatgattagcttctgttttgctagatagcacacaaataaaccattcttcatatgtgagttaagatcattttgaaaggaaaaagctgtttttcttatgttcttaatctaggaactgtgcacgtttcttaaatcctgaggatactggcaccgcgtagtaggttgttggagtatacaaacatgctggaaactgtggactgttctgcttgctgctcagtatttgttaacatcaagtgaatttttcacatgtgtgaaacttctcagtgccttccaccttcgtgctctgtttccatggatggcagtcctgctagagataagacccaaacaaaaccagttacctggctctgtgtgacgtggacagtctggggtacagttagagttgataatggaggcttaatagtctgctgtacattctttctttctttctttttttttttgagacagagtctcaccccatcgtccaggctggagtgcagtgtctcaatcttgggtcactgcaacctccacttcccaggttcaagcgattctgctgcctcagcctcctgaatagctgggactacaggcgcgtgccaccacgccccactaattttttatatttttagtagaggcggggttttaccatgttggccaggatagtctcgatgtccggaccttgtgatccgcccacctcggcctcccagagtgctgggattacaggtgtgagccactgcacccagcctgttatttcaaattctctggcaaaatgatctgaccaccgaaagctgtgacatactagccaagaagcctgctgcaccaggctggtgccagggatgggtgctgaggacaggggcttggcatctgctgttgttattctgagtgtccaggcagataaaagcaggtggagctggggcctgtgtggaattccaaccaggagagagttttcaggggaaaccaaagaagctgcatctgtgttcaagccctggggatgattttaggacaaaagtagaacttgaagataagcaggcaaggagctaggtgagggcagtctcagaagtaagagtgttaagagactggggtgcccacagcaacttctcgttggagtcctggcccctgtggtgcatggtgggtgggttggtttacagacctgcagctctctgtgggacttggagcaaatctgttaaactcagagggcttctgacttactagttgatgtttggactggatgccttccaggttccagtctagctcgaacatgctgttacttgggttcattttattactttgataagcatttaacatttacatttttaacttgcatttttatatttgaggatcttttcctagctggtgtttgaagtgcatttttgatatccacatagccatgctacaagctaatgatgctaaattaacttttgtagcagtttgctgtttacaggagtttggttaaggaactcaaattacattcacttaatattgtgcgacactatataaaaatgtacacgtcaggaaattaatgtttttcataaaagtatgccgcttagttcattaattaaaaatagcgtttttagattgctcatttaggaaagatgagttctggcataaagaagcagtccctgctttggggaggcattagcctgggggcaaagagtaagggccccagaagtgggttcccaagttcacatcccaagtctgctgctggttagctcctgactctgggtacatcgcataacctccctgagcattagcatcctcatttgtaaaatgaggataaacccatctagggccattgtgaagattacacgaggtgtacatttaaaactgcaggcccagtgctgatatgggcctgcgctatcagtgtggcctttgcgggggatgagacatttagaaatacggtgtttttgttttcttttgctctttgagacggagtctcactctgtcgcccgggttggagtgcagtggcctgatctcagctcactgaaacctctgcctcctggattcaagtgattctcatgcctcagcctcccgaatacctgagattacaggtgcccgccaacatgcctggctgatttttgtatttctagtagagactgggttttaccatgttggccaggctgatcttgaactcctgggctcaagcgatccacccgtctttgcctcgcaaagtgctgggattagaggcatgaaccactgtcccagccagaaatacagtactttgaagcaaaggaatttcatatcattatacgtcagcagatacagtggtccccttatccatggtttcactttctgtgatttcagttacctgcaatcaactgtggtccaaatacatgtgaatgcagcataataatagtttttgagagaccatattcataaaagtttaattattaatacagtatattatcattgtcctatttattgttgtaaatttcttactgtgcctaatttataaattaaactttatcataggtatctacttataggcaaaaacatagtctgtatagtcttcggtactgtcctcggtttcatgcatccgctggggtcttggaacgcatgtctgagggataaggggggactgctcttctttggagtctctagaatttcttttctttttttttttttgttgttgttgagacagattctcactctgtcgcccaggctggagtgcagtggcgcaatctgggctcactggaacctctgccttccgggttcaagcgattcacctgcctcagcctcctgggtagctgggactacaggcacctgccacaaatgcctagctgatttttgtatttttagtagatgtggagtttcaccttattggccaggctggtctcgaactcctgaccttgtgatccacctgcctcagccttccaaactgctaggattgcaggtgtgagccaccgcgcccagcccggagtctctagaatttcaagtcagcagtagaagtggttggtgcagagagttgaagttgtaattgcagtagtgtctttccccagttggtgtacatttcacatccttgatttggttaattgactttctagaagccagacatggtggctcacacctgtaatcccagcactttgggaggctgaggtgggaggattgcttgaggccagaagtttgagaccagcctgggaaacatatcgagactcctgtctctacaaaaataaagtaaaaggttaacatttagccagatgtggtgctgcatacctgtggtcccagctatttgggagtctgaggtgggaggatcacctgagcctgggagattgaggctgcagagagctgtgattaggccactgcacttcagcctgggtgacaaaccaagagcctgtctccaaaacaacaacaaaaaatttagttcctaggtttaagtagggcagtttgaacaataatgtgtcccatctgcagccaggagctgtttcttgagtactctctgagaaagggcagggtgccctgggtatatggatgagagaatggaagtcatcactgcttttagagatgtaatgatctagttgaagagagattacatccagggcatgcagagtaatagcgttcctttaagtattgtggtgatccattaggttaattatgtgtttttgctagactcgttagatagtgttgtgtcgtgcatctgcttcacacatacctatcagggcaatccccttgcccagaggaggctgggctgatcttaggctgtttgtgtttttaacacttttagtctgctgtgtttccagatcatttatatagggctttgttgaatggttgctgtggtctgcttgagtcccatctgccccaaatcctaattatgaacacctccttggcagcccttgcttcggtgggctctggggactctggctcagtcgttgatatctagataaagatccctggagtcagtctgttaaaaggaaggtgagcagagcagtgacagatgctgtctttgtctagtgtgggccttcctgccataaccatgaaaattttctccacggtgacgcagaggaggatttaggcgctggagccggcgcccaggcagttctgctgttcttggttgcacatttgttctcacatccttcgttgcttcacctctgcccttctccccctgcccccatccccgggcagtgctgtctttgtaaaatgagcccatttttagtgcacatctccctaacacgtttttctctctcctcctacaggggagttgctgagtcagcccagaccggaaggagtggcagagatcatttgccccaagaacggcagcgagcgagtaaatgttgccttggtttacccacccacgccgactgtgatcagcccctgttccaagtgagttctcaaagtccctctggccccgggacctggctcctgatcccagctccatagatatgaccacaaaaatccaggttaaactgcatctgcacaaaccttgcaaagtcctcctgaacagacataattcttctggatgacatcagcatcatgatttatgcagcaaaacaggaacttttatttcctcttttttgtgatttttttttttttttttactttagctaataaagtcagaacattttttaacagcctttttgagatgtcattcacataccacagttcacttacctaagtgtacagttcattggttttcagtttatttgcaggtatatggaaccaaaaagaacattttttttgttgttgttttttgagatggagtctcgctctgtcacccaggctggagtgcagtggtgcgatctcggctcactgcaagctccgcctcccgggttcaccccattctcctgcctcagcctcccgagtagctgggactacaggcgcccaccaccatgcccagctaatttttttgtatttttagtagagacagggtttcaccctgttagccaggatgatctcgatctcctgacctcgggatccgcccgtcttggcctcccaaagtgctgggattacaggcgtgagccaccacgtccggcctttttttgcctttttttttttttttgttttgagacggagtcttgctctgtcgcccaggctggagtgcagtggcgccatcttggctcactgcaagctccgccttccgggttcgggccattctcctgcctcagcctcccgagtagctgggactacaggcgcccgccaccgcgcccggctaatttttttgtatttttagtagagacggggtttcaccctgttagccaggatgatctcgatctcctgacctcgggatccgcccgtcttggcctcccaaagtgctgggattacaaaagaaaatagttttttgacgggcagtcttaactctgtcattgcagaatgaagttggctctcacatcaaaaaccagcgcaggcccattccatgagcaaagcctgcagaaagtcagtaataggccgttttctgttgcatggttctgattgcggagtcagtccctgaaaatcaagggctgtgcagtttgccaccaccttgccccaaaatggacttgaagacagagaacgcacacatgccaagtaactttcagatagaacattgggttactactattctagataacactcatcctgttggtttgggttttatgtatgtgtgtttttcgttttgttttgtttgtattaagaaccaaagaggccgcttttaagctgagatgaaatgcctgttacttcaaatcctgaaaagcagcagccacagatcttcttgggtcagatctcatgatctgggtgatgtcagcaccatgatttctccagcatagtattcatatccatgcagcaaactcgactctttcttcctagctggccacatggaattttttaatgaaaaaattatgtatgaatctaagcctgtttttagggagcttggaaagtgcgcctttgggaattgtgacctgtcatctcctcttgggaaacttgctgtccggctgcattccaggcagtgtgacaggcatccatctcacccctcacatggcagcttccctgcctttggtgtgctccctgcaaagcgagggttcccagtggcattcttactcattagctgctgcagtagaagtagagggcactcggctcagtgccccgtttctccaaactgggaaactcattacatagaacatccctaatctatccttgctggaaaatatcaccgaacacccaagggaaactgttatctaatgctcttgtattcagagtactatttaactatcatgtgcatagtttaatttatcactgaccctaagacattgtgaatcttgaagtgcttcttaaatattaaaataggattacagaataactgttaaaagtaattgcacaattacttttgcaccaaccgaatattaacctgaatatcccctgtcctgaacatatcaaacaacggaaattttattgtttctcttttaatttctttgaaattgtacatattggtccctttctttcagatacacctgggtgaggatggataaggggatattatatgttttctttttcttctgtctcttttttttaataccccgcaagttcttaaagctcaaggggatattacagaaccagcaaggtatgaaacagaggaaacaaaaattcaatatactttgcattggcgtaaactttccagagccaagagagacatgaacctattgttttgccatagccaagtgccgtcgaataggtgcgatagaggtaggagttaaaatatccatttgcgctagaaaccttcctggcaccaagccagctttatcagtgttttcccatgggcttcttgtactgccgcagaaagaccacgtttataccaacctgaaaaaaatgttatcagcctctctctcgacagcgtattgaacctgaacgaacaagcagcctaaagtcatgggtaagcggcggtacatggcgccagacatccaaatgccgaggaagcctctttaggcattgaaccacttttgacctagctatcagaatcattttattttgaaagaggttaaaaaaaaagtctcatgaaatggatgacagctttgcaatataattctcaactctaaatgaaggaatgttctctaagtagggaagtttcatattcctggcaagacgtttcttggaaaattaccatattttagtgcagctgcaaggggtaaatgatctcttgtgtgactttatagaaaagcacacgtagatgtgaagcctgtgctcgagctgcccagtgttcccccaccttcaccgccttaagcacccacagtttacatccatgaacacatggacaaaaacaaactcatgtggaggccgggccaggctccggggaaggtcccattcatgggtggttgacagtggattggaagcgggagatttggggggatcggttaggatagctggcaaagaatctgtgcttaagtcaacacagcttgggcctgagcctgagacttggggtctcagcaggcactagacattggaagtccggggctattgcactggctttcaactccagccgaggtaacttaagcaggtcaccatagaggtcaggcttttttttttcttttttgacaaagggtctcactctgtcacccaggctggagtgcagtggtgcgatctcagctcattgcaaactccacctccagggttcaagtgattcttctgcctcagcctcctaagtagctaggactacaggcgcacacaaccacacctagctaattttttgtattttttggtagagacggggtttcatcatgttggctgggctggtctcgaactcctgacctcaagtgatccatctgcctcagcctccgaaaatgctgggattacaggcatgagccaccgtgcccagccaaggtcaggctttcttaatcagacctgttaagttagaatttctcagggaagggaccaggcatgagtcactaaaaaacagaagaagccacccagatgagtctaacgtgtgtacacgactttctgatggttcagttccagtccatgcctctaagggtgggttccctggccagtggggccttaggactgctctgtggtcaatacctgctctgcagcacaaaggcaaaactgtccatgctgtctgctctcagcctcagcacagtccctcccactctcaggtaaggtgaacatatcactcactgttcaaatcaggagaggattgagagtgatgggacggctgtcagtcatgttgggatgatgggtgccctagagaaagctcccaggtagaccagaataattaccctaggtgattgctggcttttgtggggcttaggtggctgatctggatctcatgatggtttttaaaaagacattccaagctcttctttggctggtttagccctctcctttattggtcaaatcagagacttgtcatttaactgcctgtctttgactaatggtgctgcaatgctttctttataaagaagaaactgtagatgactgttacctgattggccttttttaaatgaattccaagcttttctatttcttattttaaacaatttgtagacattttattcccccatggggagagacagagaataagaagtaggtagtgatatttttttttttgttttaacaacatgatttactcttataacttgtctcagtggattggtggttgaggtctccaccagcgtttcattgggaagaggtttcaggaacaggatgaaatgcctccccttctgcacctcaccctccagggagaaacaggagctgagtggcttcttctcccccttgctgattatcagatagaaatgtgagtcatttccatgctttgaatatcttgagatgattttcaaggatatctgcatttaagatgaggtgaacattcacctagtagcaaatttgcctgggtcgctctgaaaaattctggcctcctcaaggatacagattgtgacagatacatttttaaaagctttattgatgtataatttccataccagaaaattcacctgtgcaatgattactaacgtatttgcagagttgtatttatacaaccatcaccacaatctaattttagaacgttccttcaccccaaaaagaaatctcctgcctatttgcagttaacttgtgtcttatccaacacctagttcatgcagtcagtaagttttttttggtttgtttttttggttatttttttgagatgaagtctcactctgtagcccaggctggagtgcagtggcgtgatcttggctcaccacaacctccgcctcctgggttcaagcaattcttctgcctcagcctccagagtagctgggattataggcacacgccactgcacctagctaattttttattttttgtattagtagagaaggagtttcaccatgttgaccaggctggtcttgaactcccgacctcagataatctgcccgccttggcctcccaaagtgctaggattacaggcgtgagccacgcgcccggccaataaatatttttagtgtcactttcaggaatggttttgcaggctggtgtgttagtatgaagcagatttctgagcttttgttttgggacagagtctcactccttcacccaggctggagtacagtggcatgatctcggctcactgcaacctctgccccctgggttcaaatgattctcctgttatccctgccgagtagctgggactacaggtacatgccaccatgcctggctaatttttgtatttttggtagagatagggtttcactgtgttagccaggatggtctcgatctcctgaccgtgatccgcctgcctcggcctcccagagtgctgggattacaggcgtgagccaccgtgcctggccgatttctgagttttaaagaggttctcataaacacgttatccttggcacagttcagtctaaaggcagtggcttatcttgctcctgccactgccagccccctatttcctggatggtggagaggagctggagctgcttggagagctcctcctttagaacttcttcatggcagcctaattaggccctagatatttcaggggtactgagccttgacattaggagtcaaaagatagggcaaacctatacttcccgtgggcaaggtaggaagcaagtagaccgcattatcttttaaagcttttatttgtgaattcctgtctctgtccagctactcttcaggttgagacccaatattccatttcccagggagtgtgagcttctctggacaaatggcagcttgctggttgcgtttcatttctagggttcctgcagaatgcttctctttctccttctaaagagctttagagcaaatccgtcctccaccaaactgaagactctttgataacctgccagataacccagtttatctactgatttttgggtaaaagaccaagcaaattcaacaggtcatcatatgaaaatgttttaccttgaggcattactggaatgcgacccacattctaacatgtggtttcttaatggactgacccttgaatatacaggaaatgggcatgtgtcactcttatttcctgatggttgacgtttctcctgcagcgataccgtatctgtctgtgctccgatatgtggggaatggtgggagttctgagactgaagaagttagttcattctgattttggctgatcatgtgttaacagaattagcaaaaaaaaaaaaaaaaaacgggtggggtggtggtttgaaaatggttgagctaagctttctccttttttaggaagtactaataataatagaggggaaggctgagttattgcatttcgaaatacccttttaaaatcttggattattgcctctatactgtagagttcccattcaagcaagatccccactaaattccagttacttgctagctgtttgtaagtattctcagaagtaccgtggttactttgcacaggaattttggcagtaacatcgttttgacataaagacatttaagaccagttgcagtagcctttcataaaaagcaggatgaagtctgtagcctttatatcaccaaataaacaggccacgtatgcctaacagcacacaaattagcatgaacttgataaaatatttttaaaaagcagtggcgtgatatgaattaggcttcatcacaatggagaatttttcactgaccacagaattttaaaatatagagggtgaggatgggatggtattttataagaaaaggccacatgtggaggttgcctgtggggtgtttcacattgatttgcattgatttgttttgttctatgcaaggagtgaggcagctctttgccttgctgttttaacaagctaggaggaattgtgtttctttaattatttagtctcccgtcagccacattgatactggaatttttccctctctgcttaggtatcttcatactttcttggaaaattaagtggaaaagatagtgcttcttttccttatgccatcatttttactgtacccaaactgtgactttaggagcaccaatttttaagggtaagtctccgtgaaacagagagaatttcttaaataggtaaggccctcttgaggactcagagagattaggggggatatgggggtgttgggatgaagagattttggagaacaggaatcctagacaaaccttatacatctctagaatcaagttgcatatgggaattaggaagaagggaactgcttgattcttttgcttaatttactatgatattgcatagacagtgatcttagatccttgttcaaaaaaggaagtcatttttgaaaaatgttaatattatgcagaaataaaacatcaagtgggtccacaccttcaggaactacacaggaaagtaccgggatggtcacaagtagggaaagggagggactgggggcaggaggggagaggggaggaacgggcaaggccgggtaggcaggtctaggacaggcttatttgaataatctcagtggccctggggcagaggggttgccttagtcgtctggcacctggctcaggggtgattagggcaggtggatggtggcctggagtgtgagagccagtaaaggaggtgttccaggtgtgggttcaggattagttggtttgtattggaagagtatactccgggcaaattgttttaccatctctaggaattggctaatcctaggaggggcagtccctccagagtttgcaaggtccggagtaggaaagcaccagaatacagaaaataaaagacatggttaatacaacatgccatggcttcagtttcagcctaagtgtctcggtaccttgcgtcataatttctttgttgcatcctggaagggcagatttcaattccctaacctgggaggactcgggggctgggtgccccccaggctggaccctcccttcagccccagacctctgtttccaatgtctcacgtggcatcatccctggatgtctgtaggcttcacaggtgtacagctgaatttattgccttcctcccgcaaagttcttcctcagtctgtgacctgtcttgggtaacagcgtagctttgtaccatcggctccaagctaggagtccgtaagcctcattgccttcctctgctttcttccctatatgtagtaattctccaacaccttttatcccatctcatctgtgtcgtgacatgaatgaatttgacccacatcttcagcttcagcctcgggcttccctctagggcccaacccccccagccaccacttcccccgtctctgccaaggttcctgtgactgagtctcagctggctgcctgctctcttatctttttgtccttcaaaccgacaataattgtcttttaacatcagacctcatcacatctctccctgttgaaaagccttggatggcttcctggtgatcacaggctcaagttcaaactcctggccgtggctcacaaggccctgcacaatcagacccagccactctgccaacacacagatactcccttaccatgggaggtcagccgtggtgggccgtggctgcctctcagtccactggctggctgctgcccttctctcctacccagttaaggcccattggtcgctgaggccaaggtcatatgtcagctcctctggggagcctcccgtaaccatcctaactgtaaccagtcactctgttcttcatgtctcctcaatactttttgtttctttgtttgagacagagtcttggtctgtcacccaggctggagtgtattggcacaatcttggttcactgcaccctccgcctcctgggttcaagcaattatcctgcctcagccccccgagtagctgggactacaggcatgcaccaccacgcctggctaatttttgcatttttagtagagacagggttttgccatgttggccaggctggtctcaaactcctgacctcaggtgatctgcctgcctcagccttccaaagcagtgggattacaggcatgagctgccgcacctggctctcctcagtactttttatatacctcttttggtaatgatctcatagtatcttggctactttttacctgtggctttttcatcacatctgacccatcattcattcaacagatctttgttgagtaattatcctctagtaggcattgggccgggtgttgaggatacataaagaactaaatcaaatcctgccctccagaacctaatagcctctttggagaagataggaatcaaagccataaccaggcaaacttatcagagtctaattataattgaaacatggtacctgccatgataggtgtatgaacagagtcttgtaagcacagggaagaaagaactctaccaggaagaatcaggaaaagttccaggaagtcgtacttgagatggatcttgaagaaggaggacaagtttatggagctagagaggtggggagaaacagagaaggttggtgattttgatggttgttttctctaagatcccaaatgtggaaaaaggcatatagatgtgaaacaattttcaagctggttgaacagtgggattttccgtctaggtgtccttgattaggtattcttgtgtttctcagtcttacgtgtagcccggggagcagactgtctgcatttctgaaggtctgtcagattcagtgggaaaatgtttatgtaacacatctcccacgtgaacccaaaactcacaccaccaaagttagctgctaggttgagacgtgtgtttttacactggcgtcctccttacagttagattgattatattattagttgaatttgaggcagttttcaaaaccctctcttctgggagtttactatattaataggcattcaaaaaattctcgtggcagagtgccttagaaatgtgaaactctttcctagggctccaaatatccaacttctctttgagctttggagtcagatcaccctagtgaaaggcctggctctgtcactcgctagtatgcacccttggggaagttatttcatcttttggaaccttagttcccttcctagtaagatgctgaggccgggcgcagtggctcacacctgtaatcccagtactttgggaggccaaggtgggcggatcatgaggtcaggagatcaagatcatcctggctaacatggtgaaaccccatctctactaaaaatgcaaaaaattagccgcgtgtggtggcgggcacatgtagtcctagctactcgggaggctgaggcaggagaatggcatgaacccaggaggcggagcttgcagtgagccgagattgcgccactgcactccagcctgggcaacagagcgagactctgtctcaaaaaaaaaaaaataataataatactgagtaagatggagcttacatggtgggattattaggagttgaagataaataatgcactagagtgaacaacctaattcctggcatgtagttagtaaatgagaggtttttggtttttttgttttgttttgttttgttttgctttgctttgctttgttttggtgatgtcgttattatcatgcttgaatgagcccatgactgaatcttgtatggactggagaagtgtttaggcagatgctgaattatcagtgtccatgaaatcagcgtctctcctaatgagagatgggggattggaggaaacgaatcgtaactcctttttcctttcctttcaatgtctttgtatattttattaaaagttgctaaaaaaaaaaaaccactttcaaaaacatcccatcacatgtcattgtagggaagcaaaaatgagaaaaacacttgatattttttcctctaaccattttatcggaactgaatcccgctttatttgctgaggctgcagtagtttattcattctatattgatcagactccagatttgcgtggacaacttaacttataacattttaagtaaaatcatgcattttaggcagacagacatctcactttttagtatatattccttcttctagaggattatttggtgtgtgtctgcgtgtgaccgtgtgtgtttattgaaaggaaacagttccgtgtttagagttttgggttgttagttagaggtctagttaagctataaaattacagtggaataagtgatgacagccagttagtacagttccctcttatagctgaactgagcttaacacaccaacagaaatgtttggcaaatagactgctaaaatgactctttcctttgtggggacataagttgcctgacatttacatgtttataatgagtcctggaagtagaaatgaaaatatgtgcagaaaatagatttctatcatcacttccttttcttattgagggtagcattgtccagtacgtttttgtcatctctgtgctttcttgttgtccacccatacaggaagaatgttggtgaaaagcacagaaaccagtgacgtttgtggctgtggaatttccatggagaaaagagagcatctgaacacctggaccatcttttgcacctggcagaccctctgcactcaccccagcgtgttctgtgaacttgagtgacaacgcgtgcttgcagggtgctttttggacgactggggaagaggtggggagggggtggtggggggaagcatggacgagaacatggagcaaatgttttacaacctgaacctcagaactgtgatcctccaaggagcgcgctacttgaagaaaagaaaaaaaaaaaaaaaaagtcgaatggcttctcagggattttgttttccgtgcacatataagccatagttacagtacaggtggcagtatttagagcactcagatttcagttctgttaaatgtgaaagagggatcgactgacgttcattgctgttccataactagtgtaaaatatgtatatgtttatctttatttttataatatgcaaatacatttaaatttatacagtttgaagcttctagcgttagttcacactgggtgcaatattctgcatgagaactgtgccaagatggggctgatttcttattttagtataagacttttttgttttttctttattctttaatcctcttcacattaaaaaaaaaatctctctgttagcccatggattaagtgttggttcatagagattgccaataatcagaaagaaccttaaatgtgcatttaagacagtgtcccttcccttcttttcaatgaaggtccctgcctatataaatcatctggcacgctggtgggaaatcctttgctcttccaacgtgttattagtgctgggcagagatggggcacactcaggggccaaagaggacaaaaagtccatgcaaaacttgagtcttttaatggcttaagataatcaggagtcagttctgaatcttacaaagtgctctgcttaataagtaccttacttagcagagcactttgcaaacatattacttattagcagagctctttgtagaccttccacatctggctgtcagatcttaaggttgtgaatttaggctccagttacattcactggagagcataatcccacacgggttatttataaatacagagcctctgattggacggtctcctgccaagaactagtaatacccttgttttaaaatcttcacaaggtaaaacttaaaaagccaaccaaacaaattgctctccattctacttttaattgggccaaacagcatatgctacagtagtaacatgtttttcggagagtgtaaaaaactctgtttacatttgcctcctccgtgggttgatcgaaaatgtataaaactgactgcttctcgccagcctcagacaagaagagtgagttgctggtactcgctactcttttacttcttttgtaaagtattgactcttggaaggctacagtatacaaagtctcaacatgttttttaaaagaaataaggagcaagcgactgccctgctagaaatcacaaaccgatttttgtagaatattttgtgccccaggcattaatttcactgactccagaacctgcagttcagagaatgatttcttatgatgataaaaatcgaatgggatcagacgatgtttgcatttttttaatacttgaataggacacctcaagtttgagatttcattttcttttagaacacagtcacaagattaatctggtgaatccttttgtcacagttctcgtgtgtgtgtgcgcgtctccgtgtgtgtgtgtgtgcatgtgtgtaaaactgaatggtcacatttaattgctttttggaccattgaatagttgggaagtaagaattttttaattggcatgagacggttcctcaactgttaaattaaccaactttgacctgtctttagaaaaaggcttatttgtatgattttgggctaactccccggggaccatattaaatgacaaaaatgctcctttgggtgacacaccctacaaagtatttgctgttacgaacataaacgcccacattcttaatatctaatatttttgaccagtgatgttttatgctgtcatctgaaccctagagaagcagtgtcagaggaaaccttggtgtcacatgtgtcttagcaaaagggttaccatgatcgagggtcatgtgaccaaaagatgctccagagaagcttgagaatttgtttcaagttgggaggagggttggagatacaaaaatcactctgctctacaggactcttcagctgtctatgcaagaaattccgttttctctttcagcacctggaaagacacagcagcccaccgaggcgataggtgattcactaagcacaagaggaatgttttctaagcaaggcgtcccttgcctctcaaacaaatgccctccaagtttgttagggtttctattcctgcaacttgtggtatcaaaaccacttcctggaattgtcaaagcactgccaaaataaatgtttttcccccttctaagaaaaaaaaaatgacagtgctcatatttgacacttgtgtattggactctcttttgaatgaataaaaaggaaaaggggtttggtgtaattcctgatggggtgcgtgttgtttttcatgccatggtttgtgaattttaattgtggtttcccatttcgttgttgtaactgggcagaaattaaaaaagaaaaatcaataaaaatacaaagaaatggttaaa

SEQ ID NO: 275 - DNA, 110301 bp, Homo sapiens
  source 1..110301: mol_type = genomic DNA; note = NW_018654717.1:4458341-4568641 MFHAS1 [organism=Homo sapiens] [GeneID=9258] [chromosome=8]
gccgcttcccaatcgcgccctcccagcgccggggacgcggcgcccgcgctcccgcccgagcccggggaaacggagacaaggaggcgccgccgccccctccccgcggctgcgccccagccctgcgcccgcagcatgcccgccgccgggccgagcgccgccctcccccaggagctcgaggaggcgacgccgctgccggccgcgggaccgcggctgcgagggtagcggggccggagccgggccccccgaggcgccgcgcggcgggcggagagggaggaggagcaggcatcctccgcggcgcgcgggcggcggccctgctgcccggcgcgcccatggcccggccgcagggagaatgcaagctgctctccacgcgctcggcgtcccccggagccgctcgcgtcgccgccgccccctagccgccagcgctcggccgctggctgcgctaggacccgcggccgccggccgccgagcgcgggagggcaggcaggggcaggagccggagggcccggggcgcggcgcggcatgtagctgcgggctcccgcgtccgcgtgaggctgtcggcccggggccccgccatggctgggatggacagtggcaacctgaagaccgcgaggctgtggcgggacgccgccctgcgtgccaggaagctgcggagcaacctgcgccagctcacgcttaccgccgccggggcctgccccggggccggggccgacgcgctcgagtcccccgcctccccccagctcgtgctgccggccaacctcggggacattgaggcactgaacctggggaacaacggcctggaggaggtacccgaggggctggggtcggcgctgggcagcctgcgcgtcctggtcctgcgcaggaaccgcttcgcccggctgcccccggcggtggccgagctcggccaccacctcaccgagctggacgtgagccacaaccggctgaccgccctgggcgcggaggtggtgagtgctctgagggagctgcggaagctcaacctcagccacaaccagctgcccgccctgcccgcccagctgggcgctctcgctcacctggaggagctggatgtcagctttaaccggctggcgcacctgcctgactccctctcctgcctctcccgcctgcgcaccctggacgtggatcacaaccagctcactgccttcccccggcagctgctgcagctggtggccctggaggagctggacgtgtccagcaaccggctgcggggcctgcctgaggatatcagtgccctgcgtgccctcaagatcctctggctgagtggggccgagcttggcacgctgcccgccggcttctgcgagctggccagtttggagagcctcatgctagacaacaacgggctgcaggctctgcccgcccagttcagctgcctgcagcggctcaaaatgctcaacctctcctccaacctcttcgaggagttccctgccgcgctgctgcccctggctggtctggaggagctctaccttagtcgcaaccagctcacctcggtgccatcccttatctcgggcctgggccggcttctcaccttgtggctggataataaccgcatccgctacctgccggactccatcgtggagctgaccggcctggaggagctcgtgctgcaggggaaccagatcgcggtgctgcccgaccactttggccagctctcccgggtgggtttgtggaagatcaaagacaacccactgatccagcccccctacgaggtctgcatgaaggggatcccctacatcgcagcctaccagaaggaactggctcattcccagccggcggtgcagccccggctcaagctgctcctgatggggcataaggctgcaggaaagactttgctgcgccactgcctcaccgaggagagagtggagggatgcccaggaggaggggacaaggagaagtgctacccaccgtcacctccccctgtgagcaagggcatcgaggtgaccagctggacggccgatgcctcccggggcctgcggttcatcgtgtatgacttagctggggatgaaagttatgaggtgatccagcccttcttcctgtccccaggggccctatacgtgctggtggtcaacttggccacctatgagcctcgccactttcctaccaccgtgggctccttcttgcatcgggtcggggcgagagtgccccacgcggtggtgtgcatcgtgggcacccacgcagacctgtgcggagagcgtgagctggaggagaaatgtctggacattcaccgccagatcgccctgcaggagaagcacgacgcggagggactgagccgcttggccaaggtggtggacgaggcactggcccgggacttcgagctgcgctctgccagcccccacgcagcctactatggcgtttcggacaagaaccttcgacggcgcaaggcccattttcaatacctgctcaaccaccggctgcagatcctctcccccgtgttgcctgttagctgcagggacccgcgccacttacgacgccttcgggacaagttgctgtcagttgctgagcaccgagagatcttccccaacttacacagagtactgcctcgatcctggcaggtgctggaggaactgcatttccagccacctcaggcccagcgactgtggctaagctggtgggactcggcgcgcttgggcctgcaggcgggtctgaccgaggaccgactgcagagtgccctctcctacctgcatgagagcggcaagctactctactttgaggacagtccggctctcaaggagcacgtcttccacaacctcacccgcctcatcgacatcctcaatgtcttcttccagagggatccctctttgctgctgcataagctgctcctagggaccagtggagagggcaaggcggagggggaaagctccccgcccatggcgcggtccacccccagccaggaactgctccgggccacccagctccatcagtatgtggagggctttctgttgcatgggctcttgccagctcatgtcattcggttgctgcttaagcctcatgtccaggcccagcaggacttgcagctgttgctggagctgctggagaagatgggactctgttactgcctcaataaacccaagggcaagcctttgaatgggtccacagcttggtacaagttcccatgctatgtgcagaacgaggtgccccatgcagaagcctggattaatgggaccaacctagctgggcagtcttttgtggctgagcagttgcagattgaatatagctttccttttacttttccacctgggttgtttgcacgctacagtgtccagatcaacagccatgtggtgcacaggtcggatggtaaatttcagatctttgcctatagagggaaagttcctgtggttgtgagttacagacctgccaggggagtcctgcagccagacaccctgtccattgctagccatgcatcattaccaaatatatggaccgcatggcaagccataacccccttggtggaggaactgaatgtcctacttcaggaatggcctggactgcactacaccgtgcacattctctgttctaagtgccttaagagaggatcgcccaatccacatgcttttccaggtaagtggagagagggagaagttcttctgtggtatgctgtaagatatgtttttggagatacttggttgtcatttggcagaatgtttgtttaacttcacgggttctccaggaaagcttcgtaagggaaacacagggagatttggagatgagcaaaaggtagtaagtacctgagccttatgaaatgcagtcacaagtgtcatcctctcctaacagactcagacttccaaaatgggttccagtcacaacatttgccatctcctttcccctcttgtcgatgtagcccacatttggtggaaggaaatttcaggtggttgaacagatagattctggacagtgtccgatgttagcctcttactgatcgttggctaaagtgttcattagacacgtctcaaaggggtagatgagtttgagtttcaagtgtccagtgtcacaattttttaaaaaacttaaattttcgtgagtacataggtttgtatatttgtggggtgcatgagatgttttgatacaggcatgcaatgcatagaaatcagattgtaaaatgcggtatccatcccctcaagcatttaagcactctgcttacattcagaatgtaattagaaagtaaaaattactgctcacttttcttaagaaattccagagaaaatcttttgtaattggagtgaacaatggatgagtaaagacagaaatttcagactgtaatgcatgactaaatcctggggctgctgctcccctccgcccactcagggacatggaagatagatgactgaaatctttgaggggcgtttcctcgggaatttcctggcagtttcgagttttatagacgtcttaaggtttgttttttggtaagtgttaagcaaatgaagctttctggcagtgcttaataattgagacggaagggacagaaagctaagagttttctggagagtgttttccagtagacttttttttcgttttctttttttaaaccatcataagcaagtggaagaattccaggactagttgtctggggttttttgtttttttttttttttgaagacttttttttttttcttagagcagttttaagtttatagcaaaactgaacagaaggtacagagatttcccatatatccccttccccacatgcgtagcttcaccaacgtcaacatctcccaccagagcagtacatttgtttcagttgataaacctgcagtgacacatcagtaccagccaaaggtcatagtttacacagggtttactctgtgttgggcattctgtgggtttggacaaatgtccaatgacctgtatcccccattatagtatcatacagagtagttctactgctttaaaaatcctctgtgctctgccaattcattccccccaaccccggcaaccacagatctttttactgtctccataagttttgcgttttacttatatgggatttttttcttttgagcctggttaattggtatcaaactagtttttagttgggaacgtgtccatttcctcatcctttgtagttctttaaacaactgtttttgtgtgtgtgtgtgtgtgtgtgttttgttttttgtttttttgtggagcaggtggttaacaacattccaagtgtcctaagcacaaaccagacagaacaatagcatccttgcacgtttctcacctgggtccccacccccaggggacccggaggggtgatgaaatggaagactgcgtcccactctgatctttgtcctggtcagagagggacaacaagaatgcagctggtaatagtatcaggaaggaattgaataccaatatttccgaaggtgacatctttccgttgccctggatctaggttgaatttaattcttaagcatgaaaaaagccagcgtattcagttaccagtcaactgagacatccattctgtatgtttatctggaatcttgtcacactccatgacttggtagactcttcagtttgttttatatttgtcattgtgtgttattcatggaagcaagatacttctttattgtgataccaaatggaataaagtgactgggagttacgcatttacagggtagtttactgaaggagcaacctgaagccattcttaatccaaagtaataaaaacgaatgttattaacaacaaaaggagagacataggttattgagcaagtaaagatcttctaagaactttgaggagttaggggcgaggctggaggttttttttttttttttttttgttttttttgctaacgtcagctctttatgtttaatttttaccagtcataaattccacagacaagcttgtactgagatgcagaaacaagccccttgtcttgtgttgtctatttgcctttcaaatgaggcacacctggttttgcaatccaggctataaggaagagattttttttcaatgtggaaaacaaatgattgaaaaattgtaaaattatcttatagattgaataggaataaatcatcagttgtttttagagcacgattataaaatatatacatatacatataattataaaatatgtacatataaaatatatatgtatatatacaccaacgtacatatttttgtcttatagtctttttgtttttttttgaattgtgttgtttttcaaaagtagcagagggtatagaatagtagaaaacatgattatagtacatttctcgttacattaagaagatgcaaaaaacattttcctcttctgtatttttctgtgatagccatcatttgttagtaattgttacagttacgaaagatttggtaaaagttaaaataatgagttagaaataaaagctaaatgtgggaacagaattatgttgagtgtttaagtagagcatacattaaaaatagattcattgaatccctagattattaaaatatatattaattcagcagaaaccctttgaatctattggcagcctttgccttttcatgtttttttgtttgtttgtttgtttttgagatggagtcttgctctgttgcccaggctggagtgcagtggagtgatcttgactcactgcaacctctgcctcctggattcaagcgattctcctgcctcagcctcccaagtagctggaattagaggcatgcgccaccacacctggctaatttttgtatttttagtagaggcgggggtttcgccaggttggccaggctggtcttgaactcctgacctcagatgatccacccacctcagtctcgcaaagtgctgggattataagcgtgagccactaggcttggccacctttgtctttttaagaagtcattttgcttctggggacattaaaaattgtttacttttatgttttataaaagcgttaagttgtcctataaactataacaattttatatgcaacgctgaaaaagttggactttgaattttcttaactttgggatgttacagtaaaagtaaatagtaaattactgtctctcttgattttatacagaaaaaatgtataaagttgcactaatatcttttaaagtatttttatgtgaaaagcctattttggccttgtcctgttggattttctggcctgagctgccctactgtagttgaccacgggaagtataatggtaaatttctcttttcttattttggtttatacaagaaaagtaatgggcagcgtgcagtggctcagggctgtaatccctttgctttgggaggctgaggcaggaggatcacttgggtcaaggagttcgagaccagcctgagtaatgtagccagactccgtgtctacaaaaaaaaataaaaaataaaaatcagctaagcgtgcacacttgtggtcccagctagttggggggctgaggtgggacaatcacttgagcatgggagtttgaggttgcagtgaactatgattgtgccattgcactctgaccctgtctcttaaaaaaaaaaaaagaaatgattggaaaatgcacatccagcaatcactagtttcatagttttttgtaaaaataaatcacattgtcagagagaagacctatttgtcttatttaaaataggtaatctgacaacgtgattatctttttaagacatcttatttaagacaaatgggttgagtgacaggagattcttttggaaactcggagatggcctatgatgaagcctaaatgtcactgtgaaagtcttgacctgctttctccatcctggccaacatcctagcctggtcaacctggtgaaaccccatctctacaaaaaatacaaaaaaattagctgggcatggtggctcatgcctgtaatcccagctactgggaagaatgaggcacgagaatcccttgaacttgggaggcggaggttgcagtgagctgagattgtgccactgcgctccagcctgggcgacagggcaagaccctggctccgaaaagaaagtctttacctgcttcctgcaggtaccctttcttttttgcagacttgctgcccatagctggtagccaggattcccttccttttgctgttttccttctcattggttggtcctgtatacttgtcttagagcaagtttcttcttgtgggatatttgtttatgcttttattctgttctaccagtatgacctctaaactcaaagagttggtactcttgaagttgagtgagggtacattaagatgtggtggttaggacacgggcctgcagcaagattcaagtgctttgatattccttttaagcagatgagtgaatactgtgtttttgaattggaagagtgtgtcttagtgagttaaacttgcattgactgcagattttcactaaatatcctactctccaaattatttaaggtcattttaaaaaataaggagaaagcaacccaaatcagtagacagaatgagttatgtggctttctttagctttactgtctttcatttactcagtaacttgatgcctttttgtatctcatgccaaatgtcttctgtccctcagtttcttgcacacggagtgtacctctccgacaacacagcatatttgacttgttttgttggtgtttggttgcgtcatgatatatctttgattaggttgttcacttgctgcttctgagccagagacacacccgagacttagtagcttctgcagagcctctcagatgtttgctgaatgatagtttggtctttttgtgagaaataactttttttttgggggggtgggggcagggtctcactctgtcaccgaggttggaatgcattggggcaataatggcttactgcagcctcgacctcttgggctcaggtgatgatcctcctacttcagcctcctgagtagctgggactccagaaacaccctaccatgcctggctaatttttgtgttgttttgtagagacagggtttcgctgtgttgctcaggctggtctcaaagtctgcctgcctcagccttccaaagtgctgggattataggcttgagccaccatgccctgcctgagaactatctctttttctttgttattcacacactcagtgaaaatcccaggtagtattgtaatgattatctggctttgtttagcttcccaactccctccccctcacagtgttcctccagcattcccattgtgcgtctatgactggtcttacccttgaatgggtccttcattttgaccactgaagcaaagcaaaattcttgccttattatatctaagttttagaattactggaatttgagcatgacctagttgtttggattgaattagtcattgtttttaattttacaaaggtttttcaatatctctttggttaagctttattaatattgatgcttcttggcttttctttttatgaataggcctctgaactccctgggactttgttttatgtaaaaatcaaaaccttaatcaggcactaggataaacaaatactgtgcagaatagagttctagaaggctagaaaggcctttggagtatttgaattattttaaatattaggtgcctcttctttaaaccctggaatagactcttaagtccatctctgcacaagtagtttagaatttcctaaagtattttttctttaattttttttttctttttgtgtgtgtgtgtgtgtgtgtgtgtgtgtgtgtgtgtgtgtgtgtttgtgaaatagagatagggcctttttatgttgcccaagctggtcttgatctcctggcctcaaatggtcctccccactcagcctcccaaaatgttgggattagaggcgtgagccaccatacccaaccagtattttttatttagtggatattttatgtcatactctgaggttattcccctttgtccgtgaagaggtgaggggctttaactctgtattataggaggggaatgagtggggaaaggaggaattggacatttctgtttttcttctcatctacctattaacttgcttctatccatgggagccctttctttttttttttttttttttttttttgagactgagtctcgctctgttgcccaggctggagtgtagtggcgctgtctgagctcattgcaacctccacctcctgggttcaagtgattctcctgcctcagcctcccgagtagctgggattacaggcatgcaccaccacgcccagctaatttttgtaattttagtagaaacgaggtttcaccatgttggccaggctcgtcttgaactcctgacctcacgtgatccacccaccttggctgcccaaagtgctgggattacaggcatgagccactgcgcctggcccatgggagccctttttgattaaggacacctgaccatccatccattagggcatcagaatgcctgctgattttgttttgttttgttttgaaaaccagcgggtgggtgcaggcccagtactgccctctcttgtctctggcagccttggcgtccctgttccctggggatggaggtctgctttgtgtttccagtctttgtggaaagcacatcaggtaggctcaggtctcagtcctctctggttcagcttttcttttcttttctttttgtttttgttttgagacggagtcttgctctggcgcccaggctggagtgcagtggcacagtcatggctcactgcaacctccacctcctgggtccaagtgatcctcctgctccagcctcctgaatagctgggactacaggggtgcaccaccatgcctggctaatttttgtatttttagtagacacagggtttcaccatgttggccaggctggtctcaaactcctgacctcagatgatcctccctcctcggcctcccaaagtgctgggattacaggcatgagccaccgcacccagcctggttcagcttttctgattgcaacattaattgctggggggtggttgtcaggtttaccttcttctgggggctggcagccttcacttcagcagggagggattaggaacccctgtttggcctgccttctccaaggctgctctagcatgaatgaagctgtgcaatgcctggcacagggcagatcaggtagaaggggtcagagcaggttggttattttgaaagaactcaaactctcatttttattttattttatttatttttttgagatggagtctcactctgtcgcccagggtggagtgcaatggcgcgatctcagctcactgcaacgtctgcttcccgggttcaagtgattcttctgcctcagcctcctgagtagctgggattacaggcgtgtgccaccacgcacggctatttcttaattgatgcctggcaagtgcttttttggttgtttatgatattttgtttgtttgtttgtttgtttgttttgagactgagtctcgctctgtctccaggctggagtgcagtgccactatctgagctcactgcaacctccacctcctgggttcaagtgattctcctgccccagcctcccacgtagctgggattacaggcacataccaccacccccagctaatttttgtgtgtgtttttttttagtagagatgggggtttcactatgttagtgaggctggtctcgaactcctgacctcaggtggtctgcccgctttggcctcccagagtgctgggattacaggtgtgagccaccatgctcggcctgtgatgttctttatctttatgcattttaaaggaagccattgtcattgtcccatgtggtttttctggtatacatattcctgccttccatatctaccgcctaattcttacagaaatgggggaagagtgggcaaggggcacttagcagcaggatgcaaatgtgcatttaatgcaggagctggccacagaaagccttctaccacctggccttgaggcagtgaatactccaacctcccaaagctgatggttcactggctgctgctttcttttttttttttttttttttgagacggagtcttactctgtcaccaggttggagtgcagtggctcaattctcctgcctaagttcaagtgattctcctgtctcagcctctcgagtagctgggattacaggcaactgccaccacgcctgactaatttttgtatttttagtagagacagcgtttcaccatggtggccaggctgatctcaaactcctgacctcaggtgatccgcccgcctcagcctcccaaagtgggattacaggcgtgagccaccatgcccagccaacattctatagtggggagcatatagatggtgaggagcgtgaggtctgatggtggaggtggaataggtgcaggaaggaagatgttttcagtggttcccggaaagtgtgtacaggttacacctgctggtgtgagttcctggaaggtcatggaagggtggctggcgtaatgcagagatgattgcatgtgtactctatatgatggtggctgcgtggataacagttcccagaatccactgctagcagggctgacttatttctggagaccaagaaggaaacattctgagttatttttatttttggcactaaatccttcagaacatttttccttcctcaatctcttagctgaaaatactggggctttgtttattaaaagagtaaatttaatgaaaagctatcaccaacaagtttttttcttttgctgtaaatttatagaagcaaagagtctaaaaagtgcacgttggagcaggagaagaatgtgggcagaggaagacagaggcatcgggttactgctggtgggcttgcagggacattgtgagtttggagcctgtttcacccatcttaggaaggtatgggtcaggcgtgatggctcacacctgtaatcacatcactttgggaggctgaggaggtggatcacttgaggtcaggagttcgagaacaggttggccaatgcggtgaaccctcatctctactaaaaatacaaaaattagccaggtgtggtggtgtgtgcctgtaatcccagctacttgggaggctgaggcaggagaatcacttgaacccaagaggcggaggttgcagtgagctgagattgcgccgctatactccaacctgggcgacaaaacaagactccatctgggggaaaaaaaaaaaaaacaaaaaaggaagggatgtcctgccctagaccgacagcccccagcacccagcctattgcaaatggtttctttcacttttgcaaatctgaacaagcatgcttgggagaagggcgaggaggcagggaaactggagtcatgttaagactactctctggaggtttctgttgtgcgtgtgccattctgccttttgggtgatgtggcttaatgagtcaagccctgatgactgatgctgcttttcttcctcatcttcctcctcctcttcctcctattgagtgaaagtcacataatatgaaaaagccattttaaagtaaactattccctgtcatttagtacattcccagtgttgtgcacctgccacatctcagccaagcacctttggaggggtggggcagatacattggtgtcattcttcctggggccaagtgactgggaattcttttgccaggctttgtagcaactttctttccaaggtgtaacttaagagtaggggttttggggctaggcctggagatgccatgttgattggagatcttggacacggttgtggggatcctcttagtgtggatgagaggacagaaaggagggcatccgagcctcctggtctgttctagggtgtatgtgatttaatgaggggtgacatacacgagctccgtaaagaacacgtagaagagaagtacaaataaatgttgtgtaattcttgtcttctgcatagagcttttttttaaagataaattttaagtttaactcctggaatgactggcaagacctaatgaaggtagagtggcagcgggtggtgatggtggcagtgatacaaatgtagatgattaccagattagataagtgtcgtcaatcactgttgaatacctgctctatacagaagtttgtactgaactgggagttctaggaaaataaaatacctgatcttgggcttggggagctgtgttgggatcttggttaatgtcattgttgattcttgtaaatacggaatctgaccccatatggagaaaatcatttgcatatttgaatgttactttggggggaaccctggcttttgatttttccagaaaaaaaatgtgatcctactgagcaaagcaggccacagctttgaatttccttcagatgtatgagtaggtggaaagtaatggtcaagtccttcttttgagttgactttcagtttggattacttgtttgcgagaaatctcaggcagaacttgtgaggatgctggaaaaaggaaattcattgtatatgaggatctctaaaaacttcccaaacgaatcagcctttccaaggaaaagaaatgccttttcttcaggagtccttaccttttttttttgagatgggagtctctctctgccacccaggcttgagtgcagtgatgcgatcttggctcactgcagcttccgcctcctgggttcaagtgattctcctgcctcatctcccaactagctgggactacaggcatgtgccaccacacccagctagttttttttgaatttttagtagagacggggtttcatcgtgttggccagcctggtctcaatctcctgacctcaagtgatcctcctgcctcggcctcccaaagtgctgggattacaggcgtgagtcaccatgcctggcagtagtccttaccttttttgtcatttatagacttgctcccatctggggaaggattcaaatcatcagtcatttctgaacaccaaagactatatgaatgctgactccaaagacagcatccattaaagtgcatatcatcataataaaaatatatgactgctggatttctttgctgagagatgctttgaagtactcttgtactattagcatattaaatgttgagaaaattaaagagtttaattttcttagatcctccttattcctaaaatgaagtctatgctattaacattgtattagtactaggttatagcagtagtgaattttaggtctctagaacaagcctccctcccttcctcctcactctttctgtccttccctccttttttcctttttttttttctttttttgaaaagaaggaatttttaaaaacgcaatggaaagggaaaacataaaaccagaaaaatatttcgcctgggtgccgttgtttgacttaccaactttattattgttttaatatgattcttgtttttcatgtcataaaggtaattgtgttaatcatcacatcagtctccctatttttggagaaaaatagaagaggtgacaatgttgacgttttctcatgttgcagagacagtgctaagtgcctcctaggggtgatcttatttaatccccacagcagccctaggaagtaggtattattactgtctttgctttcagaaggagaaattgacatttagaaattaagtgaattccccagagttagagaactctaggatatcagccccaaacctctgctctgacccaccgtcacttgggtctcagttaggttgccattgatttccagagtacaccagctcacctcctctcccttcatattctaagttctgggcagacagtctggtactgcacaggagctgcccgtgcagaggtcagcggaggtcatggtcaggtggaggtaaggtggggagagcgccatcaggggtctcagagaagggttcccagaaaggccacactgtagttgagtgtcagaggatgatttctagttaaccacctgaagaagggaggtgggtggagcatttcaagttagaatgccatttaaaaggcagggagcagacaaagacttcagcaggcctaggggtgggcatgtgtgggcacagatgcgttttgcatttagaaattatagtaagggagagacttctttgtttaaatggcattcatggactggtagacacttgccagtgacccactggcccatcaactagagttttaaaagcattgttctagcctgtccctttgtcattgggctgggctctcttgagaccttggaagagatttatggctgggaaaacggaagggtagtttcacatgatttgctcagactcataatcaagttattgttaagctgacagaacacctgctctgcagagccatgtctaagcgtgctgctggtcactttcactatgtcggagtagagggagaagaggagcattggttattcattctaacatcagccagagagccgcatgcctctgtaatccctaggaatgtattccagaacatcgattttccctgctctaaatcttaccctaatagaccctgcaataaaggcaaattcggatctgacacaattaccattttattgtgggctgtttaagtttcactatatttactttatgcttttttgtgtgtgacactactcactgactgaaaatgccatttttattaaatttgcattaatggaacaccgtagttttttttttttttttttttttttttgaggcagggtctcactctgtcacccaggctggagtgtgcagtggcacagtcacagctcactaaagccttgaccttctgggctccagtgatcctcccacctcagcctccccagtagttgggactacaggtacatgccaccatgcccagttagtttttatattttttatagagacaggattttgccacgttgcctgggctggtctcaaattcctgggctccagcagtccactcaccttggcctctcaaagtgctgggattacaggtgtgtgccactgcgcccagccctggaccaccatgtcttatgcacttcatttgttggacaccacttaccgcactatgacagtggtttcattttttttcttttttttttgactgagtcttgctctgtcatgcaggctggagtgcagtggcatgatcttggctcactgcaacctctgcctcctgggttcaagtgattctcttaccttagcctcccgagtaactgggaccactatttagaagagtgataagtttgtggataaaaagtcttttcttcatagaagaggtggaatacagtatgatctctgttcatatgaacaccttatgctcttttaaaagtactttttcccctttataaaaacttataggccaggtgtggtggctcacacctgtaatcccagcactttgggaggccgaggcgggaggatcacgatgcatacaccactatgcccggctaatttttgtatttttaatagagacggggtttcaccacgttagccacactggtctcgaactgctgacctgaggcagtctgcctgcctcatcctcccaaagtgctgggattataggcatgtgccaccacgcccggccgacaacagtggtttcttgcatcttatcatcatttgagtttgtcttcccttgcctgccaacttatcaaagtttcctcaattacatttaatcaaatcctaggaagtacaaggtatttttaagtcttaggttatattttgtttgtatttgctttatagattgacttgaaacagttgggattttgtgtagttttcaaattgaagcattataatatggtggttagttgcaagagctcttggagtagactgctgggctctaatccctgtgccactgcttcttagttatgtgactttaggcatcataatagtttgtgttggttctgaagattgagttatatgtgttaaatgcttagaacaatgcttgacacctggcaagagctcagtaggagtttgctgctgtttccaccattccagaaggtacaagagtctaaacatacttttagaagagtgataagtttgtggatcaaaactcttttcttcatagaagaggtggaatacagtatgatctctgttcatatgaacaccttatgctcttttaaaaatgctttttcccctttataaaaacttataggccgggcatggtggctcacacctgtaatgccagcactttgggaggccgaggcgggcggatcacgaggtcaggagttcgagagcagtctgacatggtgaaaccccgtctctagtaaaaaattgcaaaaattagctgagcgtggtggcacgcacctgtaatcccagctactcaggaggctgaggcaggagaatcgcttgaacccaggaggcagaggttacggtgagctgagatcgtgccactgtactccagcctgggtgacagagcgagactgactcaaaaaaacataaaaaatttggagagtagaagaaaaaaaagtttctcatggtgggtatctaaagtaatcactacacattttgctctgtgtcttttagctttgtttcctccttaagcttaggttttaaaaatatgtagttataattgtataaataattcaaatattgattttttaaacttatgctaacatggatataatttcctgtgattagtatttatacagtaattaaaaatgcttgcataatagtacatcaaggtgatttttcacctttgtttatttaaccttgtgttctttttgtttatccaaccatttgtgctcttgttcccagttttttttgtgagtgattctctgatgactgtatttctttataaaaactcttttttatttgggcagtaatccccgaagtagagtcattgagtcaaaggcaaaaaatgtcattaaatctcaatgcacgtttacgttgcttcccatgaggatgggcacgtcagatgcaagatctttttcactgtacctcctcaacattgggtatcatctataaaatgcactaccgtttaatggaaacaatatgtcactggtgactgaagattttaactagtggatgtgaacgttttcttgtataaatgttgcctaattgtgttgcttcttttctgaatcctctaataacatcttctggcatcatcttggtggtttttctttttttttttttaatcacagtgttttatcagtttatattaactcttcatatataaaagataaccttttgtctatcatacttaaggcatttttttctagcttgttcccctctttgctttaaaaacctttaacgttttgaagtttcaaatttcattcagtatattaatagcttcctctgtgatttcttctagagcttaaaaaaacctcataacatttttctaaatacagaggtgacagcgggaatcacatagtgattcttcacccttataactttaactgaaaataaaaaaagtgctatccatatgtggatggtagattcattagcaaagccccctttttcataacccctccccaaactgtctcctctgtaaaatgtttcttgctgatttcttccagggaaaataaagcatgtatttgcatatattttaacaggaatgagatcatgctgtactccttgttctgcacctcgcatttgatcacttcaaaatatatttttgagatgcctccatatgaacagttagaaccctgttatagaagattattatatgtgtgtgtgtgtgtgtgtgtgtgtgtgtgtgtgtgtgtagaatgttatagtatatcctacaaatatagcatagtagtctaccaatggatgtattgttcagtcacacctataccggcagacctttgatcctttccagattgttaaactaagtacgttctccaccttccagaggtgtaagaaatactcagttttatttccttcagggttaataatccctctctgtgctcggaacactcttgagatgcaattagaaaaagacaaatctctaaatcaaagtggtgggacctaaaaaaagcctcgagggttatgaagccttcgctttgtgatttgaaacaaggtaatttttttaaattggctttggtgatgtgtattggaacaccattgttttcagcataattacgcatttcacagcttaattcagccattacacgtgatgcagtgtttagacatagcaataattacaaattgtacatgtttacagatagatataccgctgatcaaaataaaacagtggcagcaagaatgatgttctgtccatgtaagaaatcaatgaaatataattaagaacgaactgtatctcattgactcaaaacattgcatctgcctttctgtcccatctgttttctaaacaaaaatcttcccgtgctgcgtggttgtttttatttgtatcctagaaccatcctctcgagttccacaccgttgtattttctacacctaagcttggtgtgttctgcacaggaaatgtttcttggatgttttatcctcataccaagtgggaatttaaaatttaagagattacccacactctttgcctttctgtacatgtgatgaagaaagagtgggtgtaacccagcactctaaaatgtgtttgacctgtaaaaaaaaaaaaaaaaaagtaagcaattaaatcctgttatagttgcttctgtgtttaaaacatacttaatgacgtatatatttatttgaagctaacaaagtccccagtcaggttcttgggagtttttttcacaggactcattgaagtgtttggtctttaaaatccttcatttcatgctaactgccaagtcaatgcagacagtatggccgaacagagctggtcacattttccctgaacatgctattaaaaaatatattcactgggattctcttgactcatggcatagctgaggtgactttgattccggagggctattgcttatgaattgcatgtggaagaactaaaaatagaaatgtgaattttccaaaagaacactatgataccaaaaatggctcactggcttgcctagagctgggctgttttgtgcccaaggtacagtaataagaactgggatgcaaagccctgtagggtgcatctgtccccttccctgacacccctcactcccagatggctcacgagtggcactgcccggttgtctccgtctcactcttgcacgatgttctgctgcctgtctgggatggagcaggtgttcttttgaatgtatttgttaagcctctgaaatatatgcatttccccctccccaagaaaaacacacatgtgcatgctctgtgcttttccctggttactgtattgttcccatctttttttttatttttattttttcccttggaatagggaatatccactcattttctatttagtcccttcaggaatttgccttaggggctgttgggccaggcctcactgcagccagccagagcttatcagctgtgtgttaacctctcccagacacttcttgaatgctgttcatgcatccgagcctatgcatctgagcctcctctgtgtaatgtggtgcggcattaaaagcttacccaaatagcagggatgattgcatcttgttgattaccagggctgataacattttcttgcttagctaaaaagaaaagccagatgactgtttccaggaagtgataaactgccatgcatccggccccaggtggtccgcatgaaggaagctgcaaggttggaatcctcctgccgtccccttttacagttcataaatcttctgatttatggggccatttgtgattgcagacacatttattcatggggggatttccatcgagatcataacccactgtaaagcaggaggaagaatcaggaattagaacggtgtacattcctctttgttagaaaagaatcccgattctttggtcatagacaaatatttgcttttgaagaatctggtggtgtgtcgctggctttgttcatatccgtgcacagtcacatgctcccttgcctcccatggacccagaagcttatgttacacagatcgttttataatgcttgccatccgggcatgtttatgcaaagtgtgaataactttttgccttagcctcctcttccttccttctccctcctttgatttagctcatttctggaatggggcagattttcatctcagggagttgatacggtttcctaggtagggtgacagaacaagtgtcaccttagctgtagctagagatgaatattgccatgcagcttacttgctttatattaaaccagcattagagaaagaggccttgcatcttttatcagcagtatgttaacctctcccaggcacttcttgaatgccattcatacatctgagcccatgcatctgagccttggatgtaattaaatcagtggattaggaagtcgggggcctggacctctgggaagccacttggcctccctgggcctcaatttcgtctgtaaataggtaaaaataattctaacagttcccaagcatttacacctgctatcagagtctccttagatgttgtgagggggaaatgaatgaatagatgtcaagtccccaagtagttttttctttgtttgcgtgtttgtgatcactctgttgcccaggctggagtgcagtggagtgatcttggctcactgcaacctccacctccctggttcaaatgattcttgtgcctcattgtcatgagtagcagggattacaggcatgtgccaccatgcccagctaatttttgtatttttagtagaaactgggtttcaccaagttggcgagggtggtctcaaactcccgacctcaagtgatccagccccctcggcctcccagagtgctgggattacaggtgtgagccatcacgcccagctgcaagtagtttttaccatataataagggctcagtaaacattagctctgattaccatcatcctggtttacagatgaggagtggagacagaggagggctaagtcatatggccaggggcacacagcatgtagcagagcccaggttgtcctcaggaacctatggtctttgctgtcaccctgtgctgcttctcaggaaggcaatagcttgtcacccattaaaaatgggtagttatttgaatgaaaagcagaataacccccggaggcagaggttgcaatgagctgagattgcaccattgcactccagcctgggcaacagagtgacgctcctgtcaccaaaaaaagaaaaaaagtaaggactccttgtgtgaaatgcacatggttgcttttaacattgcagtactggactataaacatttgctggggattggcagtgaccagccatggggcagagcatggggcatgggaggggagcaaggccttgaccccgggaagctgcagtccagggaagcagtgtggacagtaagcagagatttgcagggctgtgtaataaattccaggagaaaaagatctccaggggctcggagaggcctgcgggatggaatctgtcttgatccacgtgtgtgtgtgtggggtggttagatggatgggaggtctccaggggaggtgagtcgtagggactttctgtaaaaccagggcccctgacgtgtgatgggctgtacaaattactggcagcccaactattcatttatcaatgcacgtctgtaaatatttttgttttctttttaaaccttttttgttttcctgggagacagagtcttgctctgtcatttaggctggagtgaggtggcgcgatttcagcttaccacagcctcaacttcctgggctcaagctatccttccactgcagcctcccgagttagctgagactgtaggtgcgtgccaccatgtctggctaattttttttttttttttttttttttttgtagagacagggtctcactatgttgcctaggctggtcttgaactcctgtgcttaagtgatctgtgcatcttgtcctcccgaagtgctgggattacaggttgaaccactgtacatatcccgtgtaaataacttttagcctatctattcactagctaacactttttcaccagaaggaacttctggcatctgggtgttaagctaaattaaagcctgatggtttttttcagagggtgagaggaaaatactgaagggtcaaatggggaaatgtcaaatttccattttgtcagcacactcagggcagcagtgtggaagatggatttcaatggagtaagaatggagtcagagggaccacttagaggtaattcagacaataataaacaatagaggcccccaggtaggtccttggggatgaaggcaattgagtcttggatgttaatgaggcagagtcctgggcctctctcctcctagctctgagctcttgaaccttcccaggctccggtttcctcatccattagacagaaagcatgactgatttaagtgtatgtttcaagaaaaattttaaccacagcgggaagaagactgcagcatgttttaaaaaacagaaagcggaagtgatttgataagattaatttcaacaggactgatgtggaacggctgctagcttaattggtttattagggtcgtgtagccaccctcttatgatggataccaggtgaattccaggagatatatagtcttaggtttgtaagcagtgccatttgcagaggaataaggttctttatttcttaaatttggaagggtctcatagaaataagagactttataaatatctagtaacctgtcaccgctttaaaataccgcaaagataaatgatgctgattgtcgcgtgcttggcatgatgaattatgtatgtagcgtgccccggagttctttatggttgtgcataacgaatcagcttttgttctagcttattttcagtggtagtgcttgtaaaagcagaggtcaaagcagatgcactgaagagatgtggttggtgcaggatgatcgggttttgctatcctgttctgtgcattgcttttgtttgtgctttgatttttcattatcaactttggggagggtgggagagcagccttgtggcattaacagctgcatgatggcacagagcaggcagcgactcttcttggttcatgcacctcaaaagcggccctctttttgccttcctcctcctcctctctgcacctgctttgcatagctgttaactacttttccacctaataataaaggaaattgaaataaatggttaggaacatgcccataatcttttttctcactgactttctctaaactctagacgaaactagagaggattaagaaatgtaaaacacagcagagaatgtcttttttttcctctccctttttctcttcccctagcaaagatttctttagaatctgagtgagatatcagaggtgctgtttgcatatgaagtagcgatgactatgggtggaagccagttgtaaggttgcatagtcatttataacttctttctatgttaaggttactaccgactttatgagaggagcctcccagactcaggtgtcatgcctgactcatgagtaattcattagagagggcccaagccatgtatttcattgtgggtttgtgagcggcctcatcttccataagatgctcatttgttgggctgatccaaggcaaagatccgagtagttgggagtagctccaaattgggatgagcccaggcctactgtgcatatctgtttggaagggcacatctgtctaccaagggctggttccagtgtattagccgagtggcactaggtaatcagtttacagtcagtttaaaaaagttgaggctatccttctcggtgattaattatggcttttagttcatactagattaaaaaaaatctttgcatctttgcaagaataatcattaacttagtttgtctatattattagccgaaagatacaacacagtgctcatgcagtgtagagaaatgagataacatctagagtttacatgtaagtagctatttgtcaggatatttattcattgattctagattcataaagcaggagtttccagaggccttgcagcaaggaataagcacctgggagattcaactgaatccccctcagagcctgtgcgttgggaacttggtctagaaaatggatcaggtttgtgcgctataccacttattataataaatgataaaagtcagtctggacagagtgccacagaagttcaggcgagaaagaggattcttccaactgagtggggccatggaaaaactcgagttccatttattagcggtaggaaacacatgttgagaatgaagaatggagttaaacaattggtctttccctcagatcccagggtttttaacctgttactaaaaaagtatagcaatttatggccaggcacggtggctcacgcctgtaatcccagcactttgggaggccgaggtgggcccatcacgaggtcaggagatcgagacaatcctgcctaacacggtgaaaccccgtctctagtaaaaatacaaaaaattagccgggtgtggtggcgggtgcctgtagtcccagctacttgggaggctgaggcaggagaatggcatgaacccgggaggcggagcttttggtgagccgagattgcgccactgcactccagcctaggagacagcgagactccacctcaaaaaaaaaaaaaaagtatagcaatttataatgtttgaattatcattagcttattggcgtgtaataatactttgcatacttttaaaattctggggttggattaataataaaagagtagaaacattgtttttataaaaaaaattttctgtgcgacacctataggcaagtacctatgggcctccttttaattttggactgttttaggaatgttttattttatttttggtatcttaggaaccataagaagcatactttcaaaaatgtgagggtatatttttaacttttgttataaaaatgtaacaaaaagtttatatggtgaagaatttagtgggtttgcatatgctgatgaccattgtgactttcataaaaccccacagcctgtgtttaattccatttcctactagtacagacttgaagagctcagtccatctcctttattatcttgtttcctttaatctatattaatgcaccttagcagtatcagaaattttgttaatatattatgtgtagctgaactgtaagctaaaaatagatcataccaacccatctctctttctctttcttttttttcccactgtcaccttcacatttattcttagtgacttgcaaatgatgggattacaccttaaaaattgtcttgtatcagatatgtatttccccattctctaaagaaggctaattatgcaagtacacggttctttcctgattcatgaattcatatcacgattttattttcagattcctcaaggtaattgcttgttagactggttcacaggatgagagatatccaagtagtcatatgaaccgtttccgtcccattcatgccattctgtcttctgcagaaaataagtgagtcaatcactgtttatgagaatgtgtaagagactggggagagagaagggactcagtggccattttgtatcacggatcctttttactagggataagagtgatccttactggctgactgcagtggctcatgcctgtaatcccaaaactttgagaggttgaggtgggaggatcgcttgagcccaggagttgaagaccagcctgggcaacatggcaaaaccccatttctacaaaaaataaaaaattagctgggcgtggtggtgcatgcctgtagttgcagccgttggggaggctgaggtgggaggattgtttgagccagggcggcagaggctacggtgagctgagattacgccaccgtactccagcctagaggacagtaagaccctgtctcaaaaaagaaaaaaaaaaaaacaaaaaagaagtgatccttgctaagttgccatagatccctgttctaggttcccattcagcgtcagagttttatcgtctgataaaacagggatcagttagagagcttttcgcaggcaaaatgacactgattttactgaaccaatggtaaagagaagtgctcctaggttcccaggccctgttcttctgtattcttcctgcttagaaaaagagaataataaaagcacttcagctaggagtagagctttctaaaaattggccagccaaatccccagggaaaccaggatttcagcttctctgtcatcacctctgtttgaggttggcatgctttggcactttttccgtggctgcactgtcaggagagtaggccaagccgcctgaacaaggagaggtgtggaggacagtcattctgtagctgcagtaatccctgccctagtttttctgccttcctgagagaaataatagacaccacttgttttacatcaaccaggcttctgacctttttggactatgaaaattaaattcttctaagacactaagtgttaaatttgggacccaaaaatagttggactaagtggctgcctggtttaatagtggcaactcagttcagataataattactagaaatttcaaagaagttataggagcctcaccttgagtagactaggatttgacagttgagtgatatacaattgtacttaacagccattttctaaaatgaagttttctggacagtaattcatgtcaagtgtcatctgttgcttttctatgtgattccacttcaccagggctgtcctgggaggggtccttggttgtgtttagctttcatcgagttagggtagtaactcctagtctccttcctctccatcctctgtaccttgtgtctcttttcccatttctgatttttgtatccaggagtttctgatttttgccttttgagttttgtttcttaaactaagtggagctaggtttttatggggaaataatttctcagcctgtcatcttgacagtgaaacatttcttttttttttttttttttttttttttgagatggagtctcactctgtcatccagggttgagtgcagtggcacaatcttggcttactgcaacctccagctcctgggttcgagcgattctcctgcctcggcctcctgagtgactgggattacaggtgcatgccaccgtgcccagctaactttttgtatttttagtagaaatggggtttcaccatgttggccaggctggtcttgaactgctgacctcaagtgatccacccaccttgccctcctcaagtgctgggattaccggcatgagccaccagacctggcctgaaacatgtttttggtttgttttttaatctaggtggaaactagataccctttctagtaactaatatgtggttcatacctaaagccaaaagaaatctcaagtaattttttggatgagacaatttcggcaccatgttatataactttatgatatcatcttatctgagtcctctctctctccctctctccttccctttccttttttccctagtgcctgtaggtgtgagtttaaagataaaatgactgccaagtgaccccaagttcaaggacttttatcctggcatgcaactggaaaattcagtttacatgatacatttcaaaagtgtctggtgggtagctggtacaaatgataggaagagagtagctaattttatgctcattgtggttctgtaagatgatgtaaatatatgaggattttaggagaaataaaaagtgatctcactgaaacagttatttgtagattgcattttgacttgtctgaaacacatcaaggttaacataagaatatttaggatatgaatttggtccaaggaacattaaaaatatttttacttggtgattctgataggaagacattgtttctactaatgtgggagggtgggcaaagaggaggaggagtcgggcagggccattttgttgcttggtgtgaatggcatccttgaatcgtgcagtgggcggccctcatggccagtagcagcagatttggttgagcataggggcagaaaatggctttgtttttttaacttacccttctgtgtttatgttaccagaacaccagagatttggtttaggtcctgctgcttgccgcacagaaagccaatcactgctgagacaagtgttgccagggaagaaggctttaatcgggtactgcagccatggagatgggagctcagtctcaaatccatctccctgaccaactaaaattgggggcttatatagtgggaaggcaatgtaactacatgccggtaaacaggaattaggaaggtataaggaagaggagttggtcaacaggaagctggtggtcactgaggcagccataatgggtgaagggtctggtgtctccttgtccaaatgcagtgatctggtgagtttcagctccttgatatctgggagccctgatggttggttttctgagaaaggaattcagataaaacaaatgcaactttcttaagttttaagacagggtgggtcaatttctaagctcattagaaactgcatattaatagattagttctgtgagatgatggggtgggtttcagttacaggtaagggccagactcttagtgaaaacaggccatggtctgggttaaggaccagtatgttagggaaatgattctctgaggaagtccaaataggtaggaatcagatggtcaaaacagaggttagaaacattttaatgatatggtctggaaaaatctaaggactagagaccacgggtgcaaggggttatggccagtggaacaagaaaagatcatacgtggtaataaatataggtaacagtccattctggatgaggtcaactgggcaggaattctttatgctccatctaggcaggaaatacatggaggcctttgaagtcccactggcatgtgtgcaaggagccactgttaatttacacaggaaaaaggaatggagggagtaacagcatcagtttgaggtcctgtgatatatccattgggggtgaattgtcccacagttattaaattatttaaaaatcagtactgtattctaagttacactgcctgatttcagtgcttactttccggctatagtaattaagacagtgtagtattggcgtaagtataaacagatagattgatggaacagaatagacccacacatacatgcccaattgattatggacaaaggtacaaatataattcagtgaggaaagaatattttcaagtggtgccaaaacaatcagataattgtattaataaaaatgaaccttgagtcattccttgtactatatacacaaattaacttgaaatgggtaatcgatctaaatgtaagtgctaaaaatatacagtcttaccaaggaagcataggagaaactcttagtgaccttcagacgggcaaagatttttactgttaaatagactatgttttagagaagttttaggttcacagcaaaattgcacagaaggcatgagattgcccatctgttccctgtccccacacatgcgcagcctcctccattagtagcatccccaaccacagtgggactggttacaatcgatgaacctacattgacacaacattgtcacacgaagtccagtagttcacactaggtagggttcactcttagtgttctatgagtttggacaaatgtgtaattagatgtatccaccgttatagtatcatacggaagagttttactgccctaaaattcctctgagctctgcctgttcatcacctccaccccctaacagcagacattttttctttttagcatagaaactaaataattttttagtttaagaaatttttttaacttaatctaaatttaaaactttgggtcttcaaaagatctgttaagatgaagagacaatctatagtctaggagaaaatatttgaaaaatatatatctgattaaaaaaaaaaaacctcttatagctgagacaacccagttaaacatgagtaacatattttgaatagagattttccaaaatatgatacatgaatagcaggtaagtataagatgtcaacatcattaatcattagagaaatgtaaattaaaccactaggagatactagtgcatgttccctagagtggctaagatgaaaaagactgaccataccaaatgttgacgaggagctgtgacaactggagctttcctacgctgctcttgggagtggaaaatgatacagcatttggggaaacagtttgctagtttcatataaagttaaacacatgtttactagctaactcagcaatttcattctgagttaattcacccaagggaaatgaaaatacattttaaaaagatacacaaatgttcataacagctttttccacaattgccacatactggaaacaacttgtctggtgcacagataaacacattgtggtatgcgacatagcaaggaaaagagatgaactactgataaagcgacatggatgactctcaaaagcattatgctgagtgaaagaagccagtcgagtacatattgtatgactccatttatatgaagttctagaaaaggcaaaactgatacactgtcagaaagcaggtctggggccggtggtatggggaagggatttactgcagaggggtacaagagaacctttttgtggtgacgggaatattctacctcatgactgtagtggaggttacgagactatatctgtcaaaatgcatcaagttctacgtttaaaattggtgaattttattacacgtaaaatgcctttattatatcttgttaatttaaaaaataagttttgattatacgatttccttagatgtcctgaaacatgctgttttcacactaatttggtatataccttgtgattatatcctttgtatatgaatattgtggtaagtggaacattgttgttggagatatatccagattttctaccttagtttgtgtgattgattatattctgttagactgaaccacatgaaattgttgatatccaatcattcttgacctacaaaagcagcaatttcacgtggcataagtatagtagaaattttgtttgctttttaattcattggaaagacttggcaatggtcacatctcgattgtgaagtttcaaggattttgtaagacacaaggcctgagtgttctgttttacattacatgttttattttgctttaattcagttcggtagatgttttatatatgtctaccacttttcaggcattctacttgaaattacagtggatgaatgtaaagatgagtttgatattacctcagcccaagaaacgttaagtgatgaaattaaaaggcacgtgtagactttctgtcataatcgctaatagggactgtgaaatagaactcccagttcttgtcatgtccattgcagtgattataataaggtatttgggctttcatagtgatgaaataagtggttgtgggtttgtatacgtatgtatacataaatatgtatgcgtatgagcccagaagaaatggaaacgagaccaatgatttaatttgcatgaaaattagaactgtctgccaagagcaaacatctctctcaccctttttcaagagaaaaaaaggtcttgtagtttggcatgactcagtggatgacctcacactgattctcctttagttattgcttgaatgcgtggagccctcagtcctaagtgaggcggtctgggtgatgttatggcatttcatttgggaaagcggctgtcacttcatccttaagcctcctgtttgctgtgatggtggcagagccactctcagcaccacaggaagagccccggggaattcctgaagacacattctagagaatccggtacaagtgtatgtaggttggtcaccttgatgccttattttctcaggcttctagtagagatgcatgccagcaaaatggaaaggaacagagggcgttcttgaagtttcctaactggcgtattttctccttctctttttctaataattaagtacaggggactgagaaggcaggggttgttgttatttttacatggaatggacctaacctagcagtcagatgagattgttgacgcgtagcacagtctgttatctttgggcatctgccaccaaagagagtgtacccaagaagggctgtcgtgtgagtgggatgggtttccatcttttgttctgtgctctttctgtggaatctcaggcctgcgtgtgctccctctgaccgtaccttgactcttgatgaaggatttgcagccctgagagggagcaggcagacccaaattaattatttccattttttttgtggcactgtgggacaatgggagagaatacaggctttggagccagccaaatgtgtttcagatcctaaatcctccacctaaggtatgcagtcctgatgggtaagttattttaatttgtttgaactgccacttaactgaaaatgggattaataccagatatcacttaaaattagtaaaaaatacagttgacccttgaacaatgcaggcattgggggcaccgaccccccattcagttgaacatctaacttttgactttgcagaatttaactactaatagcctactgttgactggaagtcttactgatagcattaacagtcaatagcacatattttgtacattatagatattagatactatattcttacaatatagtaaactagagcaaagaaaatgttactgagaaaaccgtaaggaagaggaaatatatttactgttccttaaatggaagtaaatcatcggtgaaggtcttcatccttgtcatgttaaaattgagtagactgaggaggaggaagaagaggaggggttggtcttgctgtctcaggcatggtaggggtggaagaaaactgtcatataagtagaccagcacagttcacacccgtgttgttaaacgatcaactgtattttattaagctgtctttgaatagcaccaagtatcttagtgtatgagaaggcctctgagaagttccacagttaggaaacatggtgaacttttttttttggtgtgaggggcacagagtcttgctctgtcacccaggctagagtgcagtggtgtgatcttggctcactacaacttccacctcctgggttcaagtgattctcctgcctcagcctcccaggtggctgggactacaggcgtgtgccactacacccatgtaatttttgtagagacggggtttcgccatgttggccaggctggtctcgaactcctgacctcaagtgatccttgcatctcagcctcccaaagttttgggattacaggcatgagccatcactaccagccgtggtgagctttgtttaaccaagcatttttcaaacttattgactgaagaatctttatgtgtgtgtgtatgtgtgtgcatatgtaagaagtaacatccgctggagctggtattgtgcagaaaatatgttgagaaatataaaacagatatctggcttgtgttcctctatatagtcttttttgactgagaatgctttatccttgttgttacggatattttcactttgtttatttctattttggtctgaatcatgagtgtagttgatccttgaacaacatagatttgaactgcttgggtccacctcgacgccacctgtgcatacggagggctggctcatctcatatgcaggtcccgagggccaacttcaggactttatgcatagattttggtgtgctggggatgggggccctagaacccaaccccccatatatataccgagggaggactgtctatttttgttttttacctgtgaggccatcgccacaatgaagagagtatcccccaaaaggcatatttttaatatagttgtaattatagcattgcataatcgttttcagtaacataggtctcatctgttgctctaggtcttagtaaaataaatcactcttgttgaacccttcctaggctccaaaactggatgggccatttaatataattttaaatattaaatttaaattttctttcatttattagaattttcaaagggtaataatgttatatatttagattttgatgacatggagacatctgagacttgcttagttttaaaaaagcaaaatttatgtcatacagctcttgtaaggactgaataaaataatgcatataaaaatgcctaagacagtgcttggcatgtagtgggcacttactaaacaatttccttccttcccttgctggcttcttaactactccctgccttgtataccccctgtgctccgtcccaatttctgttcagatactagacagatggctgttgctttgggataggtcaaaggctgtcaggcgtggaggcaggcaaatgacccagatcagtgaacaccagtcattgtctcagagcattttgttttgttcagctcagctatttgaatcatcttggattttctcatttgtttagaaaaaggtttccccaaaattggtggtgttgggttcctgatagcaaaatgtatcaacaagtgggcagtcagcatatggaatttgcccaactctacagggaaacttgctttaggtattttaaaagttaacttgtcaatgtcactgtaggacagttatatatctactgagtttacaaacaaaagatttttttttgttttttttttgagacggagtcttgctctgttgcccaggctagagtgccttggtgcgatcttggctcactgcaacctctgcctcccgggttcaagcgattctcctgccttagcctcctgagtagctgagactacaggcacccgccaccatgcctggctaatttttatatattttttggtagagacggggtttcacaatattggccaggctggtctcgagctcctgaccttgtgatccacctgcctgggactcccaaagtgctgggattacaggcgttagacaccgcgccgggcctgaactcatttttaattagaattcttattatttcagtggctgaatggaggaaaaaagaaaggacctaagcccagaaaattcacaggtttgtttcagggtagaaaaatttggcatattttggcctggaagatatctcattatggaatcagaaatctgaaagggatattaaattaggagcaaacttgtgctgtgttggttaaccactgaaagttgcattggcagtttagtaactaaacaatagggccacacgcggaatttattgatgtctcatgaactttctgtttaaatctttattgctttgaattgataggcttcttttttcccttccactttgcttaagggactgaatctgtttttggcattctaagactctttttagaatttggcagtgcctctctaggatgttttcttctgcactgcctccaaaacaaaattatgaacagcctggctctttcggtatctctcctcttttttttttttttttttttttttttttcactttcctgatgtgaaagtgtcaggttttgagccagtttgaaagatgagaactagaatatatttctctttctgatctagagaatcctagtggcttctagggcagtgtataaacaaagccctgtggctgcaaggtttcccgtgtgcagcaataaactgatacatgccggtgacaggaatctggctcatgggcttgaaaccatccattaactcattaattgaccagacatcatgggggtctgctgagtgccatggggatgctctgtgctgggaaagatgcaaagatgaataggctaggaataaaagaccaatttcattttttaatgtgtcagtatttttaatattgaaatgtaggaccttgcaagtaaaatactattaagctaatttcccaatttagagtctttgaattattgtcttggatattaaatatattcagtgtttcccaccagtggatcccaaagcctcacctgatatgtttggcaattgtcaggccctcttttttatactccagaggaattccaacaggaaatatgtacacaccatcccttacctcccttgcttcttttcttttctgcgtcctactttgtttgatcttgaaatacggggaagtatcttctgggcaagtgctgtttctgtgccaggctgtgcaggtcatgcttgccccagtgccatgagaaagacactcgagtgagctcgggacagatctctccagcactgtcctggcttgaccccacctgaccagtgactcttgtaccatgcccagctcctttggctgctggagcaaaaagatctagggagtttgttttccaaataagggccccagatcttactttcagagctgtgcatgtgaggagttcatggggaatccctcatctcagcagacatggggaagaccgtcttctaaactgtagttctgaaacaggtaaacattcagtccccgctcgctttcaaagcacaaaagtgaggaggcttatttggcattgaaataactgagcatcttttctcatctgtgtttctgaatctgttatggccagtgttttataacccccttcacattaccttgtcagtaacttgcttcagatgaaaataacggcagaaagcataattttttgtttttttcttttttgagacggcgtctcactctgttgccgaagctggagtgcagtggcgtgatctcggctcactgcaacctcagcctcccaggttcaagtgcttctcctgtctcagcctcccaagtagctgggattacaggtgcctgccaccatgcctggctaaattttgtatttttagtagagagtaggttttgccatgttggccaggctggtcttgaacttctgacctcaagtaatccacccgcctcggcctaccaaagcgccaggattacaggtgtgagccaccgtgcctggctgaaaacactgtagcgagttcatgaatcaggattaaagaatctgtgggatatatagaatgatagaataaattctataatgtccattttcattgtgcaggatggagacattagtgtgcatctcagttaggatttaattgctccttccctgtgttcttgaaagcgcttggaaagcgcctccaatcctccatcgtatgattctagttcaggtctggctctttcaccagacaatgagctcctgtggtaagatgccatgtcttaattcatctgttttccgcttgtcctaatacaatgttaagattgccagataaaatacaggatgtcggctgagtgtggtggctcacgcctgtgatcccagcactttgggaggccgaggcgggtggatcccctgagcccaggagttcgagaccagcctgggcgacatggcgagacctctctcaacaagaaataaaaaataattttggtatgctgggggtgggggccctagaaccaaaccccccatatatactgagggaggaccacgactgtggtcccagcttcttgacaggctgagatgggagaatcacttgagcccaggagatggaggctgcagtgagctgtgatagtatcactgcactccagcgtggggtatagagtgagatcctgtatcaaaaacaaagaaacaaacaaacaaaaccccaaaaacccaaaaccaaaaaaacaggatagccagttaaatttgaatttcagataaacaataaagtgttgcttatgggtgggtctcatgtatacatctattcttacatctgaatttcacgtaagcaacgaataatttttagtgtaaatatgttccatgtgatgttctgatttagtcataatacatatttttttctttcttcctttttttttttttgagacaaagtccccctctgtcatccaggctggagtgcagtggtgcaatcttggctcactgcaacctccacctccaaggttcaagcaattctcatacctcggcctcctgagttgctgggactagaggcatgcaccacctcacctggctaatttttttttttttttgagacagagtctcgctctgttgcccaggctggagtgcagtggtgcgatctcagctcactgcaagtacggcctcccgggttcactccattatcctgcctcagcctccggagtagctgggactgtaggcgcccaccaccaagcctggctgattttttgtatttttagtagagacggggtttcactgtgttagccaggatggtcttgatctcctgacctcttcttgacctcccaaagtgctgggattacaggcgtgagccactgcacctggcctaatttttatgtttttagtagacacggggtttcaccatgttggccaggctggtcttgaactcctgacctcaagtcatcctgccaccttggcctcctagagtgctgggattacagctgtgagccaccacacccagcgtatatttttgttttgtaaattgggcaaccttatacaatgcccatgacttacaaaggattttttgctcctaaatcagtgtaatttaataatgtgaacacaactaagacaaatcaaggtgttcatggagttggttggtgtcttttatggaatgcaacatgggaattggaaatagtaattatccaccttcaccagtgtgttagtgagtatggaccatttaacctacaacagttggataaccttgacaatagaaataggtagctaagccaggggtggtggctcctagtactttgggaggccgaagtagggggatcacttgaggtcaggagttcgagactagcctgcccaacatagtgaaaccctgtctctactaaaaacacaaaatttgccaggagtggtggcgcatagctgtaatctcagctactcaggaggctgagacaggagaatcgcttgaaccctggaggcggagtttgcagtgagctgagattgcgccattgcactccagcctgggcgacagaacaagactccatctcaaatatatatacgtagctaggacctgacctaatggttgtacccacactgtttgccttgtacgtgccaggcactagcaatctaagttgtgtgtggttttttttttttttttttttttttttaagaatgagcagacaccttgtgcgattgtccaggttaactaacaaaaatagttgtctgggtttatggaactgtaattacgagtcagatcctggttcccttccgctttctctgctatttctggttgctcctttttattcccaaaaggtagaaaggggcaggtaggacaggagcttgccgcctgttgaactagagggagtagcttccgagcaaactgtgacaaaatggggtattttaagcctccattttttttggggggtatgtgagtgtgtgtgtgagtcggtgtatatgtacacagtgcaagtaaataagcctgagtgggtggcaagagccttgtttgtgtagtaggagaaatggagcctgcaggggcatagtcggggtcttgagagcagacacacggactgagccaggcagttgctgctgagaacagaatcaggacctcctgcttcctttgggtgatattgggttttttaggccaccttcccagccacaaagtaggactctgaaatacatccgggtataaatgttcttatggaaatgcaatcacttctgactttaagtatgtagaagtgagggctcatacccttctcccagaatgtaaatttgactcatcggggctaacaacaatgatagcctaatataagaaactgtttaccggactctgttctgatgtcagccaagctagagctttgcatggtgggatgctttctcttggctgtgccctattagggaaggcaaaaatagaaagctttttctctggacttcagaacggaattaatgcatggttattaaaagcatcaatggcaaatggccatggaagtcagaatctcagccttaatgaagggcgatggtgtccacagaaccaattattttgcaaagaaataaaataataaaatcctcccattggttttagagtggctgaaaccagcaggcaccaggtctaaaccctcttgtgggtgtgtgtgtttgtgtgtatgtgtgtgtgtgtgtgtgtgtgtttgagagagggtctcgctttgttgcttacgctggagtggcgtgatctcagttcactgcagcctccgcctcccaggttcaagcgattctcttgcctcagcctcccaagtagctgggattacaggtgcatgccaccacacccagctaatttttgtatttttagtagagatgaggtttcaccatgttgcacaggctggtctcgaattcctgacctcaagtgatctgcccgcctcggcttcccaaatgtgattacaggtgtgagtcaccgcacctggacattgtggtatgttttaagtactcacgctaatgacatttataccttgcttggcactcctgaaacctcagctctctggaggacagaatatctgctaagggtgcgactcccatggtgctggagaggggtctccttcgaatggaagccggcattccaccacccactccctatgtatccaaaactgggcttggcatcgctgttcctgagggagcgctctgtccttattagggatccgcctggtgacctcagatttacacttaagcttcaactttgttgagggaaaacattttttctctgtcaccaagagaatggagaacactgtgatcgcttttcaagtctcacctgccaggaaatctttattttgcggggggcatcacaacttcctctttttccatgtaccttagtttactattactttaagtgttttggttggattaacttcctgtatttgttcttattttaaatacattctttagttaaagtgttactcagtgaatggaaagagaaaaacaaggcaagaggaaggggtataatatgaaagaatagagttttgtttccagttttgttttgcaacagtagataagaactgtaaactttctagtccctggttttttaatagtatatggaaacacgattttgttgtactacatggtaggatgaatttaattaagctgccaagcaaacttgttgatttagataacaactccacacgtagagtttgaagagcctgttttgtggtatctagacctcacttttaagagtatttccctgaacctgtccatgcatttctgagacgtttgtgtgctgactgtttgttttatgtttgtgcaaagcctagtgtcctactgacttgtagggactcattgaaatggcagaaactgtgtgcattttaagtgctggaggaatgctaaatattaatatttgggatcaaccacaaaatatagtttctatttataagacacccaagactaaataaactgtaggacaaatgaagtgtgcacattctttttggtaacattcagcatcctgaaaaccaccaagggttaggaaaaagagaaaaatgtatttttcatcttctgtaattcatctagccttgggattttctcctaacctcttgaggcacgcttatatacgtgaccctatgtaagacttttgggtgataaagtcgaggagattcactaaggaggaacagagcaggtgtagtgcccagggtggtaaaaccacagatggagctatggggtgaatatggaacctgctagctggagatggggaaagagaagagatcgctgagattacgtgagtgttgaagggttagatgaattggtgtgtagcgggtgctgacctgatctttctgggtgttctgattttttttttttttttttttttttgagacggagtttcactcctgttgcccaggcacgatcgccactcactgtaaccttcgcctcctggattcaagcgattctcctgcttcagcctcctgattataggtgtgcgccaccaagcgaggctaattttggggtttttagtagagacagggttttgccatgttggccaggctggtctcctgaccttagtgatccacctggcttggcctcccaaagtgctgaaattacaggcgtgagctaccgcacccgaccctgggtgttctgattttatatttactaataaactctgtggctttggacatttcagaggctctggttctatctcctaatctttaaaatgagaagctggatgaaatgatctctaaagtctgttccaatttaaaaattctgtcgtttgctaggaaaatattagcaccacagtctatctctctaatatgggaagttttttcagattgggtatcagtgctattaaacatttaataaaaagtgggaaattattagtgtgtattgtcacagacatgttaagctatttgcattttaatgaatgaaagagaactttaactgttaacatttaccaaggggtgtagctgagagttaatagtttacaaggggtgtaggtgagagttaatggtttataaatgttaactagtttaatagctgttagttgcctcgggatttaaaggtatacacactgatttttggttttggtagcctcaaacctagtcaagaatcatacaaaattatcttcattagaacaagcatagtattagccatcagtgctatgtaaggtaaagatttcaaactctctctgaggcttcattaaattcctttgctttcctgaaagtttctaccatcctgagaaagtctagcagcttcttcagagacctggttgctttctgtctcagaatatttaaaggaaagtacattttcttaaaatggagttttccctgggtcataccaggcaattagggctttgagccatgaaccgtcttcaggatttggttccctctgagagaaagggaaaggagataacttttgcccttgctagaaagtaaagcttatctacccttacctgtttgaagtttagacaaatagtttatttatacaaaagcatagtttcccttgaccacaatgaagtgtccacttggactgctcatttcttgaccaggagacacaaaatgcattttcagcccaggggaggctctttggggccacagttggactgaacaggaccgcagctgtgaaggtctaatttgcaactggcaaatatctttataataaccccacgtttcttactgacacagaatacacacacgtgtaagtgcacacacattatgcacatgtggggtggtgaaggcagaaaatcagtgaactgaaattacttgctgcaagtattactttctgcaaggctttcagaattacttgctacaaggctgggtgcggtggctcacacttgtaatcccagcacttcaggaggctgaggcaggcaggccacttgaggccaggagttcaagagcagcctgaacaacatggcaaaaccctgtctctattaaaaatacaaaaattagctgggcatggtggctcacgcctgtagtcccagctactcgggaggctaaggcaggagaatcgcttgaacacgggaggcagaggttgcagtgagctgagatcgtgccattgctcttcagcctgggcaacagagctagactctatgtctccaaaaaaaaaaaaaaaaaaaaaaaaaaaaaaaaaggtaaaaaggaattaattgctgcagagctgttctttgcattgtgtacctttaccctgctagtgggaggaagtggtcaattccatcatgtagcaatttaagaaaaaagtaagtataatagtgttttgaattcagaagtaaatccctcttcctaccttcagaagaaaaaaggtaacttgatttaaccagtttttaaaaacaccagctttgagaacggaaaccgacttcgcactgtttgattaaattggttctgtggctatttaattcatttgtgttaagtagcctgtgggccgactgcttgccatagcagtctgtgtttttcatttgtttgctttaaaaaacacgtcctaatgtaaggaccaaaatctttgtccattctctattgagtactcaatttatggtttaaaaataactacctcttgcgagatctgattgtttaaaaaaaattaataactgcccagctccgttagtagtaaaagggcttgtctttatctcatgaagtattttaattcaatttccagttaaatgatcaggggtttttgagttctgcctgagccgtttgccctttacgtgtgtctctttatgttaatggctttcacttttattcctttgcctgcagtggagaggaaaatgaagtgggatggcatggcttctttttttttttttttttcttcctctttaggcctgactggccctttttaaaatggaaagtagaggcactccctccaaatggctaacacgggttcagcggtgtgtaaattggagtcataatcccttctttgaagactaggaggaggctattatgataaatgttggagaaatgattaaagagatgagaacagcaggatgcagatggcaactgcaaaccctgtggtgtcaggtggaacactctgggagctcggctaaaagggacagagaagcaaagggactagccagtgcagccctgggcgggctgggtggaaagcagccgtcccagatgattgtcccagcagttcagttgcaacccagtgtctaggctgtgctttgttttttctcaccttttatcctaggatggggaaaatatcccctaacagggaaggatgtttggatagtgtttttaatgttacatgtgtgcatcacagcaagtatactgcctctttcaatatttacaaatctttttttaaagcataactgtggtgtgaaattgaggttgttcagcaacatgggctataccagatattgattagactaagctgagcatcccttaatgaatgaattgactttaaacacctgctgtctgaagcggttgggaatagaaactctcctatcactgttgatgataaaatggaattttagttcatacacattttctgaaggtccagagtgtgcagggaatttactgcaaaattgttttatacgtctgtcatgagatgtcttcatcaggtagttagtaaatgacaattctaagcatagggctctttttatttcttagtatataaccaccagctgtcttatcaataatgaatttccattctgtcttttgtcaagtagatcctgcctgcttctgagtagatcctttctgcttctttgtttcttaagatatttctggccgggcgtggtgactcacacctgtcatcttaacactttgacaggccaaggcaggtgcatcacctgaggtcaggagtttgagaccagcctggccaacatggtgaaaccccgtctctactaaaaatacaaaaattagctgggtgcggtggcacattcctctaatcccagctactcaggagactgaggcaggagaatcacttcaacctgggaggtggaggttgcagtgagcccacatcaagccattgtactccagcctggatgacaagagcaaaactctgtctcaaaagaaaaaaaacaaaaaatatttctaactagcgagtatacacaagtacctgtgtctccagtcttcctgccaattacgaaaaatatcattggtgttagcctcattttggtgattcctctgaaaaatctaagacaattgtttttctgagtgtgtttggaggagggatgttggaattcactcattcatttattcatccattcaacaaatatttattgtgtctggcatatagtagatgcataataagtttattccttcattctgcaagcatttgttgaatgcagtgtatcaaaggtcatcgtagacactgcacaaagtcattgtttttatgggttttacatacttgtgatgagagacagaatgatgggcggggtgggtcgctgctattttaaataaagcagccaaggaaaacctgtctaggagggctaattcagcagaaccttgaatgaagtaagggaatgagcaatcttattatgtgagggaagagcatttgaggcagggagaacaagtgcagaggccccgagacagctgtgttcttggtttgtttgaggcacaacaggaaggctgcaagcaggggaagaaggagaaaagagatcagagaggtgccagcagcagaggggagattctgtgaggcttgggaactttgagctgagaacattttaaatgaactagttttaaaaggtcctggagagtgtgtggtgaataggtaagggtgaaggcagggaggtaaggcaggagacttttgcagtagtttgggcaaggaacactgataccttggacttgcatagtagcagtggagctggtgaccagtggtcattttcttctccttctccttctcctcctccccctcctccccctcctccccctcctactcctccttctcctccttcccctcctccttcttatcctcctccccctcctcctccttcccccccccgcttttttttggagacagagtctcgctctgtcgctcaggctggagtgcagtggcatgttctcagctcactgcagcctccacctcccaggttcgagcgattctcctgcctcagcttcctgagtagctgggattacagatgcgtgccaccatgtccagctaatttttgtgtttttagtagagacagggtttcgccatgttgtccaggctggtctcaacctcctgacctcaagtgatccgcctgccttggcctcccaaactgctgggaatacaggtgttagccactgtgccaggcccattttctagatctgtttggaggatcgagttgaaggggttgttgatggatttgttctgggttttgagagaaagaggtaaagacaaaggtttttggcctgacaaccagaaagatggagttgctatttattgaactgggaaagctagggagaggagcagattttgtggggaaaattaaaattgggtgtgggacccatttagttttttgctgtggttgttatgaaaagctattattgtctcattcagtcttctctatgcttttctatagggataagtgtgcttttgttaacaaatctcagagtataacactaagcttaagatagggaaatattaagtcaaaaaaaggaaaattcaggataaagactagaaaagaccactgaggaagaagcattccccggagcctgccatgggccccccagcaggagggtcttgtcaaaggccatttaatgaaattataagtgtctcattgagaacctgtttccggcagcctcacagatgccactcataatcttctgctcctgggtctgccgctagataagcgtgcacccaggcttgggtttcactacccggtatgctctgtgatatgctaatattactgaaaaggaatatgattttctgctgcttcacagatacatcaattgtaatcttgccaatattggtattgatgatgaaagcacctttttaaaaaagtttttaagtgtctataggactgtttctgacttttatgtgaactaacctagaaaactaccattatttgttcagctgattaaatctgaaaaagaatggcagttgaagcagaacataaaaaatccacttgattttatcctctttgcatatgaatgacagagggtcagtttaaatttctgttcgtaactctaaagggaaaaacacatgtgcattcagaatactgagggtagttgtatcttaatccattttataggtcttcttagttttcctcttactccaacaaaaatgaattcttttcttcttcttcttcttttgttgctcttgttcttatcttcatccaaggattgctttgtcatgcagatagttttgggccttcttcttgaaaatacagcaacaacctcactgaccagtattagaacttaaatttgcttatttggccagtggttatggcctctgtgccagacactgttttgatgtagtagtagtgccaggtaacacccctcctctctaggagttgaaaatcaagttggggaagaggaatggtcagtaatccaatatgccaattataatttaagctttgagaagatgtaagagaggttcaggggatagagtgtgatgggtggtgcatgagagatggtctgagaaggaggcatctgaagcagagagctgaccttgcggagcttcccgtttatgcccgagaaggtggacagaagccagccctgcctctgcagaattagagcacgccagttgtgtcatttttagatcttttcagataagaagctggtgcaagagtcatgctaactttaaacaatgacaggtgtgctgtgtatatgcctaggcttatttgtattttggtaaacaagactggctaagtgtgaatagagtcatgttttgaagaagtctggactatttcctaaaatgagcaaatgacacatttgaagcctgcatctggtgagactacctgtgagtcatttttcccattttaaagagaaatagtaatattgagacaatgattaactgacttagaatcatacagtttttagggctcctatggaaggacctttggagacaacgttggttgatttttcctgtttctttggatgacaaagctgagcctgagaaactgcccacagttctcttgctaggttagtagtagaagggctgacactgcattctgggcttgctgacttcagagttctttcttctccatctgtcattcttttcaaaaggattagaatttgcgtttctgtgcctttcagcatgacacccatgtaggtagagtcccagagaacagtggattgttaattacttaaattgatcccacaatcccttataaaataagattctgctattttttaatattttgtcctctttaggcaggtaatactgctttggttaatgataaaacagaggtaattaattcttcaatttctacctttccatttttggaccttagcgtaaaagttaaatttaagagaaatgtgactccttttccagcctgtaagatagggatgagttcgctgatgtttatgggagcaggtgcagggtgacgtgtggggagaaatgagcctctgccctctcttctgacctgcttcttccacaccggacctgctcacctttcactttcttctttttctctcccaaacagaccccgctccctgctttctctctcactttctttttatttatgtgtttatttatttttgaaacggagtcccactctttagcccaggctggcatgcagtggcatgatcaccactcgctacggccttaacctcctgggctcaatccatcctcctgcttcagcatcctgagtagctgggactaaaggtgcacaacaccgtatctgagtttctttattttttgtagagatggggtcttgaaatgttgcctaggctggtctcgaactcctggcctcaagtgatttgcccacctgagcctcccgaaatgttgggattacaggtgtgagtcacagcacctggccctctttcgctttctttttttttttttgagacggagtctcgctctgtcgcccaggcgggactgcggactgcagtggcgcaatctcggctcactgcaagctccgcttccggggttcacgccattctcctgcctcagcctcccgagtagctgggactacaggcgcccgccaccgcgcccggctaattttttttttgtatttttagtagagaccgggtttcaccttgttagccaggatggtctcgatctcctgacctcatgatccacccgcctcggcctcccaaagtgctgggattacaggcgtgagccaccgcgcccggcctctttcgctttcttagatgctaaccagatactactcttttgtttttctgttaattcaaaccatgctaatttgtaaatgcagattgcaaaggcccaagtgagaaattggagagatcacagggagcactatgagcatccgtcctgtgtcctgcagcatcaggtgggaaggaagaggaggcagtgtctgggatttctcatgatggtgcatgggttactaggattagggcattgcttctctagctttaacgtgctgtccgatcacctgggcaccttgctcaaaatggatgatgctgagtccagagattggggcaggggctgaggttctcctttccttaccagctcctgggtgatgccggtgctgctggtgcagaccacacttgatagcaaggctgtacggatgaggcttctagtgcgatttacacgtgcgtcctgtgtcactttgatgttgtgagttactgtgtaccgaggaaatgttagcattcaaaatcagacgtggggtcgggcatggtggctcacgcctattacaatcccagcactttgggaggctgaggtgggtggatctcctgaagtcaggagttcgagatcagcctggtgaacgtggtgaaaccctgtctctactaaaaatacaaaaattagctgggcttggtggtgggtgcctgtaatcctagctactcaggaggctgaggcaggagaatcgcttgaacctgggaggcagaggttgcagtgagccgaggttgagccaccgcactccagcctgggcaacagagcgaaattccgtttcaaaaaaaaaaagaaaagaaaatcagacctgtgaagttacagtttctccggaagaaggtagggtgggtcgtgctgcttctttcaggacttcccttgaaaacctgcagcaggctgtccggttactaagatgattataaaggcgcagccttgttggcactcagcctcccacattgcttggctcattctttcaccgtagagaaacaccggctctgattatttttaactgcatgccttgctgagactgagtaggggtttttatttctggagctaatgcagaacacacatccctctttctttaaatgcagaaaatctcacataaggttgccaaagtaggatggcatatttcctaaaattctgcagcaacataagggtggcttattctgggatacgaacaggaagatcaagtctttttggttcaacccaaactctcgtacccgtggggtgtggcccatgtggggtctggaaggcttcgtggagcagggaagagtataaccaggggctggcttcttattcctgttcagtctctctgcagcctggaaggagctacttaacttccttttggccttaccattgccatttttgaaataaaagtcctccactcgactgtctgaccgagtgattgtcagctcacaaggcctcttacattcagcatgtttgcttgaggggaatgagtgagtgttttacatgtggtggatccattcccagcaaacaacaaaaagaagtctttttttttttttgagacgaagtcttgatctgtcgcccaggctgtagtgcagtggtgcattcccggctcactctgcctcctgggttcaagcgattctcctgcctcagcctcccgagtagctgggattacaggcgtgcgccaccacgcccagctcatttttgtatttttagtagagatggggtttcactatgttggccaggctggtcttaaactcatgaccgcaggtgatccgcctgcctcggcctcccaaagtgctaggattacggttgtgagccaccacgcccgacccaaaaagaagtcttgaagtacagcccgccatcggtatttttagcacatgaagaatatcttaaggaatatgcgaaggagatgttacataggtagcttgacctttattaaggcacttggtaattgccctacattttattattttttacttatttaaggttaaatgaagacatttaaaatattacatgtgatggggcttatagttttacatacaatgtcatagtttgtgtgccttgtttaaaacaaatccaatatgagaatatgctcttgtgtaagaagtgtatcattttactaaaggatttataagatatttgaatcaggaatcctgtagtactttaaaaagtggtaccttctacaccatctttttaggagcatgtttatcacacaaggcaaggcaaatcactaggttaggcatccagtacatagaattcgactagaagtgtagtgaggtgtgagatttagggggacagggattctaagaaccaacggcatctaactaatggacttgttcctaaaggaatgttgaagaagtgatcatccatcttaaaagattgtgccttcagaagaactgaaggatacttttgctttcgtgtacagtgtgccgagtttgatggtatgtcattaccgggtcgggtccatgaatgaccggcaccatcatggctgccaagtccttgagatttgaacaagatgttccagatggtaatgaaccattcttttttttttttttttttttttgtattgagatggagtctcactctgtggcccaggctagagtgcagtggcacaatctcggctcactgcaagctccgtctcccaggttcaagtgattctcatgcctcagcctcctgagtagctgggacgacaggtgtgtgccaccatacctggctaatttttgtatttttagtagacacagggttttgccatgttggccaggctagcctgaaactcctgacctcaagtgatctgcccgcttcggcctcccaaagtgctgagattacaggcgtgagtcactgtgcccggccagtaatgagcattttgttgcgtccctggagtcttcctaataatgaggtagtggcagtggggttggaacagtaggtgcttggatatgtcttttgatggataacaattccttaaaaacattgagttacactgtacaaacatatatgtgtatatatacgtatatgtatatccatttactagaattaagagaatgcattcaaatactagtgggtttgtatcttttttttctttttcctccaattattgtgtttatcttgacttgctattaaagctctggaaatactcatctgagacagtccaggcatggtaggttctggatcttccactgtaatactatgtgaaatgagatattctttgtttcttagaaacaggtggattcagccaggtgaccgttactctttgggctcgtgttacaaggatatcatgatggtgtttcattgatatatgtaatcaataatatattacgttatttcagccagacctaggaataaataatactgctctcttttattgagagtggcttggtgattttcaaagtttgtttatatgccatcatcagatctgcagagcaagcttatgagatgaggaaggcatggattggtggacataagaaatggagggttaaggcaagtggttacttacccacagtcactaatttcataattggtagatttgggaccagaactaggatatctcatttccagcctagtgttctttctgtgatatttgttaaaggggccatctggttaaaaggatagtctggctctttaatgatgatagctttcaaatatataacactttacagtttgacaggcttttacatagatagcacattttcttcacaaaaagacaaataatggctttacatatgttggatgaagatgtggagaaattagagtctttgcatactgttgagaagaaaaaaaaactttatttttctctttctcagtcagtttttgcagcaagtcttttatagtccttattttttttttaattctctcttccccaggtttaattttcttaagaggcagatttataatactaagtaatatccagaatagatagttcctgcaggaaatgggtttattgttctcataaattttagtggtctagtttgtcaatattactgtcatttcttaatagcatttgtctttctgagtagtaacttgtacttgaattaaaatctttcacatgtatagagtggagcaaagagaccctgcatatattataaaatggtacatgcctttgcttagttgtcattgtgttagatcagagaaagagaaagtcctttaaaatatgaaaataactggtactcaggaagggagaagagaagcttgaaggtacgtggatttttttttttttttttgaggcagggtctcgccctgttgctcagtctggagtgcagtggtgcagtctcgactcactacaacctctgcctcccagttcaaccgattctcctgcctcaccctcctgagtagctggaattacaggcacccgcctccatgcccagctaatttttgtatttttagtagagacacggttttgccatgttggccagggtggtcttgaactcctgacctcaggtgatccgcccgcctctgcctcccaaagtgctgggattacaggcatgagccaacgtgcccagctgatatatggaattttatgtgaggcttattagaaggtgtggggtatagggggaagaaggacagcttcgcttcttttcatctttcaatatgaaaacacagcaggatagcgtaaaatttttttaatgatgtatagtttgcatacaataaaatgtaccattttaactatacatttgggtgaattgtgacagatttaggtatctaccaccacaatcaagaatatagacccttcccctcaatcctggggttgctttctgcctcttcccagccaggcctccctcatgccagcctcaggcaaccactgatgggctttttgtcactatagattagatctgccttgtctagagcttcgtagaaatcctaacggatagtcttttgtctgaccttttcactcagtgtaatgtatttgacactcactcttgaggtgttgcacaggtcagtacttcatccatcttattgctgaatatgccggtttatttatccattcaccagctgatagacatagaggctgtttccagtttggggtgattataaataaaattgttatgaacatgcatgtacaagtctttgtgtgctggacatgtcattgtttctcctgagtaaacatgtaggggtggaatggtgggtcacatggtgttaaatcatttcgctgattttactgagcagtcataatactgttttctgtagcggttgtaccattttacattcccacccacagtgcacaagagttccagtttctccacatcctagctaacacttgttatttatttatttttttaatagtagccctcctaatgggtgtgcagtggtatctcattgtgttttaaatttgcatgttcctaatgataagtggtgttgagcatcttcttcctcttctttttttttttcagttgagatggggtctcactctgtcgcccaggctggagtgcagtggcgcgatcttggctcactgcaacctccgcctcctgggttcaaggaattcttgtgcctcagcctctcgagtagcttgggagtataggtgtgcgccaccacgcttggctaatttttgtatttttagtaaagacagagtttcaccatgttggccagactggtttcgaactcctgatctctcaagtgatccgcccgccttgcctcccaaagtgttgagattaggcgtgagccactgcgcctggccaagcatcttcttatgtacttattggatgttcttctttggagaaatgtctattcaactcctttgctgcattgctttttaaaatatttggacttgaaagcccagcaaggataactattttgttcttctgctctaagaatatataaagatcttgctcaactcagcagaacatttgtatcatcatttcagaactgcagtggtatgaacatctagttgctaattacatatttagaatagttcatatttcaaaatgctaaataaatatttgtgggcactgagcctagttattatgttttgccaaagtcacaagttccgccattgcacgtcccaatccagttcagcttgtacaaaaatgcttaaaatctcttttgcatgaaactatgttttggtcatgacattaagcagacagaatgagacttaatatgtctttaaagggtcattttaaataaacaacaagatgactgtcactgcggcggaacaaaaagaggaaagaagaaaggttggttaacttagagaaaaatggcaagattcagatgggaaagggaatcagaatttttagacccctgtgtgcagaaaggaaactaaaggaagttatctagctctacttcatttgttctccccaaccttgagttcatggatagagatgaatggagataccaggaagtgttcaaaaaggaaaagtggatggttgggcgaggtggctcatgcatttaatctcaacactttgggagactgaggtgggaggatcacttgaggccaggggtttgagactaacctgggcaacataggaagaccctgcctccacagaaaaaacaaaattggctgggtgtggtggtggacacctgtagtctccagctttttggaggctgaggtgggaggttcactcgagcccgggagtttgagactgcagtgagttccgatcatgccactgcactccagcctgggcagcagaacaagaccctgtctctaaaaaacaaaacaaaacaataaagtagaaaggaaagctgggtactttttctaagaagccaagagccattgataattacaactcacagaagcagactttttgagagggacgccacccagaacctgaggctactcaaactattattttgtcagaagcaacagggttgcctgaaatttgcaattgaaacagtgtgcttttctcacatacacagcctttatgtaattgttcagttgtgttttaaaaagaaataacatcactgaggtgtttggttttctccttttctttcctctctgtcttgcatggttcagcatgttgttttaggtcaacagatatattatagattggagttcagcacactttttctttgaagggctagatagtaattatttctcgcttcgcaggctatagcctgtgtggcaaccacctacctgtgccactgtagtagcatcggttagcagaattgcactaccttggaaagcagtcgtagataatatgtaaatgactggctgtggttaagttccaataaaactttatttacaagaacaggcagcgggccatgttttgccaacttttgttctaaataatcacaagaggccatgaaaagtttaatttccatacatgagaactgggtctgaatattgactcttctacgtagtataatgggtgtcccaaatactcttacccagtaaaggatcttttaaaattttaagttgaaaccatattcagtggcaggaatcctgaggaagtgagagagaaaagctttataaatattaataagtgctgaaaattaagttgttgaaaaaattgttcacataaaagatcattatatagcaagtttggaatttagtttcaattttcatttccttgtagaaacatcttcatcgtgaggaaaatgagggaattaatgaacatttgtttcctgagtgtgagctgtgataccttgtagtcactgagatggcggctgcatgatgggtatctcgtaactctgctccgggatgcccaccatctagaaagatgctcaagacccgtgggacaggatagtgtttaggaatgtgtgttttaaacttttcttgcagtatttaatttctaaataaactttattaaggtataatttatatacagtaaaaatgcacctatttttttaagtgtgtgatagattctatgggttttggcatgcattcactcccaatcaagatagagagcattcccattaccccaaatgtaccctcactcccctaatgctcaccctcgaacaaccactcatctgctttctgtccatgggaattaggttgccctattagagagcttcctgtacattcagtcatttagtatgtactttttttgtgtctggtttagaggtttccaaacttccttggttcacagtgcctttagaatccataattttttatggtgttgaaagttaaaagggatacctaccagttccattagatccagagaactcattaaaagtagcttacatggtgtcccacaattattgctgtttccctccaagatttaaaatatccagtggcatgtctgtgagttcactgggggccctggggtggtttcgtgcacagttgaggaaccacagatctggcttcttctacttagcataatgttttggaggtttatttatgttgttacatgaatgaatacagtcatgcatcccttaatgatggggatactgagaaatgtgtcattaggcaatttcattgttgtatgaacatcatagagtggacccacataacttacatgttacaacctattatgcacctaggctatatggtcaagcctgttgctcctagaatagaaacctgtgcagcatgttactgtaatgaatactataggcaattataacacagtggtacttgtgtatctcaaatgtgaacacagaagaggtactgtcaaaatacagtataaaagacagaaaatggtgcacttgtatagggcacgtctcgtgaatggagcctgcgtactggaagtgtctctgggtgagtcagtgaatgagtaatgagtaaatgtgaaggcctagtacattactgcacattactgtaggctttataaacatggaacacttaggcaacactaaatttattttaaaaaattgagttatggcggctatgatgtcactccgtgataggaatttttccactccattataatcttatgggaccaccatagtataaaatgtcattatgctgcatgtgacagtagtctgttcctgttttttgtttgtttgtttgtttgttttgtttttttttgttttttttgacagagtctcactcggttgcccaggctggagtgcagtggcacgatcttggctcactgcagcctccgcctcccgggttcaagcgattctcatgcctcaacctcctgagtagctgggattacagacatgtaccaccatgcccagctaatttttgtatttttagtagagacggggttttaccatgttggccaggcaggtgttgaactcctgtcctcaggtgatccgcccacctcagcttcccaaagtgtagcctgtttctttttgttgttgagtagtattccattttaggaagtactgcagtatgttcattcatttgatgggacatttgggttcttctcatttttttggcaatgtgactaaagtcactatgaacattcacatgtaaggctttgtgtaagcatatattgtcattgctctaagattagaattgctaggtcttatggaaagtgcatgtctagctttttgtttatttgttgatttaatttatttattcttaaagacagggtcttgttctgtcacccaggctagagtgtggtcgtgcaatcgtggctcactgcagccttgaactcctggtttcaagcagtcttcctacctcagcctcctgagtagctgagacttcaggcatgtaccaccatgcctggctaatttttaatttttttgtagacatggggtctccctgtgttgcccaggctggtcttgaactcctggcctcaagcgatcctctcacttccgcctctccatatgttaggattatggcatgaatcactgcactcagcccatgtctagctttataggaagctgccaaatttttccagagtgtttgtaccattacattctgatatgatttggatctatgtccccacacaaatctcatgttgaaatgcaatccccagtgctgaaggtggggcctggtgggagatgattggatcagggggtggtctctaatggtgtagcaccagtccccctttggtggtgttgtcacgatggtgaattctcatgggatctggttgtttaaaagtgtgtggcaccttcccttctctttcttcctcctgctcctgccatgtaagacacctgctcccccgttgccctctgtgatgagtaaaagctcgttgaggccctcctagaagcagatgcttccgtgctttttgtacagcctgcagaactgtgagccaattaagcctcttttctttataaattacccggtctcaggtatttctttatagcagtgtaagaatgggctaatacacaattcgaccaatagtttgtaaaaattcttagcctgggcaactaaaagagacctcgcctcgacaaaaaattaaaagtgaaaacttagcatgtagtaatggcatgtgcctgtagtctcggcgagtcaggaggctgaagtgggaggaacgcttgagcctaggagttcaaggtggccgtcagctatgattgagccaccacactccagcctgggcaacagagagagactctgtcttgaaaaaaaaaaaaaaaaaaaagaaaaaaattctggttgcatcacgtgttcatcagtacttggtattgtcagtcattttaattgcaggcattctagtggttatgttgtgtatcttcgtaaggtttctgtttgtgtttctgatagctaatgatgagcatctttgctcattgtgccatttctgtggttactggctgtgtgtgtgtgtgtgtgtgtgtgtgtgtgtgtgtgaagtatcttgttctaatttttgcccatttttaatagggttgcttgtcgtcttatcattgagctgtatgagtttttaaatatattctagaaacaagtcctttgccagatgtgtgtattacaaacatgttctcccagtgggtggcttgctttttcattttcttcaagtgtcttttgaagagcaagagttcaacatttcaatttgtcgaagtcttctggttagtacttttttttttctttctttctgtccctctcaaggttaagaagaccttcacctagaagtttgtgattttggcttttgcatttaggtctaggatctatttcaagttactttggtgcgtgtgtgtgtgtgtgtgtgtgtgtgtgtgtgtgtgcgtgcatgtgcgccttgaagtaaggattgaggtttattttcttttccatacagatatccagttgttttagcaccatttgctgaaaaaagctattctttctcctttaaattgcctgggctcttgtcaaaaatcaattgacggctgggggcggtagctcacacctgtaatcccagcactttgggaggctgaggcaggcagacggatcacgtgaggtcaagagtttgagactagcatggctaacatggtgaaacccgtctctactaaaaatataaaagttagatgggtgtggtggcgcatgcctgtaatcccagctactcaggaggctgaggcacaagaatcgcttgaacctgggaggcggaggttgcagtgagctgagattgcaccactccagcctgggcgaccgagtgagactgtctcaaaaaaaaaaaaaaaaattgaccatttatgtgtttgtctatttctgaactctattctgttctattgatctatatgtctgttcacattaccctgattcttgtagctttgtggtacgttttgaaatcaggtgattgtggagatgtatttttcccatccaagtactaacgaggcccgaccctgcttagctttccagatcaggtagtatggctgtagacaagaaggtgtatttttaagttggatttattcgatcaaacttttatcaaatgcattattctactcatattggaaaaatgaagtaagagtatcatttttcaaagatggcattgcttgggactgatttgtgactcccaaattatatgttgaagccccaacccccaatgtatattggagatagagtctataaggaggttttaaggttaaatgagatcatgagggtggttgctgattcagtggggttagtgtccttattggaagagacccccgagagcccactgtgtctctctctgccatgtgaggacataacaagaaggcagcattctacaagctagggagaggccctcaccagacaccaaccatgcaggcaccctgatcttggacctcccagcctctggactgtgagaaactacatttctgtagtttaaactacccaatccgtagtattttggtatagcaacctgagcaggctaagacaaagagcaagctgactttaaaggaagggaaagtatactgagaatattggctgggcacggtggctcatgcctgtaatcccagcactttgggaggccgaggtgggcggatcacctgaggtcaggagtttgagaccagcctgccaacatggcaaaactccgcctctactaaaaatacaaaaattagccgggcatggtggtgctgtaatcccagctactcgggaggctgaggcatgtgaattacttgaaaccgggtggcggaggttgcactgagccaagatcacaccactgcactgcagcctagaagaaagagcaagaatccatctcaaaaagaaatatataggataggattccttgctttagggccaactttggtgaccttgggtacatgtttcctttcctgtaaaattagaaaattggtccagagaactctagaatagcccccactaatgtcctatttaaatttaataacctgtaattttagatggattatgagtgattttctcttttacttgtattctctgccctgattcaggttttaaaatagctgaacaaaaacaatactgaaagccaaatcgtttgatgaaaacggtggctgacacttaataataacttagtcttcttttagttaaaatgcttcaggaaaatcctgatatagatagaaccagactctagtttattttaggagtttttacagtcatttcttccttgagccttttgcttggtgtttcctgacacagaactcgaagccatgctttctccttagttaatggctccccacgccagaggtgtggggccacctcatatatgtgtcctgggacagatcccaggattggagagaaattagaggtcatctagtcccgggcatttcaaatgtggtccctggactagcagcttcgacctcccctgggagaatattaggaatgcagaatcccaggccacaccccagacctgccgaagcaggcacactctaaagcaaggctgagaagcactgttctagttgaacagtgaagaatcttctgtatggtcttcccagcagaccatctggcctctgggcacctctgaacgtgacctcacgtgaggcaatctgttccatttgtggacagttctgttcaagtctcttttttgtattcatctgaaatgtgtcttcccctcccttctagtttaacttgctgtcatccattggtcctgccattgtgtcaggcactgaggataccccacgcaatctcctttctcaaagatctcgcaatcttttgtttgttggtttgagacagagtctcactctttcgcccaggctgaagtgcagtggcgtgatctcggctcactgcaacctccacctactgggttcaagcgattctcctgcctcagcctcctcagtagctgggattacaggtgcctgccaccttgcttggctaatttttgtatttttagtagagatggggtttcaccatgttggccaggctggtcttgaactcctgacctcaagtgatctacccacctaggcctcccaacgtgctctgattacaggcatgggccatggcgctggacagatctcacgatctgatatagaaatagagatgtccatgaatgaactagagcacagtgtgagaaaggcagtgaagaagatgatgtccagggtgctgagctgcacggagaagggtgctggagaggacctccaggtgggggtgcagcccggtacacatactgagttggaatctgccagactcaggatggggaaggggttctgggagggcgctccgcacccagagaagagcttagcagaggcatgagaggtgacgtattggggtccctgaaaagtttgatttccttatgttaaagtagcaaggagctgggaaagtgggcagggggctggatcacaaagggcccattctgcagtgtccaaggagttcacttgaatgtgagaggctggggagaatagatttgcattgtaggaagaaggctgctggctgcagtaacgggccggaagagggaggcaggggtgctcttagcagattgacagagcctgatctaaaggaaagacatgaaggactgagctaggggcgggataagagctcggccactagtctctaaggaatctacctcataaatctaaagcagcaaatcctgtcccctcagttctccacttttgctcaatgcttattcattaggggccagctctttccaggctatgcacgccgtgaggactgcacagataaaggtggcgtgggccttgcccgcattacagagtgtcactgcttagtgggcagtgggcatctccagttattccttcttcatgtgatattgttttaaatgcccttagcttttgcgtttttcctccgtggagtggtctagttgatattccccttaactggtcgtgtctgaaactgaattgcaggctctaggtaatggtgtgagcaatgtggactagggcccgggctgttaccttctttctgtgaagacggcctaagatacagtatggccctgcgtctttgaaggccatctgagaacactgcagcttcagactgccctaggtcagagctactggcagtgtcccaaggaggccttggcatgtgttctgcctccccactatttctcttctgtatttgatggctttgatttcaccgcacctaagtgtaagttcaaactatatcctattagacattatcttgttaaacagttcctgttgctccatgcttttgagatgttttttaatctctggtttcatcctgttaatttattctcttggttgtaagcgacacaaatgattgacgagttcccttgtatatttgcatcagcatcattcactgaaacattctcgaaggtagggcatatgtcagagtcctggcagatgtaggctgcttcacactgtgcctccagattgggaaaaggtggcattcctaatcaccgggggaagtaaattcatcaataaatgtggtttaggacagctgaagagctgttagaaaaaaaagggagctggggtccctccaacattccttagataaaaataaactacataacaaagaaagtctcttaaaaaaaaagaaattaaattgtctgaaagatttagacttaaataatgaactcataaaaattattagacgaaacatgagtaaattttaaatatatcttggaatgtagacagaagacttttttccccccaaagcgtgtcacaaaacacagaagctgtaaagaaaaaggctaactttcctaaaagaaaaatttcatgaggaaaatttaaagttctgttgggcaaaaattccataaatgtggtcaaaaaacaagtaatatattggagaaaaatatttgcagcctatgtgtcagagctaattcctttcacatggaaagaagtcttagaagtcaataggaaaaatgaaaaatggaatagttaaaccaatgttcattgctagaagtgagcttgtgaaaacatagtaaacttcactttgtttaaaaatgcaaaggaaaataaagaggtctcattgttttcatctgtgaaattggatgtggctaagtctgataatacccaccttgctggtgaaaggatgagaaaacagacatattgagttgaccagtgctgttgaagggcatttctacaatatccttagactagaatttaaaaggttcgtattcttagactcagtcattccactaatgaccctgtaaatgttttccagcatgtacacaaaaataactacgcagatatttgtaataatagcatttatactagcaaaaaatagaggtagcttatatgaccatctgtaggtgtccagcaaaatattgtgtagtgttaaaaatggcacaattctctacgtactaactaggaaaggttcaggatactaaatggaaaagcaaatcactatgcataggaggatgttgtgttaaaaattaaaaagatatacgggatatcagtaaggaagatattagctataaattaacaaaaatgaagggaatgtatttaccttgtacaacaagacatcttcatatgtcagcagtgcagggttgggacagggtctcactatgccatccctgcctcagatgccatctttctcctctgcggtactaattatgtgggtgtgtttccttatggcagcaagatggctgcactgtaccggacctcacatctgcatttctgatggaaaaaagatgtaaggaggaaggtaagaagttggaatcggaaaacccaaaatatttccagaaatgtccaaccagctcttttttgagatggagcctcactctgtcacccaggctggagtgcagtggcgtgatctcagctcactgcagcctccaccttctgggttcaagcgattgtcctgcctcagcctcccgagtagctgggactacaggcgcccgccaccacgctcggctaatttttgtatttttagtagagatgaggtttcgccgtgttggccaggcaggtcttgaactcgtgaccttaagtgatctaccctcctgggtctctcaaagtgctgggattacaggcgtgagccaccatgcctggcccaacttctgcttacatttcattggctagaactatcccatggctacccagaccttcagggaatctgtcaaggcaaaaattttgattaggcacgtgttcttccctgacacacaatccagagttctgtgaatatggaagaagaggagaagggatattgggtaggcagcagtgtgcgacacacacacacacacacacacacacacacactctttgtgtttgcatgcagtatttctggaaggcgcctgagaaatgggtaacagtagttacctctgtggaatagactggccgtcaggaggaaggtggacatttatttttcactttatagtgttctttcctgcaaattttttaaaaaaacaatgaatatgtgttaactttaaaggaaggaagttgataggaagctgacaactatccattatcagaacctcttgggtacagctgtccaaccagttactcagaaccaggtcatttaacctctgtgaacttcagcctcaactgcaaaatgagaggctagaatagatagtatcttaggctccttctacctctgagcctcctccagttaattacacaatctccaggagctgaaggagagaactaagagtcagctcctttagcaagaaaagacatccaggattttaaacaggttcttacttagcctttgttatggctgaattgtgttccctctaaaattcatatttggaaatcttaatctccagaaggtagtatttggagttagggtctttaaagaggtaattatggttcaatgaggtcattaggttgggccctaatccagtaggactggggttcttacaagaagaggaaatttgtacccaaacatcctcagagggaaggccacgtgaagacaccgggagaaggcagccacctgcaagcagaggagagaggcctcagaagaaaccaaccctgccagcaccttgatcttggacttccagactccagaatttgagaaaataaatacctgttcttaggctgggcatggtggctcacacccataatcccagcactttgggaggctgaggcagatggatcacttgagatcaggagtttgacaccagcctggccaacatggtgaaactctgtctctgctacaaacacaaaaattagctgagtgtggtgacgcacacctgtaatcctagctattctggaggctgacgccggagaattccttgaacccgggaggcggaggttgcagtgagcagagattgcgccactgtactccagcctgggcaatagagggagactccatctcaaaaaacaaaaaaaccgcaacccttttctttaagttctccagcctgtagtcctgtgttatgatagccttagcaagctgatgcagtcttctgtccctttacactttgtgaggggagctctgcattttgcagaatctctaggacagcatgagattgcactgacttagctactgcctctattcccttccttggtgaaagcaggtcccctaggagtctagcctgggaacctgcaaatgctaaacgtggcctgggggcagagaagcgcatctgactggaagaagcaaatctgttcccgtgaggccagcgcagccttcctccagggtgcgatcgctgtgcacacctccttcctgggttccttggggccttgcctccaacttgcttacctgttctctaatctattttctttccttgaacttcagaattgatggataccctgtctcactctagattccttgcctggcttctgaccgctaaacccatctggactacaaatggtttatcttttagagatgatctatatctcttcagctggtgagatttgagggcaggatcttatgttacatgagtgaccttcttatagatattggcaagaatcattttcttcttctgatggagcagaaaggggtgtgtgtgtgtgtgtgtgtgtgtgtgtgtgtgtgtgtgtgtgtgaaagagagagaaagagaaagactttcattgccctttaagccctcaccctagcactgcatctgagccagaagactctgaaatggcctgcagtgttccaggccatttaagggagactggatcttttctgaggctaaatgagggctggttttcctgtgctggagtgggtaaggactccggggtaccctgtgtgcttggagggaggcagtcctgtatttcttaagatgcttaagaagatgcaagatgtgagatgcttagatgatggaaggtgaggagagattggcctccaggcatcctgctccccgcagagcccctgagaaggtggccttatttatggagtttgcctgtctgtttactggcttcttctcaagggagcatagaggaccccactggtcaggtgtcagacaaaagagctgtacggatgcatagatttagttctgcctcacaggcaggtagcctgagctcctagggggaactgtttttgctaagtagggaatgaaaagcatgtttatttaagcacaaaattaaatctctcctatttttatatgatttcccgttgttttcttccctgtagggaaatctgctgtgatagagaactgcgtaacaggccttttctgtgagcgctcactcatacattatgcacgacgtggctaagatctttgaagcgcatggagacaggcacatctctgagaggcgagattctttcttttctcagcccccactatcttctgtgctacatcagagatggagcacagccaccgtgggtcttgaaatttcgcaggtgatgctcttctcggtgacctgtgggttcattacctgtgtcaaagactgaagacgggagaattagggaagtggtggcctgggagaaccaaggacatgtttgtgtgccctatttaggcgattgttctacttcatgctaaatttgtgaggagttttatgaagcctagaaaattaagtagaaaatatatttttacagtattttaagctggaacagactatttaaagctcgaagagaccctagagataaaccagttcagtctcttccttttgcagtagaagggacgaggcccagaggactcacggtgtttcgggaacttgcagggagttagcgcagcaccaggatcggagcgcggggccccgtgtccagctccttactctttttgttctggcagcgatgcccaccgggccttcacagtacatttctctggatacagagagaaacattattcatctgaaagcaaggcttcagaagctgtttttataataatttgttagagccacatagtaacttgcaaataaacatttacagttaatgagaaaaatggatacccctgagaaaaaccgtttgtagttactgtgttctagtcagagctcttgagctaatttgaaaggaaagtcaggattctggcaggaggagagctatccccagattccaaggatggggaagagaatctctgtatggactagaattcgagactgtcctgtgtccctctgtctctccttcccggtcttctgtctgtgtcctctgtgcgggatcccatgcctggctctgttaccctcccttcccgccaccagcctgtcggtacctcctgtcctgattttctggttttcagtcattccaaccccttctcagtttccctgacttggtccctgtgcccgtctcagtccccctgacttggttcctgtccctgtgtcagtccccctgacttggtccctgtccccttctaaatccccctggcttggttccctgtcaccatctcagtccccctgacttggttccctgtcctcatctcagtctccctgacttggtccctgcccccatctcagtccccctgacttggtccctgtccccgtctcagtccccctgacttgggtccctgtctccatctcagtccccctgacttgggtccctgtctccatctcattccccctgatttggtccctgtcctcacctcaggccccctgacttgggtcactgtctccatctcaatccccctgacgtgatccctgtccccatctcagtccccctgacttgggtccctgtctccatctcaatcccccctgacttggtccctgtccccatctcagtgcccctggcgtggtcccctgtctcccgctccatcccctgcccccatctctgtccctctgcatcaggcatggtcacgtctcagtgccatctcaccctctccctgaggactcgctccattttcctctcccctcagaccagcttgctctgcagctgcgcacgatgcaaatgaccgccccagcctctcttggcttcagtcccccaccacagactaattctatctctcaccccaatttcaaatccccagggagctgtctgatctgcctgcttcagctcctctcagcctgcctggtgctgccgcacagaggaattggctgcccgtggccgggtggagagtcctcgtcttgtgtgtggccagggtctcaaggcctcatgctacacacttgcgtatagcatctcgtgcaggcttcaccacagtcttacgaggcatgcggtgaccttgcccttagacgtgtgcactcaggcctagagctgtcagagccatttgtcgagcgacccgctgctaggagatggcagagctggagccagaccccaaagccagcgctgcgctgttctccttttgacgcgggcttatccacagttaatcagtgatttcctcagatgtccacatgctcctacggtgactaaacccagctgtcttttgcacatagttggaaaagttactattaggcacctagactaggtttgatagcaataggattttattaaaaccttgatggaaaacctgcgtagtatctgctaacatctttgcatgcttggaggcagaggaggatttaatatacatcaagtctgtgtagcaacatcaaaggaagatttaaacactgctggcttttttgtgcgatatttaaaaagcaccccccaccttttaagaaaatgtgaagttctggcataaatcaaagtgtgattaatcagtgatgattgactggtattttcataacctgtggcattaataacaactttgtatggacataagagttgtaagcaaatttgggagggaggttactgcttcatgctattctccatgccgatcttcgatctttgtacatacttacttgcattctgtaaaattcggcgtgatgaaatccaagaaccaaaaatgcagggtggaaataggcttagtagtaagtgaccttctatttccacttcccacctccttgttaagattctttgacctcctgccacaggggccttagaggcatcctgtaagctttgcacagaagctgctaatcccccggcaggcagttcaggcaggcagttcattccgtttccacctggcagctgctccctctgacacccaaggactctcagggagtggccgttggacctgcagacccctgggaacaggcagggggaagatatgtggaactgagacccagaggcctccccacttccctgtgctgactcacgtaggctgtcatctctgttggcttttaaaggaagaggggtaggaaggacagtgaaattagaagcattgccaggtcttgcttgagagcttctctctctcactgctgctattttttcttcattaaatgtgtgatgtgggtttgttcaaagcatccagtggctctccacttagatcatttaattccacgatgcaaatggcagcacagctttggcctggaatcatgcttcgcacttggtcaaggccacctttaactgcctggccagacggctagagattttcccggggcacccctggagtttttcccatcctgactagagataatctcagagcgggagccagccccaagtgagagggcctctgaaagaccacaggatgggaacatggacgtgtagcctcatttcctcaaggggatgcaaggagattgattaggcaatgggggattccatgaaaaaaaaattcatgatattagtctacttacgtaaaattgtttgggtgagcacgggtggaggggcagggtggggaagagaaagacattgagatcaagtgaataaaggaattgggaccaaataccattctcacgctaacctgactgtcagatgaaagaagagaatgttgcagttatgcttatggcttgattctgcttggaagaaaagaaatcaacacaaaaaattcctgatgtgtgcatgcgcttttggaaaaaggtgtagggaagggcacacagcagtctaatcctggggacttgagaagggggagcacagcagtcccaaccctggggacttgggaagggggagcatagcagtctaactctggggacttgggaagggggagtaagggaaaggattatattcttttctttgcacatctttatatttatttccttattcaaaccagcactgttaatttttgtaattaaataaatttagagaaagactttttaaatgtgagagagctgttctgggggaaaaatcagaacaaaaactaaatttacactgggattgtttattttaagttttgtgtttcatagatagtctgtatagactgggtgtggtggctcatgcctgcagtcccaacactttgggaggccgaggcgggaggatagtttgaactcaggagtttgagaccagcctgggtaatgtaaagaccccgtctctatcaaaaatagaaaaagtcagctgggcatggtggtgcgcacctgtggtctcagaaactcgggaggctgaggcagaaggattgcttgagcctgggaggctgaggctgcaatgagctgtgatcataccaccacactccagcctgggtgactcaaaaggtacaaaaggctctttggggaaaaggaagttgtctgttctgtccacagccatgtatttccctttctggaggcagccactttggccagattcttggatattcttttttttttttttttttgttttgagttggagtcttgctctgtcgcctaggctggagtgcagtggcgtgatcttggctcactgcaagctccgcctcccgattcacgccattctcctgcctcagcctcccgagtagctgggactgcaggcacccgccaccatgcctggctaattttttgtgtttttagtagagatggggtttcaccctgttagccaggatggtctcgatctcctgacctcgtgatccgcccacctcggcctcccaaagtgctgggattacaggcgtgagccaccgcacccggccaattcttggatattcttaaagaaatgctctatggtttaaaaaatctagagatttgtttataatatatatatttgcatgtatataatgagtagggagagaaagtctcccaccccaaaatggtagtagaatagaaacagtgttttgtatgctttttaaaagtttaatatatacactgcaaaatattgatatatagagagctgtttgattcttttttactggccacgtgatattccattatataagccgactttatttagccagccttctattgatgagcattttgattattttcaatattttactccagaaacaacactaaagactcgagattgtattctttgacacatgttagtatatccgtagaataaataccttgaagcagaataatttttctccaaaaaggggctacaaataatacacttccttcagaaacatgtgaaagtgctagatattctttatagaacaaggtctgcattggaagtgggatgaaatataatgatagcgacagggactttagagaaggaagtaggaaagtcagggcccttgcagttgcttctctcatagacacctctctttctagaagatatttttgcccaaactttggtttttatatttcagggtaacaaggatgtgaggaaggaagtcaacattgagtgagttgctattatgtgccaagcctagggttaagtcagttgcaagtattgtttaattcttgtagtgttcctataaggtccatatttggcatttactatccacagagcacagatgagaaaaatgaggctcaggaggctaagtcagttccacagggttatccagtggataaatggcagagtcacctttcagacttcatgaaagtactctagctttttacagtccttctccttctcttcctcgtagaaaaatagaaatctctgtagctcttgctttgtgaaggatctggggatgcatgaaccaggaactaggtggaagaccagtttcacctgaggttgacctgtgatgtatgactttgcttgtacttaagaagtcacttttaataaggttgtagggtgtgcagagaaaatttactgttggattatgtggattgtcttcaaccacaaagggctgtgttccagaaactcttctgagtctactgactttaaaggagaagagccagccccgaagtatgacgctctgaaagctggtcaggtttcaaggtggacccacaaagcccacctaacttagaacattctgaaagagtatgacgtatgggtggccatgatttcttggtgttcttagtccataatgggatgcataggtgagaatgtatgtatagatacgggctagagcaggggtcctcagtccccgggccacagaccagtaccagttcatgggctgttaggaactgggctgcagggcaggagtgagcagtttcatctgtgtttatagctgctccccgtagctcacatttctgcctgagctctgcctcctgtccgatcagcggcagcattacattaggttctcataggagcttgaactctattgtgaattctgcatgctagggatccgtgcactccttatgagaatctaatgcctaatgatctgaagtggaacagcttcatccagaaaccatccccctcctccgccatccctggaaaaatcatcttccacgaaactggtttctagtgccaaacaggttggggactgctgggttagagccacagcaaggagaacaggaggggcgagagcccccccatctgcgggctgggatggagtccaggggcactgcggcagcactcgaggctgcagcaaggctggggctgtggccaaggatacagggcaataggtggcctcttaggtggaattgttgaaagcctcagagagagcactgtgaggaggaatgaggccatttattatttttgaaagtcaagtatgtgtaggttggcaactgcccatactttttatttcaaatggctttattaagcgaattacctctgatacaaatggacgtcaattaacaaagagcttggaggtaatttaatgtaatttctcagctcaagaaatcaagtgctttttttttttcctttcatagaagccagggtaaattttctcatagctgacagagattattatggtggttactcattttatcagaagtgatgtaatatccagtttagatggagagaggatggtgctctttggagctagttttcggagtctgccactagattgctgtgtgcttctatactgaaagcagccagtgtcctgatctctaattacccttagccttggtgtctctttgacatttcgagggggatagtgttggatgaactaaagctcgtgtctcacttttaagttacagttctctgaaccttgtaaacaggtagggagtcatttcctgaggctgaagaagaagaggagaaagaagccacgcttatatatgtctttagttgattagagatgggtaagagtatgttaaccttggcttacctttccctaaatgtcagctcttacatgtgggtccttcagtcagtaggtgtgtttccatgttattgctactccttcaaagtttataaccatcaactatgtttaactactttgacctactgatataataaccattggtaggtagtgtcatctaccaattattattagatagcatctagtattattaatatgagaactttctacatgtttgcgtagagcttcagcttgaatttcatctcatagaatatactttttttcttttaccaacaatacagtaaggcacaaatgaaataatcataaatatttcacagaacgatgcacgcttatatggcatttctgcctgtgtgtgcatttgatctatgagattccctgattctttagcatgaaactcatgggatatgatcagtgaaatttgtcccgctcagaatctgtcaagcattttattttcttggggaggatggtcatgccataaccccaattgatatttcttggtgatagtttaggttttgggttaaccatagggttttgtgtttttgtttgtttgtaattgagatataacttgcacacagaaaaatgcatagttgagggtccaatttgatagattttgatatatacatacacccataaaatcgtcaccccagaccccatcatgagtatgtccatcaccctcactccttgctcacttccattccttcctggctcccatcctcacccccagcagccactgatctgcttcctgtcactccagcttagcttgcattgtctagaattttgtataatggactcatccactatgcactctgtttttggtctggcttgttttactcaacatagttattcccaggtcatcgatgttggcgtatatatccatggctcattccttttccttcctagatagtagtctattgtacgaatatgccacaatttgtttatgtgccgaccttttaacggacacttgtattccttcaaatgagggagtttctactttttgactacttcagatgaagctgctacaagtctttgtatggatatatgctttgttgtctgttgagtaaatatctaggagcggcatagctgggtaacatggtaggtgtatgtttcaacttttcaagaaatgccacccacagtgtaggagagttccagttcccccacatcctcagcaacaattgattatgctgagtgtttttcattttataaattctagtaggcatgcaacaaacatatgaaaaaaagctcaacatcactggtcattagaaaaatgtgaatcaaaaccacaatgagataccatctcacaccagtcagaatggcaattattaaaaagtcaagaagcaacagatgctggcgaagctgtggagaaataggaatgcttttacactgttggtgggagtgcgaattagttcaaccattgtggaagacagtgtggcaattcctcaaagacctagaaccagaaataccgtttgacccagcaattccattactgggtatatacttaaaggaatataaatcattctgttataaagatacatgcatgtgtatgttcatcgcagcactattcacaataacaaagacgtggaatcaacccaaatgcccatcaatgatagactggataaagaaaatgtggtacatatacaccatggaatacaatgcagccataaaaaggaacaagatcatgtcctttgcagggacatggttggagctggaacccatcatcctcagcaaactaacacaggaacagaaaaccaaacaccgcatgttgtcactcataagtgggagctgaacaatgagaacccatggacacagggagggaaacaacacacactggggcctgtgtggggggcggtgagaaagggagggcattgagaagaatagctaatggatgctgggcttaatacctaggtgatgggttgatctatgcagcaaactcccatggcacacgtttacccatgtaacaaacctgcacatcctgtacatgtaccccagaacctaaaataagaaaaaaaaaaaaaaaaaagaaattctagcaggcatgaagtagtatctcatgtggttttcatttacagctccccaatatgcatcacgttgagtgtcttttcatgctcctatttaccatcggtttaccttctttggtgcctgttagaactttacccatttaaaaaaattattttatttattttcttaagttttcagagttctttacatatttggcacataggtcttttatcagatacatactttgcaaatattttctcccagtctgtgacttgtcttttcattcagcatttttggaagagcttaacttttttaactttcatgacaggcttaccatttaaataaagaaattgcagtcattccttgcttaacaatttgcatatgttctgagaaacgcacccttgggcgcttgtgtcatcgtgcgaacatgacagagtgcacttacacaaacctagatggtctagcctactacacacccaggctgtagggtctagcctattgctcttgggctacaaacctgtacagcatgtgactgtactgaatattgtgaccattgtaacaacgatggtaagtatttgtgcatctaaccttagaaaaggtacaatcaaaatacagtataaagataaaaaatggtgaccaggcatgctggctcatgcctgtaattccagcactgtgggaggctgaggtgggcagatcacttgaggtcaggagttcgaggccagcctggccaacatggcgaaaccctgtctctactaaaaatacaaaaattagctgggcgtggtggcacacacctgtaatcccagctacttgggaggctggggaacaagaatcgcttgaacctgggaggtgaaggttgcagtgaccgagatcatgcccctgcactccagcatgggcaacagagcaatactctgtctcaaaaaaaaaaaaaaaaagataaaaatgtggtatacacctgtgtagggcacttactataaatggagcttgtaggaatggaagttgctctgggtgagtcagtgtgggtgaatatggaggctcaggacgttactgctgctgtagacttcaacactgtacatttaggccacatccaatttattaagtctttatttctttaatagtaaattaaccttagcttactgtaacttttttactttataaacttttaatattttaactttttgattcttacagtaacacttagcttaaaatacaaacattgtacagctgtacaaaaatattgtttctttatatccttattgtatgagttttttctatttaaattttatagttttttaatttttaaagcttttttgttaaaatgaagacacacacacattggctcaggcctacacagggtcaggatcatcaatatcactgtcttctacctccacatcttgtcgcactggaagatcttcagggacaatgacagtgatggagctgttataccctgtaataaaaatgccttctcctggaacacctcccgaagggcctgcctgaggctgttttacagtaatgttttaaaataagtaggagtacaccctaaaagaatgataaaaagtatagtatagtaagcacataatccagtaacatagtcgtttgttattatatactgtacataattgtatgtgctagcattttatgactggcagtgaagtaggtggtttataccagcatcactgcaaacataagaataatgcattgctctacgacatcactaggtgataagaatttttcagctcttttgtaatcttatgggaccacccttataaatgtggggtctaccattgctcgaaaagtcattatatgaaggccaggtgcagtggttcatgcctgtaatcccagcactttgggaggctgaagtggacagatcacttgaggtcacaagtttgagaccatcctggccaacaaagtgaaaccccgtccctactaaaaatacaacctttagttgggcgtggtggtgcacgcctgtaaccccagctactcaggaggctgaggccagagaatcgcttgaacccaggaggtggaggttgcagtgagctcagatcactccactgcactctaagcctgggtgacagcgagactctatatcaaaaaggcaaaaaagaagtcattagacagtgcctgactgtattttattcacagtatcaagcactaaaaaacctatggcaaaaacaagcacaaagcaaaagcaaaacatgcctgtagccacattaccccttcccgccaagacagtgtcacaggaaccatattcatttgcacacctagggcaaaaaccccagtcaaatataagaagtaatgatttccaagaccatgagcatcaggcaacaaaggacagtgatcctgagctatgagaaatgaaggaggcaagccctgtcattgccccagcttactgtcttgagagtttccaggctgtggtgccaggagggtggcctagatagccgacccagaggagagaattgcagaaagaaagatctccagagatgtgcccaccaccctgggacccagcagcgtactgaccagcccgtgtaagtaaccaagactggaggacaaaaagggggatgctaagatcttacgccggcttcagtctccccctaccccacacccctgaaccactaaatgattcttcgtatctctgccctttccccctcaaaggaagccatttgcaactacgattcagaagaggacattttgcactacacttacgggcttctccgagccatgtaatcctcaaaattgagaaaatattctaagaggttggcattggagtcgccgcacatggaacttgactttgttgtggttttctctttagtttgaaaaagatccagtaatctggtaagacagcaaagcagggtgaccacttcctggagtgcttctggttttggggttttttgtttgcccttggatggcatgcggagaaggtagtactgcccagggaagtctggaagcttcctaggtggtgacttgtgtaccctgtggaagaagagggtgtggactctggcccccgcagcctaaccctgtgccccaccagtgtcggattcagaaccacacgcttgagggcacttgagagacctccgtgtttatgccccaacttatggattcggggatggatgagtttcgttctttaacatatatctagggcctgccgtgtgcctgacattgttctggatgcttgggatcccacagtgagtaaggaaaatcccactcttgtggagcttacgtccctgcagaggagacgcagcatcagctagtatgcgtcaggtggacgttagttacccaaaggagaataaccctggccttggccaggcatggcggctcacgccggtaatcccagcactttaggaggctgaagtgggaggatcacttgagaccatgagtctgagaccaggctgggcaacatggcgagacctcatctctacaaaaaataaaaataaaaaaatgaggtatgatggtgtgtgcctgtggtcccatttacttgggatgctgagactgcagtgagctatgattgcgccactgtactccagcctgggtgacagcgcaagaccctatctcaaaaaaaaaaaaatttttattctggtttgcaattataatttttcagaggttgaagaggcttggcagtgctgggtttaaattagttgtgcaatttagtgcttttcccgtcatcatagatgctgtgggtttcaaatggcctcaagtcccggctggattttattctgcggatgacacttgggtaggggagtagataaagaaaagctggtgttgagagaggattccagctggaatcctctccctgtagtgctgtgggagatgtttctgcctgcgcgagatattattcatgagcaaaaggagaaagttgagccatttcaaggttccttctggccttgaggtgctgtgggtccgattgcaagcctgtgggttttctcctctctcccaggactcttcagggaggcctcagctctaccagacctcccagtcccaaccttcactcctcctccttcctccccttccttggagaaaaatgaatctgcagaaatgttaggagacaagaagcaagtacacttgaccgttgaacaactcggggtttaggggcactgaccagccccctcccatggaatcacatccacatataacatttgactccttaactactgatagcctattgttgactggaagccttaacggataacatcagtagttcatcagcatgtatttcgtatgttttatgtattatatactgtgctcttacgataaactaagctaggggaaagaaaatgtttagaaaatcataggaagagaaaatgtatttactgttcagtggaagtggattgtcataaagatcttcatcatcgtcttcgtattgagtgagctgaggaggaggaagaggaggggttggacttgctctctcaggaggtggcagaagtggaagaaaatttcctgtaaatggacctgcatggttcaaacctttgttgttcaggagttgactgtatacgccttctgatcatttgttttttcccaagacggtcttgctttgccgcccatactggagtacagtggcatgatctaggctcactgcaacctccacctcccaggttcaagcgattctcctgcctcagcctcctgagtagttgagattacaggtgcccaccaccatgcctggctaatttttgtatttttagtaggatgaggttttaccatgtcggccaggctggtctcgaacttctggtctcaagcaatctgcccgcctcggcctcccaaagtggtgggattacaggcgcgagccactgcgcccggcctggcttctgatcattattaaggacttcacatgattccccttagtacttcaaagtcaggtagattttgataaggtccttgggcgctagttttataatttcaggtcataagggttcgtcctattttctcttgcaaggaaaatgaatgttggggagagaacgttgtcgtctgaatgcttttatgccgtctgcagtaacctctctgagtctggaaccattttccagtaagaagtaggtgacaggctatcaaaataaagagtaaccttttgaaagcacttcagtgcagcactgtgggctttttataatcttgacttgtgttttgtgagaggagagggctgagctaggtttgtgctctgctcctccccctccccctctccccaactgtctttgatctgtgaagcttgtctcatccttagccaagtctgctggaactttatccagagcaggaaaaggggaaatagttttcctttcttgggtggatttgtatttatataaacccttagcgagcaaaatggagccaagtggcacacgcgtctgcagggaggcgtggtgggacgagtgagtggcgggaagaggcggctttgacttgggtcacatggtgtcagacctttttagggtcagtgaggagaggatggtgtaagtccttgtgcacattttcttaaggacatacttacatgtcgggccattgtagagcaacaaagggcagggtgtgtgtgcatctcactgtatgtctatatcaccaagagcagctgtctccaaccttgttcggcaccacagactggggttggtgggatggtttcatgatgattcaagtgcattacatttgtcgtgcactttatttctactattattacattgtaatagataatgagataattatacaactcactataatgtggaatcagtgggagccctgagcttgttttcctgcaactagctggtcccatctggtggtgatgggagtgacaaatcattaagcattagattcttacaaggagcgcgcaacctagatccctcacatacaagttcacagtagggtttgcccactcttatgagaatctcatgctgccctgatctgacaggagatggagctccggtggtaatttgagcaatggggagtggctgtaaacagatgaagctttgcctgctcacctaccactcacctccctctgtgctgcccatggacgcgtaccagtccatggccctggcgttgggcacccttgctatagagtcattcctccaacccttatttgcgggggatgctttccaagtaccctactggatcctgaaaccaccaatggcaccaaacccaattgccatcaattggaaaacgtttccggtcatatcttttgcccacaaatgtaatgtctttttcatcttaactaagcacttagcaggtgctgtaaccataccttttgcagtttgaggtgtagcagcaaaactagcatggatttatttttcctttttcacagtttcacagaatattcattctcactgtagatctggtaatttcagcatgcaattttttttctttccttattaagtcaagacctttcagctttttactaaagcacttaacagcttctctttggcagatccaaatcgccagcatcactactcttacactttcgggccattatgaagtaaaataagggtgacgtattaagcactgcaacactttgacagtggatctgataaccgagaaagtgcctaagtgatgagcaggtggggagcgtttacagcgtggggacactgggcagaggagggttcccaggggagcgtctacagtgtggggacactgggcagaggagggttcccaggggagcgtctacagtgtggggacactgggcagaggagggttcccaggggagcgtctacagtgtgggggcactgggcagaggagggttcccaggggagagtctacagtgtggggacactgggcagaggagggttcccaggggagcgtctacagtgtggggacagtggacacaggagatttcatggtgctggggggtatggagctggacaggtcgagatttcatcatgctactagaatggtgctagatttaaaactgatgattgtttatttctggagtttttcatttaatattttcagacccagattgatggctggtagccgaaacctttggaagcaaaaaccacagatgatgggggaccactgtatatctaaatatatcactatatatagtgatacatacagatgaatgacaagttcaagttcattttgctttttaaattgttactaagagaataatgttgtagaaggccttagctctcctttgcaacattgacctcggaagttttagctacttacagtgtgtcccactattaatttacttccttgaattagtctcagcctttcacaccagctctggccacttcttgtggatggtgaggtttttaagtgtgcatgccatccacgcgaatgccttcttttcattgtagggggtacagggaaaactttccctttgctctcagaagaaggttcagtgaaaatcaactgatgaaaggcaaattaataagaataagaagattactaaggcaaataaatttattaacattcaaagggaatcacagtgggatacagaagctatacgctttttcataggggagggaagagatgagaatgtagacagctcttttgagaggcagtaagtgaggattagggagaatgaatggaccacagagaccgaaatgaaattgtaagtgattctctttggaatctgaatgggcctgagaggcagacattatctcgggaaaatgtctgtcaggtgtggtcacattcgtcaggctttttttctgagataatgagattccagggagggcatagaaagcatttatgtttcttttggtgagcgctcttggtcagataaggacgttccaggaatagtccctgcccttgtggtttggggaggcacaagacaaggttagagggaccttcattctgaggcttacttcaggggccgctcagctttcaaaagcgcccagcgtgctcaggtgccatattttgaggaatgattttctatacccccaacatcataaaaccacctcattgaagcttcaagtggtgcctcatggttcctttctgtgttttctttttttttttgagacagagtctggctgtgtccccagggctgtagtgcagtggcacaatctcggctctctgcaacctctgcctcccgggttcaagcgattctcctgcctcagcctcccaagttgctgggattacagatgtgtaccacctcgcctggctaatttttgtatgtttagtagagatggggtttcaacatgttggctaggctggcctcgaactcctgacctcaagtgatctgccagccttggcctcccaaagtgctgggattacaggcctgggtcaccggacccggcccctttctaggatttttagaaattccagagaaatctcatacaaaatctagagaaagcatctattgttcttgtgttattgcaatttgtatagtgtcagggttaatctgggactgatgaagatgctgagaacagtaagtttaaagaactttgatatagaacaatattttactttgctattgttctgtcttttagaaccaaaaataaagcccttcttagtaggtgactcagcttcctgcaacctcgctggggaaatttctccaaatattaatgcatgccacgtaagccaggttcacttgctggccctggatgtttattctggcccccagttatatttattttgtgtctggtagagcctcacacttcaaagtggaatgctcctgaagtttctacctggcctctcatcccagtgttgtaatggacacttggggaaggaaactccccagggactctggagatgccaagactctgacgcttttgcagcaggtgggcgtcccgtgaggaagagtggcttggaggaggggagatgggctctcctgttgcaggtattagaaacagagaaagcaggaggaagaggaattgcaaataaccaggcatgaggaagacgtagggaacaatgctacagaggattggatttgtatgaattatttttaaaacaaaacaaaacaaacaaacccccaaacggccaggcacagtggctcacgcctgtaatcccagcactttgggaggccaaggtgggcgggtcacctgaggtcacaggagttagagaccagtctggccaacatggcaaaaccccatctctactaaaaatacaaaaattagccagtcatggtggtgcgcgcctgtaatcccagctatttgggagtctgaggcaggagaatctcttgaacccggaaggtggaggttgtagtgagccaagatcatgccactgcactccagcctgggcaacagagtgagactctgtctcaaaaaagaaagcaaaacaaaacaaaaaaccctccaaacaaaaggttgtcatgaaagggaaatgcagttgacccttgaacacacacgagtttgaactgtgccggtccacttacagaaggattttcttccacttctgccacccctgagacaaccagaccaacccctcctcttccccctcctccccagcctcctcaatgaacagacaatgatgaggaagacctttatgatggtctacttccacttaatgaatagtaaatatattctctctcaagattgtctcaatagcattttcttttttctagcttattttattgtaagaatacagcacatgctatatgtgacacacaaaatatctgttaatcagctgattacattattggtaaggcttccagtcaacagtaggctttttgtagttaagttctgggggtggtcagaaatgatacgtggatttttgactgcttggggtgttgattgttcaagggtcaactatataagcttgtaatgtgagggaagagactaaattctggtagagatttgaaaaatagtagcagttttttccccttggctttctgtggttgaacgtttaccaaatgcattggaagggccgttgtgatctgaggcctcagctttttgatctagaagagacctgactgatgatccctcaaggggcccttggaccaactgcagctcttcttggtttagcaaacctgagatcatttagtcatccccttctccctcctatctttcaaaccaaaaaataattttaacaaagctttatgtaattagcaagcaaacattactgtcaggacgatcgtcttctgccaggagttgggctaaacaaggaaaagctgaggtcatgggctccaggtggagcacctgccatgaaaggaaaactgaaaggcgcccgtcatccgtgcccagtgtgtgggcctggcacggcttccctggcgttattcattgggagaatctgagaaccattgtgtgagtcgcagaagtaatcaagagtgtggccttttttcttccttctgcctataactatcaccactttggaggatgcttggaagaagtggaagaagccaagtgctgacactgagtttgtttagtgttgcctagtgaccaggccatgaatactcactgaagataggtgctgagggctttctgatttaagggcatctctgagaggccccaactggcctggtttatttaccctaccgattgtactctgtgactgctaagacttcacaaatggtttccaaagcttcaagacgctgaagggtgtttatgaatgttgtttttttgtttgtttgttttttgtttattttattttattgaagtttcagcattcaatatcaaaaccggacttgagaattccacaaatgcctgaaaatggaaatttccttacattgttaaattgcccagaactcagtggattcctacattttgaagagttgcagagatgtgtgctgaaaatgaaaacggttctaggagagggtcataatttttgatggtgtaagtttttgtagctgtcgttggaaccataccttaggatatattcaattatcaagtgagcctatgagtttgagtcgttttgaaaaggaatgatatctgtggggcactggttccaggacccccatgggtaccaaagtctttggatgctcaagtccctgatatccagtggcatggtatttgcacataacctacgaacatcctcccggatgctttattttattttagtttagttttctgagacagagtctcactctgtcgcccaggctggagtgcaatggcacagtctcggcttactgaaacctctgcctcctggattccagtgattctcctgcctcagcttctggagtagctgagattacaggcatgtgccacgatgccccgctaatttttgtttttttagtagagccgaggttccaccaggttggccaggctggtctctaattcctgacctcaggtgatttgcctgcctcggcctcccaaagtgctgggattacaggtgtgagccactgctcccagcctcctcccttactttaaatcatctctaggttacctataataactaatacaatacaaatgttatgtaaatagttgttatactattttgtttagggaataatgacaagaaaaaggtctatacatgttcagtacagatggaatttagttttctttttctttctttttttttttttttgagacagggtcttgctctgtcgcccaggctggagtgcagtggtgcgatttcggctcactgcaacctctgcctctcgggttcaagcgattcttctgcctcagcctcccaggtagctgggattacaggtgcctaccaccatccctggctaattttcatctttttagtagagaatgggggtttcaccatgttggccaggctggtcttgaactcctgacctcaaatgatctgcccccacccctcggcctcccaaagtgctggtattacaggcatgagccaccacgtccagcccaggtgcagtttaaaaacaattttttcgacctgcagttggttgaatccgtggatgcaaaactcactgataaggagggctaactctgtaattgagccaagagcaaaccttgttcacaggaagaatgcaacatccctacagttttggggaaccactctttgaatccccaaaaccccttaagagtatatgtggcttagtggtagaatatacctgtgggtaccccagctgacttgttagtggctatgcaggaagattgttgccaaatctaccgatagcctgcataccttgggtaagtctcttgcaagttcagcagcaactcagcccctttaaggatgttccacctgccttccccatgaattcagcatcccgtgtgggtggccttccagggaccacagctgttgcctcatcatgtttcccagaaagttctgtagcctgctttccgcacagcctgctccttcaccccccaagatagcttcccagggaatttgttggcacccagaggacagtcccctgcctgctagctttggccagctgatcatggacagtctggcctagggcagtccagccagcttctccaccatgcaaggagctgctccataccctacccttcattccttgtaactgggtagcttataaggaacagaaatctgtttctcacagtgtgggaggttggtaagtccaagatcaaggcaccagcagatttggtatctggtgaggggtttctcattcacatatggtgtcttctcgccatgtcctcacatgcgcttgtatgaactctttgtgtatttagaagagtaagcctttagagaatcttctcgtgactacagtaatagggtcaagtacttactaggtgccagatacagtgttcagtatgtttcgtgtatgtgttacctaatttaaacatcatgctatccttgacacaggatatctggtagtgatgagtttagtcagtcctactgtcagagttcagcacagccacttcttcctgtgaccattggcaaactacctcttgcatctgagcctcaatttcctcttctgtatataatgaggataataattgtccctcccttctggtgttgttgtgaagactgagatggtacataaacaacattaagccagtaaaaagtgctcgctcaatgtcagttgctgctgtggtcatcttttcttcttcctggattaacttaggcttattttgcagtttgacatacattacaccatgatggtaaggtaaagtgcacgcatcgttctccattctgataacaaaagttgctgggtccttcgtctaagtgttccccactctgaagtctttcccagtcctgtgaatcagtatgaatctctccttctccgaactccaccagcatctcctgtaaatttccttgggggcctcatcatacaggactgtagttctttgcacacctggcctcccctgtggacactgggatcctccatggtggaggctgtgccctcaactctcagacccctgcgtcttcttcagtcctcacccacagtaaggtctcaatagttagttactcagtgaaataatgcactttattttgaagatcaagtttatgttcaatttgagaatgattagcttctgttttgctagatagcacacaaataaaccattcttcatatgtgagttaagatcattttgaaaggaaaaagctgtttttcttatgttcttaatctaggaactgtgcacgtttcttaaatcctgaggatactggcaccgcgtagtaggttgttggagtatacaaacatgctggaaactgtggactgttctgcttgctgctcagtatttgttaacatcaagtgaatttttcacatgtgtgaaacttctcagtgccttccaccttcgtgctctgtttccatggatggcagtcctgctagagataagacccaaacaaaaccagttacctggctctgtgtgacgtggacagtctggggtacagttagagttgataatggaggcttaatagtctgctgtacattctttctttctttctttttttttttgagacagagtctcaccccatcgtccaggctggagtgcagtgtctcaatcttgggtcactgcaacctccacttcccaggttcaagcgattctgctgcctcagcctcctgaatagctgggactacaggcgcgtgccaccacgccccactaattttttatatttttagtagaggcggggttttaccatgttggccaggatagtctcgatgtccggaccttgtgatccgcccacctcggcctcccagagtgctgggattacaggtgtgagccactgcacccagcctgttatttcaaattctctggcaaaatgatctgaccaccgaaagctgtgacatactagccaagaagcctgctgcaccaggctggtgccagggatgggtgctgaggacaggggcttggcatctgctgttgttattctgagtgtccaggcagataaaagcaggtggagctggggcctgtgtggaattccaaccaggagagagttttcaggggaaaccaaagaagctgcatctgtgttcaagccctggggatgattttaggacaaaagtagaacttgaagataagcaggcaaggagctaggtgagggcagtctcagaagtaagagtgttaagagactggggtgcccacagcaacttctcgttggagtcctggcccctgtggtgcatggtgggtgggttggtttacagacctgcagctctctgtgggacttggagcaaatctgttaaactcagagggcttctgacttactagttgatgtttggactggatgccttccaggttccagtctagctcgaacatgctgttacttgggttcattttattactttgataagcatttaacatttacatttttaacttgcatttttatatttgaggatcttttcctagctggtgtttgaagtgcatttttgatatccacatagccatgctacaagctaatgatgctaaattaacttttgtagcagtttgctgtttacaggagtttggttaaggaactcaaattacattcacttaatattgtgcgacactatataaaaatgtacacgtcaggaaattaatgtttttcataaaagtatgtcgcttagttcattaattaaaaatagcgtttttagattgctcatttaggaaagatgagttctggcataaagaagcagtccctgctttggggaggcattagcctgggggcaaagagtaagggccccagaagtgggttcccaagttcacatcccaagtctgctgctggttagctcctgactctgggtacatcgcataacctccctgagcattagcatcctcatttgtaaaatgaggataaacccatctagggccattgtgaagattacacgaggtgtacatttaaaactgcaggcccagtgctgatatgggcctgcgctatcagtgtggcctttgcgggggatgagacatttagaaatacggtgtttttgttttcttttgctctttgagacggagtctcactctgtcgcccgggttggagtgcagtggcctgatctcagctcactgaaacttctgcctcctggattcaagtgattctcatgcctcagcctcccgaatacctgagattacaggtgcccgccaacatgcctggctgatttttgtatttctagtagagactgggttttaccatgttggccaggctgatcttgaactcctgggctcaagcgatccacccgtctttgcctcgcaaagtgctgggattagaggcatgaaccactgtcccagccagaaatacagtactttgaagcaaaggaatttcatatcattatacgtcagcagatacagtggtccccttatccatggtttcactttctgtgatttcagttacctgcaatcaactgtggtccaaatacatgtgaatgcagcataataatagtttttgagagaccatattcataaaagtttaattattaatacagtatattatcattgtcctatttattgttgtaaatttcttactgtgcgtaatttataaattaaactttatcataggtatctacttataggcaaaaacatagtctgtatagtcttcggtactgtcctcggtttcatgcatccgctggggtcttggaacgcatgtctgagggataaggggggactgctcttctttggagtctctagaatttcttttctttttttttttttgttgttgttgagacagattctcactctgtcgcccaggctggagtgcagtggcgcaatctgggctcactggaacctctgccttccgggttcaagcgattcacctgcctcagcctcctgggtagctgggactacaggcacctgccacaaatgcctagctgatttttgtatttttagtagatgtggagtttcaccttattggccaggctggtctcgaactcctgaccttgtgatccacctgcctcagccttccaaactgctaggattgcaggtgtgagccaccgcgcccagcccggagtctctagaatttcaagtcagcagtagaagtggttggtgcagagagttgaagttgtaattgcagtagtgtctttccccagttggtgtacatttcacatccttgatttggttaattgactttctagaagccagacatggtggctcacacctgtaatcccagcactttgggaggctgaggtgggaggattgcttgaggccagaagtttgagaccagcctgggaaacatatcgagactcctgtctctacaaaaataaagtaaaaggttaacatttagccagatgtggtgctgcatacctgtggtcccagctatttgggagtctgaggtgggaggatcacctgagcctgggagattgaggctgcagagagctgtgattaggccactgcacttcagcctgggtgacaaaccaagagcctgtctccaaaacaacaacaaaaaatttagttcctaggtttaagtagggcagtttgaacaataatgtgtcccatctgcagccaggagctgtttcttgagtactctctgagaaagggcagggtgccctgggtatatggatgagagaatggaagtcatcactgcttttagagatgtaatgatctagttgaagagagattacatccagggcatgcagagtaatagcgttcctttaagtattgtggtgatccattaggttaattatgtgtttttgctagactcgttagatagtgttgtgtcgtgcatctgcttcacacatacctatcagggcaatccccttgcccagaggaggctgggctgatcttaggctgtttgtgtttttaacacttttagtctgctgtgtttccagatcatttatatagggctttgttgaatggttgctgtggtctgcttgagtcccatctgccccaaatcctaattatgaacacctccttggcagcccttgcttcggtgggctctggggactctggctcagtcgttgatatctagataaagatccctggagtcagtctgttaaaaggaaggtgagcagagcagtgacagatgctgtctttgtctagtgtgggccttcctgccataaccatgaaaattttctccacggtgacgcagaggaggatttaggcgctggagccggcgcccaggcagttctgctgttcttggttgcacatttgttctcacatccttcgttgcttcacctctgcccttctccccctgcccccatccccgggcagtgctgtctttgtaaaatgagcccatttttagtgcacatctccctaacacgtttttctctctcctcctacaggggagttgctgagtcagcccagaccggaaggagtggcagagatcatttgccccaagaacggcagcgagcgagtaaatgttgccttggtttacccacccacgccgactgtgatcagcccctgttccaagtgagttctcaaagtccctctggccccgggacctggctcctgatcccagctccatagatatgaccacaaaaatccaggttaaactgcatctgcacaaaccttgcaaagtcctcctgaacagacataattcttctggatgacatcagcatcatgatttatgcagcaaaacaggaacttttatttcctcttttttgtgatttttttttttttttttactttagctaataaagtcagaacattttttaacagcctttttgagatgtcattcacataccacagttcacttacctaagtgtacagttcattggttttcagtttatttgcaggtatatggaaccaaaaagaacattttttttgttgttgttttttgagatggagtctcgctctgtcacccaggctggagtgcagtggtgcgatctcggctcactgcaagctccgcctcccgggttcaccccattctcctgcctcagcctcccgagtagctgggactacaggcgcccaccaccatgcccagctaatttttttgtatttttagtagagacagggtttcaccctgttagccaggatgatctcgatctcctgacctcgggatccgcccgtcttggcctcccaaagtgctgggattacaggcgtgagccaccacgtccggcctttttttgccttttttttttttttttgttttgagacggagtcttgctctgtcgcccaggctggagtgcagtggcgccatcttggctcactgcaagctccgccttccgggttcggggcattctcctgcctcagcctcccgagtagctgggactacaggcgcccgccaccgcgcccggctaatttttttgtatttttagtagagacggggtttcaccctgttagccaggatgatctcgatctcctgacctcgggatccgcccgtcttggcctcccaaagtgctgggattacaaaagaaaatagttttttgacgggcagtcttaactctgtcattgcagaatgaagttggctctcacatcaaaaaccagcgcaggcccattccatgagcaaagcctgcagaaagtcagtaataggccgttttctgttgcatggttctgattgcggagtcagtccctgaaaatcaagggctgtgcagtttgccaccaccttgccccaaaatggacttgaagacagagaacgcacacatgccaagtaactttcagatagaacattgggttactactattctagataacactcatcctgttggtttgggttttatgtatgtgtgtttttcgttttgttttgtttgtattaagaaccaaagaggccgcttttaagctgagatgaaatgcctgttacttcaaatcctgaaaagcagcagccacagatcttcttgggtcagatctcatgatctgggtgatgtcagcaccatgatttctccagcatagtattcatatccatgcagcaaactcgactctttcttcctagctggccacatggaattttttaatgaaaaaattatgtatgaatctaagcctgtttttagggagcttggaaagtgcgcctttgggaattgtgacctgtcatctcctcttgggaaacttgctgtccggctgcattccaggcagtgtgacaggcatccatctcacccctcacatggcagcttccctgcctttggtgtgctccctgcaaagcgagggttcccagtggcattcttactcattagctgctgcagtagaagtagagggcactcggctcagtgccccgtttctccaaactgggaaactcattacatagaacatccctaatctatccttgctggaaaatatcaccgaacacccaagggaaactgttatctaatgctcttgtattcagagtactatttaactatcatgtgcatagtttaatttatcactgaccctaagacattgtgaatcttgaagtgcttcttaaatattaaaataggattacagaataactgttaaaagtaattgcacaattacttttgcaccaaccgaatattaacctgaatatcccctgtcctgaacatatcaaacaacggaaattttattgtttctcttttaatttctttgaaattgtacatattggtccctttctttcagatacacctgggtgaggatggataaggggatattatatgttttctttttcttctgtctcttttttttaataccccgcaagttcttaaagctcaaggggatattacagaaccagcaaggtatgaaacagaggaaacaaaaattcaatatactttgcattggcgtaaactttccagagccaagagagacatgaacctattgttttgccatagccaagtgccgtcgaataggtgcgatagaggtaggagttaaaatatccatttgcgctagaaaccttcctggcaccaagccagctttatcagtgttttcccatgggcttcttgtactgccgcagaaagaccacgtttataccaacctgaaaaaaatgttatcagcctctctctcgacagcgtattgaacctgaacgaacaagcagcctaaagtcatgggtaagcggcggtacatggcgccagacatccaaatgccgaggaagcctctttaggcattgaaccacttttgacctagctatcagaatcattttattttgaaagaggttaaaaaaaaagtctcatgaaatggatgacagctttgcaatataattctcaactctaaatgaaggaatgttctctaagtagggaagtttcatattcctggcaagacgtttcttggaaaattaccatattttagtgcagctgcaagaggtaaatgatctcttgtgtgactttatagaaaagcacacgtagatgtgaagcctgtgctcgagctgcccagtgttcccccaccttcaccgccttaagcacccacagtttacatccatgaacacatggacaaaaacaaactcatgtggaggccgggccaggctccggggaaggtcccattcatgggtggttgacagtggattggaagcgggagatttggggggatcggttaggatagctggcaaagaatctgtgcttaagtcaacacagcttgggcctgagcctgagacttggggtctcagcaggcactagacattggaagtccggggctattgcactggctttcaactccagccgaggtaacttaagcaggtcaccatagaggtcaggcttttttttttcttttttgacaaagggtctcactctgtcacccaggctggagtgcagtggtgcgatctcagctcattgcaaactccacctccagggttcaagtgattcttctgcctcagcctcctaagtagctaggactacaggcgcacacaaccacacctagctaattttttgtattttttggtagagacggggtttcatcatgttggctgggctggtctcgaactcctgacctcaagtgatccatctgcctcagcctccgaaaatgctgggattacaggcatgagccaccgtgcccagccaaggtcaggctttcttaatcagacctgttaagttagaatttctcagggaagggaccaggcatgagtcactaaaaaacagaagaagccacccagatgagtctaacgtgtgtacacgactttctgatggttcagttccagtccatgcctctaagggtgggttccctggccagtggggccttaggactgctctgtggtcaatacctgctctgcagcacaaaggcaaaactgtccatgctgtctgctctcagcctcagcacagtccctcccactctcaggtaaggtgaacatatcactcactgttcaaatcaggagaggattgagagtgatgggacggctgtcagtcatgttgggatgatgggtgccctagagaaagctcccaggtagaccagaataattaccctaggtgattgctggcttttgtggggcttaggtggctgatctggatctcatgatggtttttaaaaagacattccaagctcttctttggctggtttagccctctcctttattggtcaaatcagagacttgtcatttaactgcctgtctttgactaatggtgctgcaatgctttctttataaagaagaaactgtagatgactgttacctgattggccttttttaaatgaattccaagcttttctatttcttattttaaacaatttgtagacattttattcccccatggggagagacagagaataagaagtaggtagtgatatttttttttttgttttaacaacatgatttactcttataacttgtctcagtggattggtggttgaggtctccaccagcgtttcattgggaagaggtttcaggaacaggatgaaatgcctccccttctgcacctcaccctccagggagaaacaggagctgagtggcttcttctcccccttgctgattatcagatagaaatgtgagtcatttccatgctttgaatatcttgagatgattttcaaggatatctgcatttaagatgaggtgaacattcacctagtagcaaatttgcctgggtcgctctgaaaaattctggcctcctcaaggatacagattgtgacagatacatttttaaaagctttattgatgtataatttccataccagaaaattcacctgtgcaatgattactaacgtatttgcagagttgtatttatacaaccatcaccacaatctaattttagaacgttccttcaccccaaaaagaaatctcctgcctatttgcagttaacttgtgtcttatccaacacctagttcatgcagtcagtaagttttttttggtttgtttttttggttatttttttgagatgaagtctcactctgtagcccaggctggagtgcagtggcgtgatcttggctcaccacaacctccgcctcctgggttcaagcaattcttctgcctcagcctccagagtagctgggattataggcacacgccactgcacctagctaattttttattttttgtattagtagagaaggagtttcaccatgttgaccaggctggtcttgaactcccgacctcagataatctgcccgccttggcctcccaaagtgctaggattacaggcgtgagccacgcgcccggccaataaatatttttagtgtcactttcaggaatggttttgcaggctggtgtgttagtatgaagcagatttctgagcttttgttttgggacagagtctcactccttcacccaggctggagtacagtggcatgatctcggctcactgcaacctctgccccctgggttcaaatgattctcctgttatccctgccgagtagctgggactacaggtacatgccaccatgcctggctaatttttgtatttttggtagagatagggtttcactgtgttagccaggatggtctcgatctcctgaccgtgatccgcctgcctcggcctcccagagtgctgggattacaggcgtgagccaccgtgcctggccgatttctgagttttaaagaggttctcataaacacgttatccttggcacagttcagtctaaaggcagtggcttgtcttgctcctgccactgccagccccctatttcctggatggtggagaggagctggagctgcttggagagctcctcctttagaacttcttcatggcagcctaattaggccctagatatttcaggggtactgagccttgacattaggagtcaaaagatagggcaaacctatacttcccgtgggcaaggtaggaagcaagtagaccgcattatcttttaaagcttttatttgtgaattcctgtctctgtccagctactcttcaggttgagacccaatattccatttcccagggagtgtgagcttctctggacaaatggcagcttgctggttgcgtttcatttctagggttcctgcagaatgcttctctttctccttctaaagagctttagagcaaatccgtcctccaccaaactgaagactctttgataacctgccagataacccagtttatctactgatttttgggtaaaagaccaagcaaattcaacaggtcatcatatgaaaatgttttaccttgaggcattactggaatgcgacccacattctaacatgtggtttcttaatggactgacccttgaatatacaggaaatgggcatgtgtcactcttatttcctgatggttgacgtttctcctgcagcgataccgtatctgtctgtgctccgatatgtggggaatggtgggagttctgagactgaagaagttagttcattctgattttggctgatcatgtgttaacagaattagcaaaaaaaaaaaaaaaaaacgggtggggtggtggtttgaaaatggttgagctaagctttctccttttttaggaagtactaataataatagaggggaaggctgagttattgcatttcgaaatacccttttaaaatcttggattattgcctctatactgtagagttcccattcaagcaagatccccactaaattccagttacttgctagctgtttgtaagtattctcagaagtaccgtggttactttgcacaggaattttggcagtaacatcgttttgacataaagacatttaagaccagttgcagtagcctttcataaaaagcaggatgaagtctgtagcctttatatcaccaaataaacaggccacgtatgcctaacagcacacaaattagcatgaacttgataaaatatttttaaaaagcagtggcgtgatatgaattaggcttcatcacaatggagaatttttcactgaccacagaattttaaaatatagagggtgaggatgggatggtattttataagaaaaggccacatgtggaggttgcctgtggggtgtttcacattgatttgcattgatttgttttgttctatgcaaggagtgaggcagctctttgccttgctgttttaacaagctaggaggaattgtgtttctttaattatttagtctcccgtcagccacattgatactggaatttttccctctctgcttaggtatcttcatactttcttggaaaattaagtggaaaagatagtgcttcttttccttatgccatcatttttactgtacccaaactgtgactttaggagcaccaatttttaagggtaagtctccgtgaaacagagagaatttcttaaataggtaaggccctcttgaggactcagagagattaggggggatatgggggtgttgggatgaagagattttggagaacaggaatcctagacaaaccttatacatctctagaatcaagttgcatatgggaattaggaagaagggaactgcttgattcttttgcttaatttactatgatattgcatagacagtgatcttagatccttgttcaaaaaaggaagtcatttttgaaaaatgttaatattatgcagaaataaaacatcaagtgggtccacaccttcaggaactacacaggaaagtaccgggatggtcacaagtagggaaagggagggactgggggcaggaggggagaggggaggaacgggcaaggccgggtaggcaggtctaggacaggcttatttgaataatctcagtggccctggggcagaggggttgccttagtcgtctggcacctggctcaggggtgattagggcaggtggatggtggcctggagtgtgagagccagtaaaggaggtgttccaggtgtgggttcaggattagttggtttgtattggaagagtatactccgggcaaattgttttaccatctctaggaattggctaatcctaggaggggcagtccctccagagtttgcaaggtccggagtaggaaagcaccagaatacagaaaataaaagacatggttaatacaacatgccatggcttcagtttcagcctaagtgtctcggtaccttgcgtcataatttctttgttgcatcctggaagggcagatttcaattccctaacctgggaggactcgggggctgggtgccccccaggctggaccctcccttcagccccagacctctgtttccaatgtctcacgtggcatcatccctggatgtctgtaggcttcacaggtgtacagctgaatttattgccttcctcccgcaaagttcttcctcagtctgtgacctgtcttgggtaacagcgtagctttgtaccatcggctccaagctaggagtccgtaagcctcattgccttcctctgctttcttccctatatgtagtaattctccaacaccttttatcccatctcatctgtgtcgtgacatgaatgaatttgacccacatcttcagcttcagcctcgggcttccctctagggcccaacccccccagccaccacttcccccgtctctgccaaggttcctgtgactgagtctcagctggctgcctgctctcttatctttttgtccttcaaaccgacaataattgtcttttaacatcagacctcatcacatctctccctgttgaaaagccttggatggcttcctggtgatcacaggctcaagttcaaactcctggccgtggctcacaaggccctgcacaatcagacccagccactctgccaacacacagatactcccttaccatgggaggtcagccgtggtgggccgtggctgcctctcagtccactggctggctgctgcccttctctcctacccagttaaggcccattggtcgctgaggccaaggtcatatgtcagctcctctggggagcctcccgtaaccatcctaactgtaaccagtcactctgttcttcatgtctcctcaatactttttgtttctttgtttgagacagagtcttggtctgtcacccaggctggagtgtattggcacaatcttggttcactgcaccctccgcctcctgggttcaagcaattatcctgcctcagccccccgagtagctgggactacaggcatgcaccaccacgcctggctaatttttgcatttttagtagagacagggttttgccatgttggccaggctggtctcaaactcctgacctcaggtgatctgcctgcctcagccttccaaagcagtgggattacaggcatgagctgccgcacctggctctcctcagtactttttatatacctcttttggtaatgatctcatagtatcttggctactttttacctgtggctttttcatcacatctgacccatcattcattcaacagatctttgttgagtaattatcctctagtaggcattgggccgggtgttgaggatacataaagaactaaatcaaatcctgccctccagaacctaatagcctctttggagaagataggaatcaaagccataaccaggcaaacttatcagagtctaattataattgaaacatggtacctgccatgataggtgtatgaacagagtcttgtaagcacagggaagaaagaactctaccaggaagaatcaggaaaagttccaggaagtcgtacttgagatggatcttgaagaaggaggacaagtttatggagctagagaggtggggagaaacagagaaggttggtgattttgatggttgttttctctaagatcccaaatgtggaaaaaggcatatagatgtgaaacaattttcaagctggttgaacagtgggattttccgtctaggtgtccttgattaggtattcttgtgtttctcagtcttacgtgtagcccggggagcagactgtctgcatttctgaaggtctgtcagattcagtgggaaaatgtttatgtaacacatctcccacgtgaacccaaaactcacaccaccaaagttagctgctaggttgagacgtgtgtttttacactggcgtcctccttacagttagattgattatattattagttgaatttgaggcagttttcaaaaccctctcttctgggagtttactatattaataggcattcaaaaaattctcgtggcagagtgccttagaaatgtgaaactctttcctagggctccaaatatccaacttctctttgagctttggagtcagatcaccctagtgaaaggcctggctctgtcactcgctagtatgcacccttggggaagttatttcatcttttggaaccttagttcccttcctagtaagatgctgaggccgggcgcagtggctcacacctgtaatcccagtactttgggaggccaaggtgggcggatcatgaggtcaggagatcaagatcatcctggctaacatggtgaaaccccatctctactaaaaatgcaaaaaattagccgcgtgtggtggcgggcacatgtagtcctagctactcgggaggctgaggcaggagaatggcatgaacccaggaggcggagcttgcagtgagccgagattgcgccactgcactccagcctgggcaacagagcgagactctgtctcaaaaaaaaaaaaataataataatactgagtaagatggagcttacatggtgggattattaggagttgaagataaataatgcactagagtgaacaacctaattcctggcatgtagttagtaaatgagaggtttttggtttttttgttttgttttgttttgttttgctttgctttgctttgttttggtgatgtcgttattatcatgcttgaatgagcccatgactgaatcttgtatggactggagaagtgtttaggcagatgctgaattatcagtgtccatgaaatcagcgtctctcctaatgagagatgggggattggaggaaacgaatcgtaactcctttttcctttcctttcaatgtctttgtatattttattaaaagttgctaaaaaaaaaaaaccactttcaaaaacatcccatcacatgtcattgtagggaagcaaaaatgagaaaaacacttgatattttttcctctaaccattttatcggaactgaatcccgctttatttgctgaggctgcagtagtttattcattctatattgatcagactccagatttgcgtggacaacttaacttataacattttaagtaaaatcatgcattttaggcagacagacatctcactttttagtatatattccttcttctagaggattatttggtgtgtgtctgcgtgtgaccgtgtgtgtttattgaaaggaaacagttccgtgtttagagttttgggttgttagttagaggtctagttaagctataaaattacagtggaataagtgatgacagccagttagtacagttccctcttatagctgaactgagcttaacacaccaacagaaatgtttggcaaatagactgctaaaatgactctttcctttgtggggacataagttgcctgacatttacatgtttataatgagtcctggaagtagaaatgaaaatatgtgcagaaaatagatttctatcatcacttccttttcttattgagggtagcattgtccagtacgtttttgtcatctctgtgctttcttgttgtccacccatacaggaagaatgttggtgaaaagcacagaaaccagtgacgtttgtggctgtggaatttccatggagaaaagagagcatctgaacacctggaccatcttttgcacctggcagaccctctgcactcaccccagcgtgttctgtgaacttgagtgacaacgcgtgcttgcagggtgctttttggacgactggggaagaggtggggagggggtggtggggggaagcatggacgagaacatggagcaaatgttttacaacctgaacctcagaactgtgatcctccaaggagcgcgctacttgaagaaaagaaaaaaaaaaaaaaaaagtcgaatggcttctcagggattttgttttccgtgcacatataagccatagttacagtacaggtggcagtatttagagcactcagatttcagttctgttaaatgtgaaagagggatcgactgacgttcattgctgttccataactagtgtaaaatatgtatatgtttatctttatttttataatatgcaaatacatttaaatttatacagtttgaagcttctagcgttagttcacactgggtgcaatattctgcatgagaactgtgccaagatggggctgatttcttattttagtataagacttttttgttttttctttattctttaatcctcttcacattaaaaaaaaaaaatctctctgttagcccatggattaagtgttggttcatagagattgccaataatcagaaagaaccttaaatgtgcatttaagacagtgtcccttcccttcttttcaatgaaggtccctgcctatataaatcatctggcacgctggtgggaaatcctttgctcttccaacgtgttattagtgctgggcagagatggggcacactcaggggccaaagaggacaaaaagtccatgcaaaacttgagtcttttaatggcttaagataatcaggagtcagttctgaatcttacaaagtgctctgcttaataagtaccttacttagcagagcactttgcaaacatattacttattagcagagctctttgtagaccttccatatctggctgtcagatcttaaggttgtgaatttaggctccagttatattcactggagagcataatcccacacgggttatttataaatacagagcctctgattggacggtctcctgccaagaactagtaatacccttgttttaaaatcttcacaaggtaaaacttaaaaagccaaccaaacaaattgctctccattctacttttaattgggccaaacagcatatgctacagtagtaacatgtttttcggagagtgtaaaaaactctgtttacatttgcctcctccgtgggttgatcgaaaatgtataaaactgactgcttctcgccagcctcagacaagaagagtgagttgctggtactcgctactcttttacttcttttgtaaagtattgactcttggaaggctacagtatacaaagtctcaacatgttttttaaaagaaataaggagcaagcgactgccctgctagaaatcacaaaccgatttttgtagaatattttgtgccccaggcattaatttcactgactccagaacctgcagttcagagaatgatttcttatgatgataaaaatcgaatgggatcagacgatgtttgcatttttttaatacttgaataggacacctcaagtttgagatttcattttcttttagaacacagtcacaagattaatctggtgaatccttttgtcacagttctcgtgtgtgtgtgcgcgtctccgtgtgtgtgtgtgtgcatgtgtgtaaaactggtcacatttaattgctttttggaccattgaatagttgggaagtaagaattttttaattggcatgagacggttcctcaactgttaaattaaccaactttgacctgtctttagaaaaaggcttatttgtatgattttgggctaactccccggggaccatattaaatgacaaaaatgctcctttgggtgacacaccctacaaagtatttgctgttacgaacataaacgcccacattcttaatatctaatatttttgaccagtgatgttttatgctgtcatctgaaccctagagaagcagtgtcagaggaaaccttggtgtcacatgtgtcttagcaaaagggttaccatgatcgagggtcatgtgaccaaaagatgctccagagaagcttgagaatttgtttcaagttgggaggagggttggagatacaaaaatcactctcctctacaggactcttcagctgtctatgcaagaaattccgttttctctttcagcacctggaaagacacagcagcccaccgaggcgataggtgattcactaagcacaagaggaatgttttctaagcaaggcgtcccttgcctctcaaacaaatgccctccaagtttgttagggtttctattcctgcaacttgtggtatcaaaaccacttcctggaattgtcaaagcactgccaaaataaatgtttttcccccttctaagaaaaaaaaaatgacagtgctcatatttgacacttgtgtattggactctcttttgaatgaataaaaaggaaaaggggtttggtgtaattcctgatggggtgcgtgttgtttttcatgccatggtttgtgaattttaattgtggtttcccatttcgttgttgtaactgggcagaaattaaaaaagaaaaatcaataaaaatacaaagaaatggttaaa

SEQ ID NO: 276 - DNA, 203055 bp, Homo sapiens
  source 1..203055: mol_type = genomic DNA; note = NC_000009.12:134641789-134844843 COL5A1 [organism=Homo sapiens] [GeneID=1289] [chromosome=9]
gcgccgaaggcgaggtccgcactctccgtccccgcggctggcgcaggacctcactcgagcggagcgcccacggggagcgggtcgcggggcggcggcggcgaggaggaggcgagaaggagttggaggaggaggaggaggaggcgagggcgagctagcccagcggggtcccggccgccccgcgggccaaagtcgagccctcccgcccgtgggcgagcgcgccagccgccccttccagaacagccgccgccacaaagaagaacggggggtgccgaggtccccatgacctcctaaagtggtgcggtccctgctgagtgcgctgcccgggccgtgacccgcgcccctgtgcgtccccgcgcgcctccgagcgcccctgtgcgccccggcccgcgccccgccggcatggacgtccatacccgctggaaagcgcgcagcgcgctccgcccgggcgccccgctgctgcccccgctgctgctgctgctgctgtgggcgccgcctccgagccgcgcaggtaagggcgccccggggcgcggggctgcgggatggggcgcgcgcagcccgggcgccgctgtcatccccgggcgccttcgcccgcagaacttttcttccttggcctgtggaatgcacgggccaagaccacgaatgccatttgctgggggcccccccgagatgacgacacgcagacacaatgcccgcgggcgcgccgccgccccctccccagacgggcgggtcgggtggggctgtcgcgcgagccgaggaaggaccgagggctggatcagcaggaggggttgtccacgaggcgggcaaacttttgtcccaaaaaccttccttctctgtcccacatcacaggcgcccagcttgggccctcacagccctacagcagaacttcctctgctccaaaccgggcagggccgccccctagagttacagcccttcaaatcccgggactcctggggatggggggaatcccagaagcctgggcccccagcactgaacttcccccaggcactgtcactctaggctgagctggcgccctgctttccccagggacagcgtttcctgcagccttggtcacctaagtgttcgggggcactggggacccctgcagggtggtagacagccctgctcctaatcccacccccaaacttcttgatccctggaaggcagcttttcctggattcgctgctgagagatgggatgcgtggagcaaagccagagatgggcttgcaggcggggctgtgagtggttgggatgatatgcagatgtgggattccttctgccaagggtcagcccttagaaggaggcttgcttcccggggagggcgcttcaaggcggggactgtctgcgtccctgcctgggttctcgagggttcaactctccctggcgcagcttcctgacgggggagtttttctaggcatcgctcttggtagttagtggcggggtgggttttcacagactctcgaacatcagagcccccagccctggaaggtcccccgaatccttattgacaggcggggagatggaggctcagagctgtgtgctgccaggtcaggagaagtggcgggcagagcgatgggacggtgggctcagcgaacgtctggaccagcccgccgcctgccagcaagaatgcttctctctgcttcacgattggaagacaagtgggaagaatcattgtccgtgttccgcttgtcaattaaaacactcttttcctttttccctggcacgatcagtgcttgttgggctaactggatgagctggagtctgggtgtgggggctgccctggggctctgggggaggagccaggagcctggcctggctcccaggacctgggatctcatccctgggccgccaccaactctctcctgaccctgggctaactgggcttgtgtttctccaggggttagctgaaggtgggggacaacagaggtccccagaaaagtggagaggagaaggaaggtgtggtcagggactgtgccattgccgggggactaggccctgtctcagcgcctctggggacttttccccagaaactcaggagggagtccttcaggggaatcgtcaccctagacagctggggcagggcactgcctggggaccatgcaccggactgggcttggggttccatttccctccctgcccatctccccacctccacactgtctttttccctctctggttgccctcgctaatcgaagtgcggctcgttggaagtgggagtgaggatggcccagagcagcaggctatggagttggacattttgcttttgtcagaacagacttttagaagcatgtggagagaccacttttcttagtgagttttgccaacgtctctccacctcccagggtgggacctatttggaagtcatccttcgagcatggccagagggggcggctgtccactggagatgcaggcgctggggggagggggcggctgtccactggagatgcaggcgtggcggggagggggcggctgtccactggagatgcaggcgctggggggagggggcggctgtccactggagatgcaggcactgggggaagggggcggctgtccactggagatgcaggcgctggggggagggggcggctgtccactggagatgcaggcgctggggggagggggcggctgtccactggagatgcaggcgctggggggagggggcggctgtccactggagatgcaggcgtggcggggagggggcggctgtccactggagatgcaggcgctggggggagggggcggctgtccactggaaatgcaggcgtggcggggagggggcggctgtccactggagaggcaggcgcgggggggagccaccagcaagtgcctgctgtcttctccatcttcggatctgccagatgttttctgagggttttctgaacacagttcttttgcctgctttcttttggccaagtgtgtgaaggaatgaaaagtaagattgcatttggggctgctgaacagtgtaacggggaaggagagtatgggaaatgaaacatgaccccaatatttggaaattgaggtcatctcctctacacgccattggttgactccagtcacgtgattgctttttgcaataatttgtggggagagtcggccaagttttgtgagacttgacaggtatcaaatggttaaatttcctctgactcaatcaagttggctggaaagacatccttttccatcctctgccccctccctccctctccccataaaagagcagtgagtgggaggagctcagaagccccaagaattccccaagccctctccctgctgtggtccagatttgccggaggggttggagttttggttgctacccagggctgtgcccacccagcagtgcggcagccccaggcaggggcgtgctcccagtgccaggctcacagtggtttctccagtgatgttactcctgggctgctcctgcggggctggccagagcctgctcttcaccccgccctgcagatatttctggactccccaccgccacgcctcagccgaacacagctggtgctgcccgtcccgccctgccttctcgctgcctggcctgtctgcctgccctgcctcctccctggaccgccccatcccacctcctgggagatagaccttgataggtggagtaggggctgtgcagagcagtgagctgccccgctggagggcgaggatgagtccccaacacttcccgagggcacccacataggagcctgagccaagctgcatctggaacagtgcaggacctgtccctgctcggtcacgtgacgtggctctgggaatggccttgggagacaatcacacatgggaatggaggggctggcacttgcctggcctgtggtgagcatcagctgcaccatctcactgcaccctcacccgggcctgagaagggacagagcctaggagtcagggggcagggatgccaggcagatgtcttccattcctgctgtggggccctaagccagcaacggcccttcgcctggcatggtcactctttgacttgtcacagttccctcttctcacttcccatcggtttatcagctctccccggggagaaggccagggccctgagctatagtcctggcctgggggcccagtccaaacagggtcctgggagcagagccattccatttggccaacacagcttttaagttcctttctttctccttccccctccatccttccctccttccttctttcctccctctcttcctccctccctctctcccatccccttccttccttccctttgtccctccatcccttctctttttactccagtgccttcaagagggatgcagcagccacagtctccaccacttcccaggcctctctgcacatcagcataacctgcctggaccctgaaggcttttgccttttcacctgggtcgggcctatcttggggagaccgaggcaaatgggatgggacccctcgtttccttccaggagctcacagtctgacaggcagaccattgtgaattttactcagggccctccatgggatgtgctgggtcttgcatccgacagtctgggagggttaattgcactggggagagctggggagcttcctggaggaggtgatgtgaaactggccttccctccttctcttctccttccttttattgcagaaatgaccctccttcgtggggtcctcctccacctctggctttaatcttgctctcttccctccttctgacaggacattccacaccgtgtcccagagctctcctgggcggctcccttggctggaaagcccctcattcacgggcttggcaggtgctcccagtatctgtttgccaggagaatacaagtgcccctaagggaagtggcagatcctggcagcttccttaaccctttctctgcccccgttcctcctgtttccctttgacgagccctgctggcctggcacagtgagcccagtctgcacagctctgcagacagctccacagctgtggattaggatgtgggggcctctgggggtgattttgggtacctgtgctgggtgacaggtggtcggatgtgggaggggacattccttggcaatcagattactgaactccaggccagcaaggtcggtgtgaggctggagctgagtttccctgcctctgaggggctgtcggatgggctgggcgaggacaagtcactgcacctcagcttcccctcgtgaacatggggagaaccacatttcttgctttgaggcatggttgtgaagatcgattgaggccacacctgtgagaagctttgcaggctgcctgacctgtactcggcactggctgtgtggggacgttaccatcgcccccatcttcagtggtggttttgcaggaggaaagagcagtgttcccacagccctctttagctcccagaagcacaggcgagggaggtgtgcctgtgtggggcctggccctgctgagacccctggggctctgctgttgcccgcttagccggtctctgctgcccctttgccttccttggcctcggttctttgctttcccacggaacctcatggggtcattgtccaggccgtggggtgtgatgcatgtgaaaagctttagaagccaattccagggtttgcactcatgtgtgcgtttgtgtgtatgtgtgtcatgtgtgcgtgtgtgtgtgtgtgtgtcaggccgtgtgcacgtgtggacaatgtgtatatctccccgcgatctgcctgcacacatgtgtttgtgggtatacatgtgtgtttgagtgtgcacgcatgcgcatccttgcacatgtacctgcgttcacatgggtgtccctggctgactccacgtgcagggcctggtgtgtttgaggagctcgtggcagggcgacgtttctctccttaccgtgacccggccccagctggacgggagaggaggagatggcacgtggaacctgccggttgagcgtgaggctgtgggttctgccgcagggcaagccgggtccagctggatccgacaatttcatgtctttttaaactcccgggagggcgatgttacattatggctcccgcttctcctctatttacattctcccatataattgactcgtctgctctctctcagtgctttgccaagtgtcggttttaaagtttctggcctggctggtggatgtgcctcgatcctgcaggcggagcccacagcggcccttgtggtggttactactgagtgtcaatttgattggattgaaggatacaagtattaatcctgcgtgtgtctatgagagtgttgccaaaggagattaacatttgaatcagtgggctggggaaggcagacccaccgttaatcgggagggcacaatctaatcagccgctagcaggtgtagagcaggcagaaaaacatgaagagacgagactggcccagcctcccagcctacatctttctcctgtgctggacgcttcctgccctcgaacatcggactccaagttcttcaggtttgggactcggacttgctctccttgctgctcagcttgcagacagcctattgtggtgggaccttgtgattgtgtaagtcagtacttaataaactcctatatatatatatataatatatatatatatatttctattatttctattcctattagttctgtccctctaagggaaccctgactaatacagctctgctcataggcaggactgcaggactgcagccaccaggacatggcatagggaccagggtggcctgctggcaaaggacaggcagccggcaagactcctggattcctatcctggctccagtgtctaccagcagtgcattttcccaccctgtgcctcactttccccatctgtaagaagggggtggtgactgtaactacagtagggttttagtgatgtctaatgtattactcatataaagcacagagtaagaccccattactgcccttgccaccaggggccccagtgcagcaggaggctgtgaggtggtttggggccctctactcgctggcctgtgcgtgctcccttgccatcctgtgtggtgtcacactgctgcttccctcactgggtacgcaggagaaaaggtaaggcagtaagcaccagtggtcagttcagcggatcgctcgctgctcgctgcctctgaggctctgagcctgagccaggaaggtgcatccttgggcagtcgcgggccaggccaagttcagcccgcagagtggccctcccctgcctcctctggccacttgctctttacaaggaacggaggtccaggaggtggatggacctgtgcacctcccagctgcaggcctctgttctgtctctgtgatgtgatggcggtgagtggtggctgatcactgaaaggaggtgttccaggcaggggtgggtgaagttggtgcgggcggggtgtggggggggctttgccatctcagatgttgtttttgtgccagcccagccccaggccactggagagaagaccgtggaatgaatgaattggtggctggatgctcagtggaggggtgcgggtcactttgagttatccatgtcagatagtccgagccgtcacaccctcagcttcctatcagcagaggagtttttctggaggaatctcaaactaggtaataacctcatattagcagtaaatgtcaccatcctttgatgactcagacctaagaaatggaaccacagcctgacccacttttctcaaaatttaattactcagagctctggggacatgggctcagcctatttgccgagatgtctctgcccatgaaatggaagcttcctttattttctgtttcctagacccgtgttcttgtagggaaattagctcttctgtccttttcttccttgccaggacctcggcaatagggtttctggtggcctcttttttttctgtaaataaatgccacaaaatgacataaaaacagtgtggtgattcctcaaggatctagaaccagaaataccatttgacctggtgatcccattactgggtatatacccaaaggattataaatcatcctactataaagagaaatgcacacgtatgtttattgcggcactgttcacaatagcaaagacttgcaaccaacccaaatgcccatcaatgatagattggataaagaaaatatggcacatatacatcatggaatactatgcagccataaaaaaaggatagttcatgtcctttgcagggacatggatgaagctggaaatcatcattctcagcaaactaacacaagaacagaaaaccacaaacaccacatgttctcactcataagtgggagttgaacaatgagaacacacggacacagggaggggaacatcatgcaccagggcctgttggggggtggggggctaggggagggagagcattaggagaaatacctaatgtagatgacaggttaatgggtgcagcaaaccaccatggcatgtgtatacctgtgtaacaaacctgtgcgttctgtacatgtatcccagaacttaaagtataataaaaaaaatttttttaaatgtgtgtatgtagcaggagtgacttaagttgaaaaactctgacccttgcattgggaaacagtgatctcccagtgagaacacatgagcatcgtaaccgtcttccattggaagcgaccgtcttccattctgctggcgggtggcctgggggaccagcactctttcccgtgtgtgggtacagagggaacagatggggtccatatgcaaagacattgggtgtgtcagcaggtttgcttggcagcatttatggacccctaacatgagacggacctgtgcggggggcacaggtgagcgataggcgagccgtctgtgccctactgggtcttccgctgcggcgggggagtcagccatctgaacaggtggttttacccagtgaggtgcagtagaagtgggagtagggtgtggccaaggccagtctagggaggcacctgccagccccatggggcggtggccagtcagagaccagcctgcttctccagggccagccctttgggatgcatgcgcctgaaggcaggctcccattggtggatgcagagggcacgttcccgtgcatgttcttcctctggctcttgttcatattttcatatttacactggaccctgctctgagggtgctcccgtcagcacctgtgatcctcaaacccgcccttcgtgccaggtgggatcggcccattctgcagatgtgccagtctagctccttgagtccagctggcacaaggggatgaaaaccaccctccacgtcccagtggtcacacggcctgcatgttggtgcaggtccgtacagtcacatgcatggacgcaagcagcctctgtccattctcaaggccaggtgagggcggcgtggctccgctccctcctgtttgtttgctggcgccagcctccatggcagctgggtcccagtgcttcagaaggggagccatggccccaggcaacagtgcgtacctgaagcctctgcctcggtttcttcttcttcctttcagatgcataaaaatgcacatcaagcctgggcaccatctggtggcctctttattttttaaataaatgccataaaatgacataaaaacagtgtggcgattcctccaggatctagaaccagaaacaccatttgacccaacaataccattactgggcaccacctctacagaaatttcagaaacaattagccaggtgtggtggttcgtgcttgtggtcccagctacttgagaggctgaggtgggaggatcacttgagccagggaggctgaggctgcagtgagctgtgtttgtgccactgcactgtagcctgggtgacagagtgagaccctgtctaaaaaaaaatgaaaataaaaataaaaatgtacaccagagagcacggtggtctcagcttttccagctgtagtttcgtctttcttctggaggacagaggcccagccatctgcatcctcagcacacaattaggtcagtcactggggcctgttgtgggggtgacaggcaagcctgggtgtggggagagccggcccgttgcccatgggctctgcacagtgggtgggtgcaggtgcgatgacaggcgcgggacagaggggcccctggggggacttttctcgggtcctctgccttcccaccactgtgtccatcagggacattcccaggatctgtctttgctgctggttgtcttcccttgattttttgttttgttttctttctttggggatgatctgaaatcctcttcctgtgctatttctctgctcttcccctggggaaaggagagtgaggagaaagtgtcccgtgtccacgttcctgtggacgttccccttccttctttctaaggagggatggtgactcccagaggtattaaggaaaggagaaagtgacactgactcttctcagagcctttggctacagagtgttcccgcggtcgaggtggggtgaagggcgttctcgagggaagggtagggaacgatttctgactgcgattgtaagagctttctaggtaattattattcatgctatttagggtcataggtctcagtaatggtcgactaggtcaaaaagtactgcttgagcagtggagatactcagctgaaggttgagaacacacagggcgtccttgggccggtgtggcggtaacagtgagctggtgacagcaggcagacccagtgtaacacggctctgctgggtggggcaaggagatgccccaggtggagccatcgggagagggagagggggtgggagggcaggggagcgactgtcctgccagggatgccagtgtcatcctcctgcccctgaaacaggtggacatcatggcttctcagcccaggccatttggggacatgtggcaatgtctggagatgttttctgattgtcgcacctggggtgggggcagggctatcggcctgtagttgggggagtccgaggatgctgctctgcaccccacagtgcacgggacagcccccaccaaaaagactgacccagcccggaggctgcaggaatcgtgggatagaggaagcaaaggtgagattccgtggcctcaccccatggtcttctcatggctcattgtcagacaggagggagggcctcttcttaggccgggtccagcgtttctcctcatggtgtagaccagcagttcccaaactttaccaggccccagaatccccccgaggcctctcttaaggcacagattgtttctgactcaggaggccttgggtgggcccaggaaactgcatttctaacgaagtcagttcccagaccacgcggatgctggagcgtctgggggtgccacactttgcaaaccacgagtcgttctgcgtcctcgagcccagggtcttggatttcagcattaatggtggtcgtggggtggggagggcacctgccaggggagaagcgctggagagaagagaggagggtgtggctgttcctccacccatctcaggaacctcccgctttctttatggtggtccccgcttcacaaagcacccatggtgctgttcccctgcacacctggcagcggcactcactcatctccaaagcaaagaccccactatccggcaggtcttagggagcagggagaccctgggggtgggggtgagcttccagagaaggggtttcccatgggtttggccatgagattctgctgttgttgatgttcttattatgggaaggctcagacacagcgcagcaaaggtcgtgttctgcctggggccacagggaccagcccacagccaaccccgttccagccagaggccagcccacgcccccgcacccggtgattttgaagccagtccctgacatcagctgcgttcttcggtaactatttcggtctccgaaagaggaggacccctactccaaactcacctcagcttgctggccgtgtgccgtctgtgcgtctcccaagggcgcccccctcacccagacctcccctccatccgtactgtgctcggtccacaggaccaggctctgcagagccagggatctgtaggactgcaggtttatagggctggggatctgtagggccagggttctatagggatggtggtctgcagggctgggggtctttcaggcagggggctatagggctggggactctgcagggctgggggtgtctgcagggtcaggggtctctcaagctggggatctgtagggctgggggtgtgcagggccgggtgtctgtagggctgggagtctgtagggccaggcatctgtagggctggtgtctgtatggctgagggtgtgtagggctgggggtgtgtagggctggtgtatgtagggctggaggtgtgtagggctgagggtgtgtagggctggaagtgtatagggctggtgtgtgtagggctggaggtgtgtagggctggagttgtgtagagctggtgtgtgtagggctggaggtgtgcagggctgggtgtgtgtagggctgggggtgtgtaggactgggagtgtgtagggcttagggtgtgtagtgctgggggtgtgtagggctgggggtatgtagggctggaggtgtatagggctggaggtgtgtagggctggaggtttgtagagctggtgtgtgtagggctggaggtgtgtagggctgggggtgttttgggctgtaggtgtgtagggctggaggtgtgtagagctggtgtgtatagggctggaggagtgtagggctggggtgtgtgtagggctgggggtgtgtagggctgggagtgtgtagggctggggtgtatagtgctgagagtgtgtagggctggtgtgtgtagggctggaggtgtgtagggctggaggtgtgtagggctggtgtgtgtagggctggaggtgtgtagggctggagttgtgtagagctggtgtgtgtagggctggaggtgtgcagggctgggtgtgtgtagggctgggtgtgtgtagggctgggtgtgtgtagggctgggggtgtgtagggctgggagtgtgtagggctgagggtgtgtagggctgggggtgtgtagggctggaggtgtgtagggctggtgtgtgtagggctgtaggtgtgtagagctggtgtgtgtagggctgtaggtgtgtagggctgtagatgtgtagggctggggtgtgtgtagggctggtgtgtgtagggcttgtggtgtctagggctggggtgtgtagacctcgtgtgtgtttagggcggggtttgtagtgctggtggtgtgtggggctcgtgtgtgtagggctggaagtgtctagggctgggggtgtgtagggctgggggtgtgtagggctggtgtttgtagggctgggggtgtgtagggctgggggtgtgtagagctgggggagggtagggctggtgtgtgtagggctggaggtgtgtagggctgggggtgtgtagagctggtgtgtgtagggctgggggtgtgtagggctggtgtgtgtagggctggaggtgtgtagggctaggggtgtgtagggctggtgtgtgtagggctgggggtgtgtagggctggtgtgtgtagggctggaggtgtgtagggctggtgtgtgtataaggcaggggtttgtagggctggggttgtgttgggccgggcgtctgtagggctggtttatccgaatgcactgggtggccttgggctttagggcctgcacttttctgttttgtgcatcgatgtgggaggcagggtgagtccccacccgagggaggcggaggtggagctcagagaagcacagagccccgggaggcccccagccgggagggtggagggcggctgtgtcccatacctttagcctctcagctgggctgtgcagcgtcctcatgagcctgagctcagtgctgctaaggcagttcgtagcaccttcctgtgcctcagtttccccatctgtcaagtgggcatgagaataatacctgtctcacaggcatgctgagaggactcaggattcacatgtgtaaactgctaggaccaccacagctggctatggtcattactattactgtgtgtcccaggcatgccattggttcagaggtcacaggtggcccccatgaggtgacttgcaggagtctgctgagcccatggaattgagctgggcttgtgaaagtgccacaggagacaggaatgtgtgaccaggctggactcagcccgaaggctgtgggtgaggacccagagggtgccatgggtgctgtgcccaccaggctgtcctatggcacgtgggcttgtcagagcctctggcacctgcagcagggctcccctgtcctgccctccttgaatgtcctggcacagagggctggtaccaagacagcagctgcactgccattttgcagagggttggagttctctgggtctgtaaccctggcccggagttgcctggtgttttctgggattgactggaagcaaaggagggtgggcaggtccagcttcctgcagggtggggctttgcagggctcaccaccggatgccagaggatgccggagcttggagcctgggaccctcacagtggacaggtgcaggagccccggggccccaccttgcagcttcagattgagggtctgaggtggagcctggggcctgcggctcctcgtcctgcccgcccagtgcagcggcagtgaccagttgagggtactttgggaaactctgagcagaggagggtgggggcctgtgcctccctccagccctctgtccttctgcagagcctgtccctatcaccagctcacagtcacctcttggacttttgcaaagagagctcaggggatgaggagggaagcagtgattctcagggacaccgggagcttcggaggccgagagagcaggtttgaactcctggctgtgggatctccaacatgttacttaacctctctgatctgaggcagcttatctgcatatcagaggcaatagcaccacctacctggactggcagctgtgaggatctaaggaagcaatactggtgtggatgcaaagccctaggtgtgcccggtgtgcaggacatcgtcccgtgcagtgcaagcaccaggtgcactcgtggtattgataacgatgcctgctgcttttattgggatggtcgcagatggtatcatataattcttattagagatggctgttattttacatggctgttaatacggaggttgggaggcagtaattgtaacttttataaagtgtgaaagaaggactaaagctgctgtttgcagcttcaggcccagccagggacctcagaggatgctaaatggttggcacaaaagggccagaggttccaattggcagggcaaggggtgtacattatagataatatgggggacggggcagggggtgcactttatagataatatgggggggtgagacagggggtgcagtttatagataatatgggggacggggcagggggtgcactttatagataatatgggggggtgagacagggggtgcagtttatagataatatggggggtggggcagggggtgtagttaatagataatatgggggtcagggcgggggtgcagtttatagataatatgggggcagggtagggggtgtagtttatagataatatgggggttggggcagggggtgcagtttatagataatatgggggcagggtagggggtgtagtttatagataatataggggtcggggcagggggtgcaatttatagataatacaggggtggggtagaggggtgcagtttatagataatatgggggtggggtgtaggtgtagtttatagataatatgggggctggggtagggggtgaagtttatagataatatgggggtggggtgggggtgtagtttatagataatatgggggtggggtgggggtgtagtttatagataatatgggggtggggtgtaggtgtagtttatagataatatgggggtggggtgggagtgtagtttatagataatatgggggtggggtgggggtgtagtttatagataatatgggggtggtgtagggggtgtagtttatagataatatggagggtgggttgggggtgtagtttatagataatatggggggtggggtagggggtgcagtttatagataatatggggggtgagggctgtggaaccttcctctgtattcagttcccaggagcttctccagatgagtttcctttgcccgggggtgccaggcctgacggggaagggcagggggtgggacaggacctgcctggactcctggagaggactctgatgtcttctggggagggggcacagagtcagtggcctggcttatggcctgggggccgtttggcagatgaataagctcagacttagaaggtgtgggttcctggtgtcacaggctggtgaggagtggggagaccaggcctgggagtcctggcctgtcgggtgggcttcactgacgagggatgggccgggcacggagatgctgctggctatggcggactgcactcggagtcctgtcgctggggaaagcaaccctgcccgtctcttgccaccgtcaggggacggtgttcaaaactgggtcttttctcagcctcagtgggctggaggggtcccaggctttctaatgcaggggctttctgcccagggcaggctctgaggaccaatgttcaccctacaaccgtggtggtgggcagctcgcccctctgtgagcaggcagcacccacgctgggaggttctggaccccggcctccgcagcccataggtttcaccattaccctgaaaatctccttgctcaccagtgataaaggaaagcagctccgaagtgcagacacccgctccctctttctttccttttctggctgcccgggtctccagttctgctgggacagccctgggaggggcagcccaagccaagcctgcatgtgcccccgcccctgcacgtccccccgcccctgctgggcctgtccttgcacgccctgggccccttcacatgcatacgctcccacctccccttcctgcagctagggcctggccgattacaaacagctgcctagccctcaagcaggatttgcaggccccggagaggggctatagtccgagggcagtgtgggcctaaaggcatgtcgggggtcttaatggaagccgacgcccctcttgtaccctgcccggcttctgtcccctggagggtggcggggggtggggcaggcaccctgtggttgtgcggagagcagctgggaggctctggctccaggcctggaggggaggggctgctgggctccaggtgggctctggggtcctggccctcttcaaggtctctccggagcccggaaactgaaatgtcagttaaggtagaaattcacatgagacatacgagggaggggttcgctgagacttttctctgcaggtgaagagtaggactctctgggacttgtcttcttctgacctgaccccaagtgccttcacactgtgttttatcccgatggcctctgtgtaaggcaggaggtgtcatcccattttacaggtgagaagcaggctcagaggccctgcagctaggaagtggcagagttaggcctttaaaatagcctttgaggccgggtgtggtggctcaggcctgtaatcccagcactttgggaggctgaagcgggtggatcacaaggtcaggaatttgagactggccaatatggtgaaaccctgtctctactaaaaatacaaaaaacttagccgggcgtgatggtgcatgcctgtaatcccagctacttgggaggctgaggcaggagaattgcttgaacctgggcggcagaggttgcagtgagccgagatggcgccattgcactctagcctgagcgacagagactccatctcaaaacaataataataatcataatcataaaaaagcctttgagttgtgggcatttgattctgtccagctgcttgggaacatgcctgatatgagtccaggccttccgagagtgccaagtagccaaggaaggtggggttttggtccctatctgaaggacggttgcactttttttctttggggtcttcatccctgcagtaggcactgagagagaggagcaggaggaatgtgaagtccggtgaccccaccaacaaccctctgtcctccctgccctcctgcatcaccatggccctggtggcgggtctcaggagggagcggggccttttggatcctgtcactcagcagcctcttccaaagcccacagagccgtgggctccacaggcgccccgagtaccgtcctcgatgagatctgcggattagatctggagcctgtgcccagctgtgtgtgcactgtttgcttaagggggtgagctgccctggtctgagtcagtttttccattttagcgggaaggaaagagtgataggggaggattatcgccaggtaggtgctgcctgtttagtttcagccgacacacggccaaggagaaatggggcccagcaagccagatgctatagcagataaggcgcaggcgggccaggggtagaaatggaccagatgtttcaggaactgagctggaatagcatcacaaaacccctcctgggtcagggacctgggccacgatccacatctttaaaccatcagcatttcagaaaagaaaaatgcaaactctgagagaagcagtgccccaggcctgatttccaagtccaccctttatcctattagcagaacgatgtgttctatgtgccatgagagtcctcaggtttgccaaggaccaggctcaaaagagttttactcttggttttcacttaaaatggaccatgagtcctaaagaattgtcaaagtcctctgaagattcgctacctgggtaactcacctacgcctactgtatgccccagacagattctattaggaaaagttaggaagtttcaatttattagaaaccagtggaatagagatgctgctgcatatgtggtcttaggcatttctagtttcaggtcacctcagtagccagaattcactgtaaacagtggtaacccaaagccctagttcatgctcatgacatcaaagcctcaaacttcagtgtctagctagagaccagtggtgggagtggtgcccctggaggttaaggagggtattgcatcccagctctactagacattgtgaaaacctaggcttggcctgggttgtactagagtactcatggtgcgacctcaaaaccataactttcttctgtgcctcagtttcttcatgtgtaaaatggagctgatgatgtctctctacctcatagatttgtggtgagcatctaaggaggcacagtttagatctctatagaaacaggcaaggtctctttgagttcttcttgcatctcagagtgcctgccactgtgaggtgctcagtgaatggtcactgggttgaattgtgagtgctttgtaaactcagagggtgctgaccagcccagagaattgctatgttttgaagtagctctctgaagtggggtggagagcagatgttagaagctgtgaaccatgcacctgggttcttttaggggaggatggaaggtaccagaagagtgatctcagcttaccacacccaccactggctggcagaggtggggtatgctgggtttgctgaccccaaagaggctgggtgggagaggaagccgagagttgcctagggtggcctggggagtttggttggggaagtgtcggggacactattctcggtgctgcatccagggaagctgcccatcagccttccttggattgggatctttgggatcagggattcactaattgtcccacatctgacattaatctgggctcagccatgtgttgctgagcttcacacagctgtttgcaccaccccagatctttcaaggggtccccaagcagatgaccagtttgcagcagggcgtgtgtgtgaggtacaggagcctccagtcctgtgggcagatgctgacggatgggctgatggctcccagcaccaactgctttctgtcggtgactttcactccacccaccagtcctgtgaggtcagtacggttctcctgactctgtgaggacgtgcccagttgacttggccaatagggagcagagctgagacttggtggctctcttagacgccagtgtcccctctgtgctgcacccatacccccctccccatgcaaccctgcccagcccactgcatcttcctgagagttttcccagatgtcacccagcaccttcttagctgtaatctctccaggccctttcaacctaaatgtctttaattctgggatcaatcatctcaccctataaatgactcccaggagctcttccagctgtgctccagaattccttaagcagtgccaacctcgctgttcctccgaccgcttcttccctttccagcccttccctccagcggcttctgttctctaggatgctaaggcgagtcccaggatggcattcaactggacacggatgccagtgttgtgagtgctccatgctgaaagccgccttctctggggcggttactcacgcagaggcgggaacctgactctgtgcctgtctgttggcttccgtaatccagccctccctgtgctgagtttaagcccaaatgaaattactgggctctaagtatgtgcctttctccataaaatgtgatgcctggtcaatatcttggccaaaaaaaaaaaaaaaaaaaaattcctctgaaggagggtagtctggtctctttctagtcacttgtgaaaatatttcctgatctgatctctgcagtcgtgtacgcggccagcacataactgcccccaggcagggccctgacttccaggccgctcagggcagctaccctccctgggatatgtcaagctgagggcttcgcacattcttctctgacaactcagctggtttccagcccagtccggctgcctccttcttttccactttgactttcctaacagcctgggaagctctgaagcctgtgttttcaggcctgccggtgccagtggagctggcctaggcctccccagcacccttcctgacccctacgtagatgcccagtgctgcctgccaaggactttgaatctctccagtggggacattccgcgctccttgggtgatgggaggctgagggtagaagtgagggttgatttaagagagcagcccagatggaagggcctctgggggttgttctccaccctcatgctctgcagcccatatctctcctctgatctctctcccggcctcagctttcacagctctagagtgaggtggggacatggacggctgccagcttggatggggacgggctaactcgcatgaaaccctctgggctgcaaagcgatgctctgaatctgttgttaattacatcttcctcgggccgcaagttctgcaccagagttggtcactctaaacctggggctgttagctatagtagaacctcatctgcctcgttagcagagaccgatgagtgtttgctgcacagctactgcctgctctgtgagcctccatgtttggaaatttactaaaaatactgcctttgcattcaactcgccacacatttctgtgagcatgtacgatgtcaaaggccctgtgggtggctttgctgagggggtggttgaagagaccatgttctcaaaatgaagttcgacgtttcctgaacaactgttctctgcacgttgctgtgctgggtgcatccatcggacgcagcccctatctggaaggagggccgtgtgggccaagaaagaagagaggatgcctggcctgacctgggctggccctgaggctttgaacacctgggctcctcatcctggagtcagtgtgtggtggccgggggcctgtcccagaacgtagcacacttctcctctctgctgtccccatactgtcctgatagcctaagagggtgaagggctggggctgggggagggagtgtggcccaggtgttcagaggcctcgggagtctgctggggaggtgcaaggaggccgccctggccaacctggcagggctgggaggccatgggcacttgaggggggaggataaatgtcacttgagcattttcctcctcctccagttccttctttaatatctatttttaatgaaaataatacatttcattatagtcattttggaaaacaccaaaaagtataaagaagaaaataaaaatgactgtaaacccagattctcccaaacccagattatgaatacagagaagaaagtacagagggaaatgcgttgtggtggcggatggggaacgcctagaccatccctaggcctctgccctgaggacttggacttggactttgtcatgccacattagagtgcaggcattctctttcattcacgacagctgtcaaaagtctaatttaaagtgtcgcctattggatattggggtggctccccctttttgatactgcaagggcaggggtgttgaggaagcttgctgtggcgggtcaccagagctgccaccaccggagggtgctagaggccttcttgggctctccagggggaagggaacatcttgggggtgctgggcaagcagcagaccccctgcccaccctcgggaatcagtcagctggtgggaaggcagagcttttgccctttaaagccagggcactggcagaaatgtagggtttggtaaagacagcctgtcatgttggctgggaaagacaggattcatcattgaactgggctagagtgttgcagaatccgtctgggaaaaaaagattggatcctgccctactcttctaccaaaatgcattccagatggatctgagatgcgaactttaaaaatgaaaccataaaactactagaagaaaacatgggaggccaggttttacagtcttgggatgggaagcttttccgagtatgacgtaagcccctgcagttataaaagaaaacagtttgaccccataaaagtcaagattttctatctggccaaaagaaaagcaaaaaaacaactggtcaccgtaagaagagaatctacacctatctgacggaaagggggtcgacctgcaaggaactcccactgatcagtcagaaaagtccagcaaacaaacaccaagatggccgacacacatggcaagttctcaggaaggaaaatacaggtgacttttaaacatgtgagaagatgttagactttactcacaaggagagaatggaggtgaatccccagggagaggcactgctccctcggccagatggacagagaacagaagctgagagtctgtgacactggctcctgtgaggggcagtgggtgttcccatggtgccttctctgaaaggcatttggcaatatctatccaagcattaaaacacatgtacttggccgggcatggtggctcatgcctatatttccagcactttgggaggctgaggagggtggatcaactgagcccaggagttcgagaccagcctggccaacatgatgaaactccatctctactaaaaatacaaaaactagagctgggcacggtggctcacgcctgtaattccagcactttgggaggctgaggcagacagatcacttgaggtcaggagttcgagaccagcctggccaacatggtggaaccctgtctctgctgaaaatacaaaaattagccaggtgtggtggcgggcgtctgtaatcccagctgctcaggaggctgaggcaggagaatcacgtgaaccctggagacggaggttgcagtgagccgagatcatgccactgcactccagcctgggcgacagagagagactccgtctcaaaacaaacaaacaagcaaacaaaaacacacatactctttgaccagcatctccagttcccagaatgtttcctgcagatatacgtgtgtgtggagaaccgctgtgcagcactgtctggaagggcgagagccgtttaggtgggttaccatgcagaacaaaacaagcacagcagctaagaagatgaagttttcatttgctgaggtacaccaatctccaagatatgttaagtaaagcaaagcagaatgaagaatgttcgtcgtaatggatccatctctactcaaagaaaagacacacaaatctaggcttgtctatgattattgaaaagggatgcatacaaattgggactcgtgtgtagtttctgtagagtggacggctgggtgcacaggctgcaggtctctcctgaatcttttgaaaggggttgaatgcgttgttgttcagcaggtgggtctttggaaggtggacagttgtgtgtgcacaacacagagcagggacagggacgtggggctggcggctctgggagctgagaacctttccagcaagcaagcagctggcctttggctgaaatgacttagtcaattaaaacaacttgtggtcttaaaaaataaaaaggccaggcatggtggttcacgcctctaatcccagcactttgggaggccaaggcaggtggatcacctgaggtcaggagttcaagaccagcctgaccaatatagtgaaaccccgtctctactaaaaatacaaaaactagctggtgtggtggcacatgcctgtggtcccagctacttgggaggctgagacaggagaatcgcttgaacccgggaggcggaggttgcagtgagccgagatcgcgccactgcactccagcctgggtgacagagcgagactccatctcgaaataaaataaaataaaaataaaaaaaggacaaagacaggaaacaagatcaacccaggcagaggctggattgactatatatgatcactcagtaatgctccgaaaataggagtgtgcccctgtagatgctcagaactgaaactgtcgttgccatccttcatccactcattttacaggtggggaacctgaggctggtacctacctctcctggtgtcacttagtaaactgggggcagagaaactggcacggggtccctgggctcagcacaggctcctggggccattctgctcaggcccatggccttcttctctggagagtggcttttggcctcaggcgagtctgtccagaaaggagaattctcttcttggggaggctctgggccttgggtgtcagtgggcatgagcaggcttcaggggactcgttctcaaaggcacacaggttgggctggccagggacagtcccagcctggcatgcgtcttcctcttctctctcctggatgactgagagctcgtgaaggtcaaggcctttgcctctcttgtttggcctcagggtggggtaagctagtttgtcctttctctaccagggggctccctcactgggggtgcctggaggatggagtgtggctagcccatcgtgacccttttcttctgccagcgggtatggggacacaaacctgggctggccttgattcagcactgagtctgtgagatttgggggagtagactctttgggactcagtttcttcacctgtgcgatagggtaaaacattttggtccttcattaaattcactattttcttctttcacggtatacatgttgagctgcctttgcaaaataactcacatctcctcgaggatggggatgacatgaccccagtgctgatgacagggtgatgacacataaccattttttgattacttcctgtgggtctggcattgatctctagacattatgtttcagtcatcgggcataatgacgagcttgttttagaaaagaggaacatgaaggaaattgccaggaaccatacgactgagagctgggaccttggatctagctgcttatggtgactttcccagcacagaacttctgtgggctcagtgcctgtcctgttatttgatgttcacccgtggaatggatgcacacacattgtaccttattcacaattggcagcatcctggccatgcatggcacctgtccctagcctatctggtgggcactggaggtttggaaatgcctccaggccctctcaggatcagtggctgtggaacgctgaccaccagggccttcttcagggagtcagagggacaaaggatgtgacagcatttgcagtgggatgggctctgtttggtcactggtgctcagcagttgatggcttggaagtggtgtggccggtgacctccagccctgccagcaccaccccacaccctggtgctcacttgtcactcataactgcaccatctccatgcactgccccactagggcctcaccttggtgtccagcagcagggccacctgctgtcgctaggcttatctctttccacatcacaggtatccttgcagtcttcctttctggctgattctctgcttagaggtgccccacctcccaggaagccagcccagacacaagatttgaaggtccttcacctggaagtcctcaggcacagacagtcatgggagggggtgacaagtgcctgactctaggacagggggctctgtggagcaatagggatccgttcatcctagaaaaggagctgaaatccctcacttcctagggcgttttgtgtcttgtttctatgcagtccctgctggaacatgacatttcccccaaacttcagcctctgctcttcctaccaggtaggctgagctggtctgttgtgttggaacacagagctgtgaggggtgggaaggagttgagacctgctcatccaccttttcagctgacagtgttgtggatgtaccaggcactttgggtcagtcatagccccaaatgtcagaagcaaaaaggtgaagtgtggtccctgctctcgagtcctgtgtcctgctgggattggacaatcagaagatcttgtgatccatgtggaattgctatcctgtaggccagaatgatcaaacattggccatttcacatggttcaatctaatgctataagaataaacacataggatggccactgatccagcatgaggcttaaggagccctttcagaggtagcaatgtctaagatgaggtctaggagatgaataggaattcaccaagagtgggagtcgggggaagaggaggattccaggtctgaggaacagaatgtgcaaacgcctgatcactgtgtgatcttggtctttgcgtgaggcatttagcttggctatcactcaacaccaggtagggtagcaggagagaacagcaagaaattgggtgccttaaatttagtttaaatcagcaaaggtgtattggtgtctttacccacccattcatccatcaatgcatccatccatccatctatctacttgtccatccataccattaatctacccatatatccatgtatataccaacccatccatctaaactataaatccatccaatcagacacccactcacccatccatccaactgttcttccatccgttcacctgtgcatccatatcattaatctacccatccatctgtccacccatttgtccatactccatgtgtccatatactcatgtacccattcactgttcatccacctgtccacccacctattcattcaaccaaccatccaactgtccttccatctatgtatccattcatccatccatctacccattcatccatcaatccatccatccatccttctgcccatccaatcatccatccttccacccacccacccatccatccatccatccatccatccatccatccacccacccacccactcacccaaccatccatcccatttatccatttactcacctatccattcatctactcatccttccatccatccatccacccatcctttcacccattgatccagaccatatatctattcaatcacccacccatccaccctcccttccacctactcttccttccttccctccctccttttccctttcacttttcctttccctttccctttccttttcccttcccttcccttccctttccttcccttcccttcccttcccttcccttcccttcccttcccttcccttcccttccctcccctcccctcccctccccttcccttctccttccttccttccttccttctttccatcccttcttccatccattcatctacacatccattcatccatccatccacttatccacccatccattcatctgtccatgattttgtcatagcactgggctgcctcctctaccatagcgattggcatttttgtgttagggtggtttacgaccatctcagacttccactgtctacactaggcggccaggagtggctaacttactagtttctgcagtgctttgaatggtaccagatacaactagattctcaagctgttttgttggcttgaactgagagacaagagaaatccagttgcagcagcagccgacggtacagtcagaatcatcatgaggtgctgagtgctttttaagagttatgagaggaggcagcctaccacgccggaggaagtggggatgtggaagtaaccctggctctccgcagaggtggggtgtggatgggaggggagaagtgaggagagcattcctgttgacagtaagacataagacaactccatggtgggaactgagaactgggaatttaaagtccacatgttcctggatattggcttatagattcagagacgcaactcattctccaaataactttgttaacttttcttgactctaaaaggaacgcatactcattatagtacatttgggaaatatcaaaatgactttattttcctttcctcacattttttctttgcatggttgaactcatgtgcagaaacggtgttgtgccctgcacttagacacagagattttctgatgtcattatcagctctttgtaaatatctcaacggctgctgaacattccaccgcatgtttgtatcatagttttcttaactgttcctctcatgttgggtttgggttgtttccaatcgtttgctgttataaatgacacttggatgaacatctttctgataaatcctttctgtctctctgattatttccttagggcggattcttagacattgactcactgcatccaagcatagggacattttaaagcctttttattgcagaattacattccaaccaacaggcagttgtcacctgagcaactgtgccccaggcagtgttatccttaggtgttaaacccaggtggaccccatgtccgagaactggggctgctcacccatgctaagccagttacttccccctctctgctcctagagaggcagtggggagctgtgatttaatgcttgggccctggtgtgattgtttcctgggcctgtggcacgtcttggagacccttttaggcaagcccccgggtcgttgtctggaggatggagcagcacttcctgctccacaggctgtcccgagaagctgaattactcttaagagtggaaactcacatgcatgtagagctttagacctctcctcccattgagtcagaaaatgtaagggaatcttctagaacccagcagacattcactagatgctcattactttcccctccttccctccctttctctggccatctgtgtgctgagtccccactgcggtgatggagtggacagctctgtctgtgtgggggttctgctgacttgcgggtcttctccccacctggtggctgcactaaacgcatgtgcctgggcctgccttccacactgaaataccacaaggccgggagggagctgatgtctggaggtggctggtagagaggtgggcctgggctgctgtgaggagacgtgaagtcggggcctgctgcagctttggggccgcagcctgactcagtcgtctggggcagcaggttggattcttgcagatggattttttcagtgtgaaaatgagctccatgtggccccacacacttgtgcttcacccacttctgggagggcagacggagctgttcagacagctcctgcgcatgagacacctggagagcccccagctgcccaccgcggaggggaccttgaagcttggctccattaacccactgggtgtgcagactcacaggggaacgtcagctccaagtcctgcccccagtgcaccaatgtgtggtgcatcctttgttgcgtctctgggatctcgcacagtacagttatgtgttcattcagggcccatgtagctggttttgagtccatttctagtgttttgaaaacttgcaaagctctcgtaattgaaaaatgcctctggtcccggggaagtaatgtaaaatattcctcccaaaggtcacagtgacccaccacaatgttcctttacttgcatcaaagaactgaataaaataatttcagagctgagtcagcagagccagagaggaaccccactgggctcacccgcagctctaaagtggctcccctcggatgggtgtgaggaaccacacatctggacgagtgcgtgaagggttgagtggacagagaggggctttcatttgtaactggaagtgtattccttttagcttcctctatcacgttgtctgttttgcagcatttaataggtgctaaaccatctcccggggccaatttccttgtatttctaaatctgcccgttgtaatgaaaccgtaaaggcaagtgctgtccgatgccagggctggggaagaacaatgagccaacaggcgcgtttgtcttttgtccacattccacagttttgtctgaaagggcaagtgcaagctgcacttgggcctgaccaagggccctgtgaggacacttggtgtgggggggcccacttcaaatgtcacactcctgggaagtggagacattcctgagaagtgcaaatgcagttttgttttataaaggccagttaaaaattgcccattatcaaggcaaaggccaaagatccatgactgtcttgcagcttcagttagatatggagagatgttaaatatctatgtacttaattatgtaatgcaatttcctgctagatgccaattggcatttattattccattcatttgttataaaagcaatatgtgtccatgatagaagtgttaaaagctaccaaaaagtataaaaaagaagatgaaaatgagtcataatgtcttatttgtttaaaccattatgatggtgatggtgatgattatgatgatgttaatgatgttggtttctattaagtataaccaaacacattactaaaggaacattttgatgtatttactttctactatttgttccatgcctgtatttgcaaaattgggattacatactactttgtagtagttttaaacttaaaacatgatgagcaaatctcaataaattaggaataaaagagaagcccctcaatttgataaaggacattcatgtaaaatccacatactaaatgctttcaccctaagatcaggaacaaggcaggaacgtctgctcgtatcacacctattaacattgtatggagatcctagctggtgaaataaggtaagaaaataaaataagaggcatattgattggaaaggatgaagtaaaactgtctttatttgcagatcacattagtgactatgtgaaaaaaattctaaggaatctacaaaataacttctagaactaaaaagtttagcatggcgacagaatacaaagtcaatttacaaaaattcattgtatttctagatactagcaatgaacagttagaaacaggaatttaaaaagctgttacaacaatattaaaaatataaaatacttagagatatatctaatgaaaatatgcatgacttattcactgatgattacaaaatattgcatagataaatcaacgaagatcttaagatttaaatgcaaagatataccattctcatggaccagaagactcaatattgttaagatattattccacctcgacttgatctatagattcaattcaatgtcaattaaaatcccagcaggctttttaaaaatagagattgataagatgattctgaaatttatgtggggatgcaaaggacctaatataaccaaaacaattttgaaaaagaagaacatcggagggcttatgctttgtgattttgagacttgctctaaagctatagtgatgaagacagtgtagtgttgacagaaagacatatagaccaatggaatagaatcaagtccagaaatagactcacatgtaaataatcttttggttttccataaaagtgctaagatgctgcagtgagccgagatcacgccactgcactccagcctgggcaatatggcgagactccatctcaaaaaaaaaaaaaaaaatgctaagatacaatggtgctgaaacaactggatatctatttgcaatagaataagccatgacccttacctcaaataatatacaaaaattaagatgggtcatgtatttaaaggtaagatttaaaacttttataaagcataagacaaaagagaaaatcttgagtttttttaccttgagttaggcaaagatttcttagataggaaacaaaactatgagccattaaaagattaaaaagctgataaatcagactttattaaaacaacaccttatacttttcaaaagacactgttggaaaatggaaaggtaataagattggaagaaaatgtttataaaacacatatctgataaagaacttatgtctaaaatgcataaaacatggtcacaactccacagcatggaggcaaatgaccccacttaaaactgggcagaagattcagacaaatgttccagaaaagaagacagaggcgtgccaacatgcatctgaaaagatgtttgtcagggttagtcattggagaaatacaacttaaaaccataaggacatactgcaaaagtgtgagtgaggatgtggaaaaactatcacccattcttggtggggatgcaaaggggtgcaaccactttggaaaacagtttggctgtgttttataagattagcccttcctttaccacaggacaaagtaattccatgtataggcattcatccaagagaaatgaaacatgcgtccatacagagacatgtatgtgagcactcatgtgctgtgttattgcaatagcctcaagcagggagcagcccaagtgcccacctggtacggggacaaacaagcgggaatactgcttggcaacagaaggcatgagtgcccgaacagggtggcacgaaagcactgtgctaagcgagagaagcagacacgaaagacgcaggggacacggttccatttatatgacatttgagaaaaggcagaactgcagggacagaaaaaagatgagtgaggagagagacataagggaactcctgggggtgatggacatgttgtgtatcttgatagtgtgtgtgtgtgttggatgagggtgtggagggtacagcactatccatttgtccaaactcattcaactgcacacttacaaagaatgaatttggctggtgcgatgactcacgcctgtaatcccagcactttgggaggccgaggtgggtggatcacctgaggtcaggagttcgagaccagcctagccaacgtggcaaaaccctgtctctacgaaaaatacaaaagttagctgggtatagtggcgcatgtaatccagctatttgggaagctgaggcaggagaatcgcttgaacctgggaggtggaggttgcagtgagctgagatggcgccactgcaccccagcctgggtaacagaatgagactccatctcaaaaaaaagaaaaagaatgaattttactgcatataaattatacctccatgaacctgacttaagccacaaatgccttgagcatttcctcacgtttcaatattcccttattaatactaataattattaataaatgaaataaatggtaatattaatgtaacattaaggcacagatgagtggctatggtattctgttggttgtacagagtgtactgtgatatgtgcagtcctctccagttgggacatctgctttctttctatgttttttcagtattgcatgtaattgttgggtgagcgttttgattaagcatttgtattcatctcaaattcagtgttaaactcccataggagcataaagagaatgaatgtccctcagactttcagtactaagtgtcaaactgtttcctgagaggtgtcaatttagactcctgtgggtactgaatgagaatttgcatccttgccaaaaattggtcacttaaaaaaaaatttgtgccagtttgatgggagacaaagtcctcttgatttaatttgtatttagctactagtaacatcgaatgttatttatttgttcccccctttttctagttgcaagaacatctcctgtgtatttctgttgtacacatcttgttgtttattgcctgttcttttttgttgttgttgtggttctctattgctgcggaacaatcacttcaatacctggtggcttaatagcatcctcttattttgtgtgtgaatctgcgttttgagcacggtttgttggggaccctttgtgtgctccacatgacttcaggttgagtggcttgtttggggctgggggatccatttctagatggcttttccacatgtgtggtgttgatcctggctgttggctgagggcctggggttctcttcacatggagccctccaaggggctgcttgagcttccccacagcatggtgtcttggtcctaagaaggagcattccaagagacatgggagtagagtctcccagtttcttaaagcctagacttgtgagccagcagtgttgcttccatcacgatctatcagtcaggtggccacaaagcccaccttgatttaagggaggggacatagaccccaccccttgatgggctgttatgttagatactttgtggccattttgaaacttccacactttaaaaattttgttttggcattttttttttgttaacaaaattatgccagttgtatgtggctaagtatttacacaatttttatgaagtggagggatatagagaatgataagcagaccttccccttcactgctccaccaaacctcagcccctttccagaagtaacccctcaactctctgatcggtattgttctggacttactggtgtgtgtatttgcatggtgttttatcagatgacattgccatcttttacttattttaagatgaaagggattgtgctttataaggatttccatggcttaaggacatgttgggccatctctccatctcaggccgtctgcatgaaccccttcctgtctggcctctgcagcatatttggcaaatgcagctttgttgatttaaccagttcccgattgatgggcatgtgctttgttttcagttctttgctgctgtgagcaagccttggatgtcctggcacagagcaagcctttctgtaggattcagccctaaaggggggcatggcaggtcaatgcatgtgtacatctgcattgagatcctgcaaaattgctgctcccgaaaggctccttcttccactggcattcgtcttggagccacgaatgcacagttcctttgtttgttcattggttgatttgttcatttagtccctcctttatttgctggtgggggtggtgcttcattgttcacttattgtcccttagttggtttgttcatttgttccttcatttgctctttggttgggtcattcctgcatttgttcactggttggtttgatcatctgttgattggttcctttggttattttttcctttgtttgctcattggctggcttcctccttcttccttcctttgagcgctgtaccaagcatctgctctgagctaagctctcttctctgctgtggattaagggcaagacttgtcccttccctaaaggagctcacggtctgggaaatagcaagtcccttggagcacctgctgccagtcctgggcttggggaggccatggagtgctctggttgtggtttgctggggagacacagaagaggcagggacaccaggaagcggcggtccatcccctcgtgattggtggcagggcctctcatcttccttgagcttcatgaaggaacagtgtctctgctggatgctaccttgaatattcagaataacttacttgagagtgggaagcctgaaagtccagcctttttatccagatctcagctaccagtcatggcttctcggggaaggcaggccctggtattacacctcctttcctgcaggggaaaaggctcagggtggtggagctgcccttggttctcaggtacatccttgtgctgggttccactgagcatttcaggacagcaggagaggtttctcactgccttctaaatcccgaatctgcccacacaggcaggaatccagtgcatccagtagagagaggccatgtgcaaatgctcaggttcgtggagccaggctcttgcccctgatgctgaaatgataggagggtgaggtttatcagcgggatcttcggggtgatgacattccttcccccatcactccttggcacagccacccttcatccagccgtccctggggccattcttcaagcgcccttttccatcctgtagtgagccatctgtctatatccatccctccatcctttctcagtccggccatcttactccctgttcctccttcatctcttcacgtgtctgtgtgtctgtccttgagtgagtgcccagctgcagtgtgtggttgagacagtggatgcgggaggactgtgaataggctgctttctccacagctgcctggaacgccccatggcatggttccacgggaggggcatcttctgcctggcccttgttccaccgctgggggtctcaagattctctgtcgccccatagcttgggtatggagggcctcctctccatgcaaggcctcctatggtcctgaacatcctgtgaagaacaattccgctcttcctcggattgagcctcgctctgccctcatcatggccccagtgctctccccagcgtcactccctccgcagcagggtatctgcaggggtcttggaggcattctcccagcttgcagccccatggtgcagaggaaagattttggacccaaatggatgctgtctgaaactcaggtggtctgtatctctggtggtctgtggctctgaagccatgggcagcttgctctacctctctcacgctgagtttcctcatgtaccagtgaaggggccgacactgtgggccaagttgatgaataagggaagtgtggcagctgggcgcagagcacataacaggtgcacagtcctcagctgcccctcccccatggtgctcgggtgcatggatggtgcccagggtccagtcccccaacaacaggctcattgcagtggcctgccgccccggtgtgtgtccctgactcaggggtcccatcggcaggtgtgttggctggtgccagccccgggaagctgtctgcatccctgcagggcaagcacctgcttctcaccacctgctgctcctccatggtctcttcagagcctgtttttatcctggctgctgtcattcctgagctgatgtgcactcctgcagtgagcgacagagacccccatttccttccctgtggctgggcagctggaccacccaggatgacagcccaagtgatccaccaggactctcgcagtgcagacaaaatgaaactggccctcgctggaggaacgggtgggccgggccctgggtgaaggggctggagctaaatgccgttggaactgggtggcccctgaagtgtctgctttttgccaaggcagagcctgggaagagggagcagggatcaggctggttggtgttaccccctgctggggggcaggcgttagatctgtgcagggtgaggctccgaggcttgctgggtcagtcccattcagtggctctgtgttggggtcacgtggtatctgccctctgttatccgagatgcctttcaggccttcagttctcatcaattctcagttcatttggagcctcctcttcactacttgacacccttaaagtgataccctgccatcagcgctgggaaactgatcatccttttcttcctttcgctctctgggcctccttgtcttgtgtcttgtgtggaaagagcagtctccgaggccctaacctaccaccccgcagtccctccccgatctgtcccctgcactgtggggctggctagggggcactgccgggctggttagggggcactgccgggctggttgggggtactgtggggctggctagggggcactgcagggcttattagggggcactgcagagctagttgggggcactgcggggctggttagggggcactgtggggcttcttagggggcactgtggggctggttgggggcactgtggggctggttgggggcactgcggggcttcttagggggcactgtggggctggttaggggcactgtggggctggttgggggcactgcagggctggttgggggcactgcggggcttcttagggggcactgtggggctggctaggggcactgtggggctggttgggcactgcggggctggttgggggcactgcggggcttcttagggggcactgcggggctggttgggggcactgcggggcttcttggggcactgcggggctggttagggggcactgcagagctggttacggggcactgtggggcttcttaaggggcactgtggggctggttgggggcactgcggaggtgccccggtgctctccggtggtcagatctcaggctcctgccagccagtcccctcgcgaggccccactgccaatatgtccctcttacagataatgacaggcagcctctgggatgggacccactttgcccaggaccatggggcttgtacatggggggtttaggatccaagtcagtccaccccgggagtggggtggtgccgggtcaggtgggcctgtgcctgtggggagggtggtctagtgtcagacacagatgagccatagatcctttgcacagagaatctcataataagcaatgcagtgagagcagtgacactgtcatcttcaggaaggactaccccggaggccctttggacgggcccttcattcttcagcaaggaatgatgagctgggagccatgaacaagcgcagtgcctctgggtacctcagagcccactcagggcagccatccaggcgaaggttaacatagagcctccaggcccggctacaggccattttctcaccctgtgaaacactgcgggtcggtgcacaggtgtctggatgtggacttagctcagtcctgaaggctctgttgacagacaagctgggcaggtgggcagagtcatttttacaaaggttggtggcatggaggggtggggacagcaggccccttccaggtgcgagctccctgcccggcacacctgtacctgttcctccatgacccatggctgaggacaccaacctggtccccgctgtggagggcggagctggcatcctgactagccctggtcagttccaaactgctgctctctgctgtaccatgtccggtgaggtcctgaagtgcaaaaggccttgaggtggggccccaggggcttggggagggtggccatgctgtgcactgcacaaccccagggagcgctgttctaatgcaccatgatggggtcttgcaggacggtgacactggtgaggagatggacctgtgacagccagggcctcccgggaaaattccacaggggcagaaggacgggtgagggccgggactttgacatcaggcagaggagttggacgttgatgggagcttttaggtgggtgcatggaacctgctttggcgaagtggcagtgagcgcagggacaggctgggagtttgggctcaggtctccaggtctccgcctggcactgcagcctcggggggcagcgggagaggccgggccatctgccatcctcccaggatggtgtcctcggcctgtgctgcagccccaggccctctgtgcatttcccaccccctgcccctttgctttgctccctggtttagtcattgaggaagaatttcagtcgcagcctccagagcgcctctgtttttcgacctgctgggttgacctcactgatgaggccgcctgccttgcagggagggctggggtgggggggcctcagccctgggccagaccctccctggtggctcgatggctcggccctcagcccggcccttcaagaactgtggctctctggcttccaggaaatacaggaagggaactaggagggacagccgcccttccccggctctgcagggccctttacaaacagagcaaattgatggcttcgtgaacaatttctgcgagcatctgcgggtgccgggctgtgcggggcccctgccctcctgcagttcacagcccgtggaggagacacacgctgcccatggaacacacatagcagggatatggttccagtgatggggccacgggtgggaccggaatggaggctgccagctgtgtctggagaggccagcgtgtgcctgtggtttcgggagcctgtcactggctccagagtggaatagcgcttgggactggggtggactgggcactgagggtgactcccttgcagccccagcatggcaccagcctgcgagtgaccatgctcacctgccctgtacctcgattcctctttcccaatgaaggctcttagcccagatgctatttatgactcctggctctaaaattagagttctagcccgagaattgtgaagacctcaagcttggggttatttagagactctcaagtttttcttgaagttaaggatattgactttggggcctgcagaaacctcccctctcttcctcgctcttcctctctttctctctctgtctctccctctctctttctgtctgtgtagctctctctctctccctctctctccccatctctccctccctctctctctctcttgctctctgtctgtccccacagctgccttccccgaacccctgatccccagctcattctatcaagtccaccctggtcccttggctgtgcaggccacagacatttggcaggacgtggcctgggctcagtgtctgggaccgtggtgctgagtgtttggcggtgacctctggaggacgggccggggagctttaagggccaggcagaaatgctgccctgttcgggctgggggctggactgggtgtccccagagccgacagcactattcggctgggtgccagggacccagcctagtgcctcgccttcccccagccatgctgcctggaggccgggtcctgagcggagcactctgtacctgtgtcacccaagagctgcggcttcctttagccaccacagcgggcatggggaggggactgtgcgggtgaacatggggcagagagatcgggctgggccagcacacttccccagagaccctgaccccaggaccgacggagccagcccagtgccagggacagagttggaaataaccttctaatgagataaggagataaagatgatactagaatcctaccacactgcctggtggggtgggggagagcctgctgcccaggaagggcgcaggaatcccggaggtcaggcaggtgggcgagtcagaactgaggggcactccttgactggaaagtaacagtgggcactgctccggctcaggggggcaccgggacgggggagctgaggaaaagtcacccccaagtgaccacgagtgaccaggtggaatctgctggtgtgttgtggttctggggccaggggagcatccctgtgcatttgttggcaaaaaggagcaggctctgatggatcgcaaatgcccagcctttgggagcggggactgcggccagcacatcatccggtggggacagacagcctgggcttcaaaggcagccgacccatagccagtgcttaaagatattgaacttgtttaggggaaaaaaaggaattagagaaaaagatccaatgcagaccccagcaggcctcgtaggagcgtgcgatcccacggcctcagacccggcttccttcctgggcaggggaggcaccctcccctctgttcacagcttgctcttgctctgtgagggccgccatgagacggtgacagcagagtggcacgccaggctgaagtgggcttttatttagaaaagtagaacggctgtaaggtggtcaggggtcacctcctcccgtggcagtgctgaggctacaggtcccctggctgcaggagtcctcgaacaccggcagagaggaaacctgtgtggccatcccgtctcacctccaaaccttctgcccttgggaaaaaagtgggactttcctcttgagcccgtcgcgggctgatcaccattcctccctggggaggagggccaggccagggagcggggaactgatagctgaggaggcccacaccactgcacccagagatgggcactgtttagtagcagatgttgggatctaactctacttggcgttagcataaaggtggatacaccagtttctgtagatgttcaggcacagcttgatccagctactcaaactgtgtggccagtctgtctctctgcatcctcttacaccctctcccaggctgttgtgtgtagaagctgtgggttgctcagtcgttcagcaaacacggctgagtgcccagtgtgtgtgggctcctgtgcaggccccggtcctgccctgcatgcaagggctctgttcctgccgccctttgatactccctctccatcagggcccaccccacctgagagtgggtgcttgtgccctgggagcagctcattgcaccccctttcctggggcgccggcacccggtgggcttttctggctgattgtcttttgttctgaagacccgttccccactggggagatgaggctctgaggtcagcacttggcagggtgcccccaagcgtctcccttcctcgaggctggcaggatggtggtgctatggagcgtccaggctcaggttccggattccattctgaggacacatctgcgtcactcaagagggtggccccagacctccactctccttcccgaaagcagcggacttctgcagcgtttctgttgttggtggagaagcgttctttcatgaggggccccacttccaaggggaggggctgctgagcctgagagatgctctccagcagggcaggctgtgaccgggccgaagttgcctcttccttgcttctgagccctcggaggagtgctcgggcaccagtggacgaccaggaactgatttaagttcccgctaaaagcagccatctcattccatcagctcctgtaggtgccggagccctgtacagatgtccagcagccccccaggtctcggggggaaacagagcgttgctgggctgggtgctgtgatgctgccctgccatgtcttcagccacctggctgccagcattcatccttctcagcaggtctgtgagcctcaggccttaaggggagcccagggctccatcctcatgcctcaccagctcagtttcaagccctcatctctggttctttgtgctgggccacattagtccactgctggtccaggccaggagcacctgggtgcgctgagcactgtagtccttgcatgaagtttcagcatctcatgtcctgcagctgtgtgatgagagggtggcaagccctagagtgacatggaatgcggttattctgggtcagctctggaggagcagagaagctgacctccatggggatcgtggaaatgcctgttggggacagagaaagttatcctagcatggttagtggaggcattgttattggctggtggaaaggctgacaacttagtgcagcaattgtaaaattgccctatacctcctgattttcaccattcacttgctcatctgttcactgattgatccatccactcatccatccatccaccatctatccattcacccatccatccattcatccatccatccaccatccattcatccatccatccaccatccatccattaattcatccatccatccaccatccatccattaattgatccatccatccatccatccattcatccatccaccatccatccaccatccatccatccatccatccatccacccaccatccatccatccaccatccatccattcatccatccatccatccatccatcatcctcccattcatccatccatccaccatccatccattcattcatccttccatctgtccatccatccatccatccaccatccattcacccatccatccattcatccatccatccaccatccatccattaagtcatccatccatccatccatccaccatccatccatccaccatccatccattcatccatccatctgtccatccatccatccatccgtccatccaccatccattcacccatccattcatccatccatccaccatccatccattaattcatccatccatccatccatccatccattgtccatcatccatccatccatccattcatccatccatccatccgtccatccatccatccatccatcaccatccatccatccatccatccaccatccatccatccagcatccatccatccatctattcatccatccatccatcctccatccatccatccatccatcatccatccatccaccatccatccatccaccatccatccatgcatccattcatccatccaccatccatccaccatccatccaccatcatccatccattgtccatcatccatctatccatccattcatccatccatccatccatccaccatccatccaccatccatccaccatcatccatccattgtccatcatccatctatccatccattcatccatccatccatccatccaccatccatccatcatcatccatccatcgtccatcatccatccatccacccacccatccagccaccatccatccatccattcatccatccacccatccatccaccatccatccatccatccactcatccatccatccattagccatccatccacccacccatccatccattcatccatccatccattcatccatctatccaccattcatttatccactatccatccattcatccgtccatcctgcatgtctgtgttgagctcctcctatgtgccagtgctgcagtcttgcttgtatttcttatcagggtctttgtgctgccttttgtggtgcatgacacccacgcagaactcaaactttcatttccaaattattctccttcttccttcctccttctccttctcctttttcttcttctttctcttcctttttttcgagaccaggttatgctctgtcacccaagctggagtgcagtgacacgatcctggcttactgcaacctccaccacccagggtcaaacgagcctcacacctcagcccctcagtagctgggatcacaggtgcatgccaccaagcccagctaatttttgtatttatgtagagacggggttttaccatgttgcccaggttgatctccaactcccgagctcaagccatctgcctgcctcggcctcccaaagtgctgggattccagtcctgagccaccgcgcctggccatcaaattcttttcagtcacctcccttcttccttaaaactgaccttgctggcgtccattcctttataggtctggggacctgatgcctggttatatcctcatgaaaatgggcctctgggatgccagtgacaaatacttctacttgtaacagtgcaggggatgcaggggccaacttctctaactctgatcaactcggggatggacaagaggtattccctgggcaagcgaggctgtgcaggatgcctgacccctaggtgctgggggtaaacacttcttgtagtttaaagattctgatgcccgtggccttgtgctgggcccatgtcccataggtggttccagggaggctcctggtttcagtgcacacagctgatgggagcaagccacgatggggaaagggattgaatgcagggagtcaggtggatacagtctccgggagacccggcgtggtggggtcaggaggccccactccactatcccatttggggttgcaccaccatagcgaggctgccacccagactgcaggaagttgctgctgccaatgccgcctggtgccctgaagctggtcccaggccgtggcatgcgtgggggtctggacatgaggatcacctccatatgctgtgtctggggatatggccctgctggctgtgccagggcggaggaggctgccacctccctctcactgtccagctccatgagtctctctgattggcagattctaatttgcaccctgcatccttatgcaaaggcacctgggaagtgtagtttttagctccccagactgcagagcaggatggtgcctagaggagacagggctggagcttgggtggccaaggcacagcaggacacctgctattctctgggacttcatccatccatccatccatccatccatccatccatccatccatcatccatccatccattcatccatccatccatccatccatccaccatgtgatggactgaccccataggtgatccggtcatggcgagggttccatggaatcaacaaagtttttgtttcatgaagctttcggagctggccttctgtgcatcagatggtcggtctcaggaacctctgggcacagctgcatggtccttcactaaagagtaggcaccgggctgggtgtggagaccacacgcgtgatgccatctcgtcttcactgagcacctgggctgctcggtgggtcctctgggaactgctggtgatgggcccctgcctggctgtctaggagaaaagggcaaaagagaggggctcttgtttgttgagccgggaagtgcacgggccagtgtgcggtggccactgttgattctgcagcttctctcactggccttgacccactgggatccaccctctggtggggggtgccactggcttcaaacccatgtccacctgtccccaaagcttgtgctgtgtccaagtggagttttcatcctgatggaggctggaagaaaagctcctgaaaggctgtgcgccaggctcctcctgggctctccccaaccttttctttttcaaaaagtacttaatgttttcctctgctctggcacaggaagcccctggccagcaggaggggtggcactaggcctgggaaaggtctggtggcctcttaaacttgttgcaacagagatctgcgaacatgtccaccaagcctgctggaaaacagctcttgccttcagcaatggagaaaacaggcttgcgagcctgagtctgggaagagcatcacgggcttgttatggtgtgagtccaggaagccccggccgggatccttgctcccctgccccggccgctgccagtgctggaattgagtcttagggatgacccagggctcggcactgtgtcatcttcagcaggtggaccggcagctggcgcatcctctctttccacgggctgcatccaggcccagggctgcgcggtgcagcctcaccaggcactggcactcagcgtttcttctcaagtcaaaggcaaaagcccaccaaagccttctttgctggggccaggtgggaggtgccatacatgcccgagggggtgacagagctgggtgggctgtgccctgcttggcagccgaaagccacccaggaaaacagagaggccatgagaggcctggacgtggggtgttctgggtccctgtgccgcccctcccctttgtcactgttcccacgccgcagtgggaaatcctcagcttctccatgtttctggcttcttgatttaattggcagaggactgcagcaaagccaagctgtagaaatgacaccgtcagaggcagggacttcagaaccctgggacctgggtactgtggagccttccagagaactgtggatggggaggggcttcatgaatgagaaatgcggcttcgatttccctccaccctggtctccttcagagccctgcccaggctgctgtcttccctgcactgtcagctggtcatggcgggggtgggggtggcacaggttcctgtctgtacctccttgtggcctgcgcaccaagcacagtgcccgcgctgagtcccctggagggacagggagtgctggggagacagagtcctccgtctgggtgctcctcttgctgagggcctgctgggacaagcagtgacactgcgccattgtctctggcagccacctcctcccgtggcagtgccgaggctgcaggtgcccctggctgcaggagtccttgaaaaccagcagagaggaaacctgcgtggccatcccatctcacctccaaaccttctgcccttgggaaaaaggtgggactttcctcttgagcccgtcgcaggctgatcaccattcctccctggggaggagggccaggccagagagcggggaactgatagctgaggaggcccacaccactgcacccagagatgggcactgtttagtagcagatgttgggatctaactccaattggcattagcataaagagggatacaccggtttctgtcaggcacagcttgatccagctactcaaacagtgtggccagtctgtctctctgcatcctcaggcaagcactctccacctgctcaggagacagttgccagcagctccaggttcctgttctgtgtttggagccagcagagcagggaggattcctctttctcaaaggaaaaaagccccaggacggagcttccttatcctggctggtctcacgtccatccctgagctgaccgtctgggacagggcggtgtcatgctctgattggccagcagagggggcacggccaaccccgtccacatctactgggcagggcagttgccggctgctgggttcctccaactcccaggccgccccaacacacaccattctgtcgctgtgatgccaacttcgagtttattttctctgccgggactcccagggagcctcttgctcgtgggcacaggagcagtgcttttcccataaaactgaccttgttcagggcaggttcctggattcgcgccttgtggtggatgcaggtctggggtcctcgtggtgtgggggaaggaggctctggcagatggggccgtcttttgtgttggagggtgaccattgagctccctggtaatgatcacggcttcagtggccagaggtcagcttatccccttgcccttccctgagagcccctggatagagggtcaggaaccttctggaagggatgcgggggctgcccctcccttgttcttggctctgcatggtctggcgatgtgggcaggggtcttccagggcaatggaaactgcacacccgctgtaaacggtcatgggaaggcgacagacagtccaggtggataatgacggggggataaactaggccagtgacatccccgtgacctctggaggggcctcaggtggggtgaaggttctcagggctgcagggcagatgttgtgacccaccggttctcctgtgtcattgcacagcacaccataaggcggtcagctccgcagtgggccttctgtggccttccagcatctgcctgggctgctctccttacgtggccaatgagaagaggtgtctgggaggctgggtgtgtggcccctgccagcctcaggagccacgagagcgcagtgaggaaggagggcgtcgtcagagctgggctagcccgggtctgcccctggtgtgtggccgctggtggggacagggatgggaccctctgggctagcctgggtctgcccccggtatgtggctgctggtggggacaaggatgggaccctcctccgcagcgtggtgccctgcctcgcccagcacgcggctctaagctggtcctggggctcttctgagtgcccaggattcacagtggtgggggtgggggtgcttcctgtcatcccagcttccgggtgttcccaggtgctcctttcctctccgtggctaactctgctcctcctctgtcatttcagctcagccagcagatctcctgaaggttctagattttcacaacttgcctgatggaataacaaagacaacaggcttttgcgccacgcggcgatcttccaaaggcccggatgtcgcttacagagtcaccaaagacgcgcagctcagcgcacccaccaagcagctgtaccctggtaagtgccgcacccttctgtttggggcggtgggtcccgttggccctctggcctccagccaggagcagcgctcaagcctgcgtggtggcagaagcgggctcagctttccaggaagcccctctcacgagcccggcttcgtttcactgtagtgaaaaggcagttgcaacagtgggattttgtccttctggacgggactgggctttgtcactgtccttctctgctggatgtgggtgggtgggtgtggcccagtgcccttgaccttctatcagctgtgtctctggtggtagctgggccgccaggactccaagggcagaaagagtcggatgggtcctgagggatgaggttgagagaaacctcggggtcgtgggaaaggaagcacttccagacagaagcttaaccaggggcagtgacattaagagacgatgaatcaaacgtcgtgactcctagcaagagcatgggaggcttttaatgagagtcaactgctaaatgccgggtctctgcttttaattacatgcccggagcgggaagcagcattagctctaagatacagcatccaagttgtccctgtcacccagtcgtggggcggcacctgccacagttaattaaaccctctgggcttatctggacgtgattaacgagctgttgatggagaacctcatcgccttgacccagccacttgctcatggcctggactaaaatgagctcctctttctgattcagatgagaaagggacgggggatgtagggcaggtgagttcactttatgagatgctctgtaattattagaagacagcgcagcatctttttggtggacctggaggtgaccccggcattgaacccacgatcagggcagtctttgaatgctccgtggtgtttctgatgatcgtgtccccacggggcccctgaaggacaccctcttttgaggggctgtttctgcttccacagacgtgctctctgtacactcatccccagccattgcccagccctcctttacatccatgtgaccttgaagagtttgtctctgagagaatctgggcagttcttttcaagaatgtttttgagaacgagttatttcaagaaacaccttcgaggcaccgagtctctgccttgcagcttggtggaggtgaggtgaagtggcctgggacccctggcagcccatattctcttaaacagcccacctctgggtaccagagtggccctgggctgtggatccccagcctcaagcgtgtggaactcatcggctcagacagcctgtccccgcaaaggactgcagcggtttcgtttctccaggcctctggaggagcgttcataagcttctgggagagcatctcttttggaattagccatggaatcctcacttggaccttggcccagaaattgcacccttttctgccccatgacccccggtttagaattcgtgacctagagatcctgggagggctggtccagggaagggcttagagagctgattgccgaggaccacatggactctgggtgtgtgacacgctgaggggcaccctgggaagtaagcgctcctgctttccaaggggatcttcagccactttgtttaatcttctctgtgtcacccaattctggggtgtgggcaccacacactcactggactttgtccttctctgctggattatcttgtggccagaaatattacagtatctcaggaatacgggctaattattggataaataatctaggatcagctgggcgcggtggctcaccctgtaatcccagcactttgggaggctgaggcaggcggatcacttaaggtcaggagtttgagaccagcctggccaacatagtgaaactccatctctaccaaaaatacaaaaattagctggacgtggtggtgcgcgcctgtaatcccagctattcgggaggctgaggcaggagaatcacttgaacctgggaggcggaggttgcagtgagctgagatcgcaccactgcactccagcctgggtgagagtgagaatatgtcaaaaacaaaaaaaaaggaaaagaaagaaatggcttggccttccagcagtttctgcatagcaggctctctgtgcctctctcagcagggaccccatccctgagcagggctcttatctacagatcagttggtttccatgtctgtttccggcttttaaccagatgctaggtgagcgaggttaccgtgacacagtgaagcagtgagccgagatcgcgccattgcactccagcctgggcaacggagtgagtgagactgtctcaaacaaaacaaaacaaacaaaaaaaccaacacataatctagggtaaatttctgaatagtctgcgggatttttttttaagtccatgtttttttaagttttccaaagtgcttcacttgctcttccagagccttctgtgaattagcttacagagtagagtgggtccacataagccaattgccccattcatggcagatgaagctggaggttgcttgggaagtattgaagcagggctgtctacggagtcccttctgcaggtcccaaagtgttgggttgggacctgcagaggtcccaagggacactgttggagaccagtgtcataggacatcatttgcctttgaattgacgccataccccgcctcgccccttccgcccggccctccgagcaaactcgccacctgtcctctgttgctcggactctgtccaccccacttggcttgtgggcccctcagtggagggactcagaagctcacttcaggttttctgtttgagaagtgctcagtgtgtaggggccacacacaggaaagggctgtttgcttgggaccgacacggtctcgcgccagccactcgtgtgggtcagcctaagcgctaggggagctggagctgcaccatgccctgtctcggggagcagcagcatctgcgggattctagagacccgtacctgcctggcagttgtagaggtagaagagagggtgcagcccaggtggccacggcaaggcctgggctgtggggaactgagtggagcaaaaacagtatctgtaagtatctcttggcgagaggggaagcccgcatccaggcagctgtttccccggcatccgatcccctgacaaaatccctgagcaggctccccagactccccgaagagctcacacacccctcggcaaatcagcagccaagtggccctggatcacgggggtgggggtttggagactgagctgagcaggtgactgggagcctccacctgggtgcagtgcccgtccccgcccaggccgcacaggcgttgacctctgccctccacccacactggcaccacctggtcctgtatcccccactgggcacgaactggcagagtgatctgggtgccagggagacacagccatgaatagaacagatggagcccggcctcctctggcctgggagagcgaggttccctaggccaccctcctcaggggcaccgccctcccttctgtacaggggaagaatcctgttcccattttctgcacttgggggcaggacagaggctagaatttcccccctcattcgaagagggttttctagtcttgctgagacccagcagtctgggttctgggatctgtccgaccagggagctcaaccctgagccacggttgctgaccgatcatgggtgctgggttgtcctggcaccagggagatgaggctgcagggactgaagcccaggactgtgacacaggggctgccagtgaagcggggagggttgggacttccttcccagtggggtcccaggcctcggtcccctgtgtctgcagtgcagacatcgcctcacggtgaggtggcctgagaccctgaaggcagcgggcctggcttcctcaccaggcggcccgagctctgggatccacgtccccactgggggcccgggatggtgtgctccctgccttgttgacccagcactgcttgtttgtaatgacccagatctgagctgtcccctctgaggatgaccaggcgaggcagtgtcccccctggtcacctgacttggggaccagccccacctgagcccacttcctggatcagcacgcatcctcctcctcggctctggtgctgtgggtggggtcctctctattttgtcctctgtaggtgccttttcctccgtacccctcttcagaccaggcctctgagatttgcctcctactcaggacacccagggttgggtggaggccacggctctgcccacacccccctgccccttggccaacaccctgtcttcgcctgtggctctcctgcaccctggggcctgggctccagaatcagcctcccttaggcagaatgtcctgctgcccctcgctgcccccgccagtaccttcctgccagagagcaagggagcagccagttgcgctgggccctgggaccctccacaggattgcgctgagtgctggacgagggtggcagggacggccgaacagggtgccagctgcaggggcaggctgacgtgaggggaagatggaggcagcggtgggagggtagtgtcctcagcctgggggctttgcagaccctctactcactgagcagatgctccccactcccctgtacccccatagagcaggataggggttccctgatggctgagaggaggggggtcccatgaaataagatgcggggttcccacctgggaatctacctggtgagactggagaccgtctcttcctcactctatcttcgaccccatgggttagtccagcccagggaatgtaaacttcacttctggccatgacaaatgcagtaagtttgggtccaggccagaaggttccagaaccaagttatccctgcaggggctgccagatggcagcttcctctctggagcccctcacctgtcccaccccaatgtgggactgagagcccttctggtcgggactgaagatggctggtgaaattccttctgcagggctgcctcggtgcccctggatcctgggcctctgccctgggcctgccatgctccccttagcccggcccctcctgggctgccagggtccagctgaaacctcagccgccccccaggttcctggccccctgtccaaagttagccacaccccgcattcatttcctatcctctgacctctttctgccaccctgccccactgccccctgcattatttgcaattattattattattattattgagacagagtctcactctgtcgcccaggctggagtgcagtggtgtaatcttggctcacggcaacctctgcctcccaggttcaagcgattctcctgcctcagccccccgagtagttgggattacaggtgtgtgccaccacacccggctaattttttttatatttttggcagagacagggattcaccatgttggccaggctggtgtggaactcctgacctcaagtgatcctcctgccttggcctcccaaagtgctgggattacaggcatgaaccacctcgcccagcctgcaattatttaactaactggtttggtttgatgatttctgtttgtatcgtgggagtatcactttctgaggtcagggaccatatctgtcctttgactgtgtcaccccagcgcctggcaccaatcactgtttattaggggatcagtcactgtttattgatcacgtgatccactgtagtgagcaatcggtatgcttagtaactgtcggctcagtatgatttagtttcaacacaaatgcatttattgtactcctactgcatacctaaaatgctctagtgcctttggacttcagcagaagtaaaagtgaaaagctctggccgggcggggtggctcacacctgtaatcccagcactttgggaggccaaggcaggcggatcacgaggtcaggagatcgagaccatcctggctaacacggtgaaaccccatccctactaaaaatacaaaaaaattagccaggcttggtggcgggtgcctgtagtcccagctactcgggaggctgaggcaggagaatggcgtgaacccgggaggcggagcttgcagtgagctgagatcacgccactgcactccagcctgggcaacagagtgagactctgtcttaaaaaaaaaaaaatgaaaagctctgagggagtccggagcccacccctcaactgtgacttttcttggagaaatgaaacatgaagtgttcgacagccgattccctcctcccagagtgcccggacagcgtagattataaagtatcagcgtcccagctcatgtcatgactcgaatgggccatctcacagtgacaataaatccattgttattttgccaggagagagattaatgttaaacataatttatcctttcgggttttatctgagctgagaaaatttgttaccatagagatttcaaaacttgagaaacggcattttaatgagctgcggagatgggggttcgtgggcctagcggtgccttgtgccggagacatgagtgtgcgcaactcgttctttgatcttttaagacggaagaatgactctggcactcagggtggcggtggggtggggacgggagccaggtggccctttgcaatgagagtgagggagtggactcagatggtgactgtgccatctgccctgggtgtggacggggacctgagtgcttcaggtgagaccccacctggccctcagtgccccatgcactcccagggatcacgtggggctgccatggtcctgctggcagccttgccatatggggtccctacggtgggtgggcatggcaggtcccactcccttgccataggtgggaccagctaaggctgtcatctccagagtcccccgcccacatcccctcatgtggaaggatgatgcaaagccataatcgcagcagtttgggaggccaaggcgggtggatcacctgaggtcaggagttcgagaccagcctgaccaacatggtgaaaccccgtctctaccaaaaatacaaaaattaatcaggcgtggtggtgtggacctgtagtcccagctacttgggaggctgaggcaagagaattacttgaacctgggaggtggaggttgcagtgagccgagatctcaccactgcactccaacctgggcgacagaacgagactctatctcaaaaaaaccccacaaaaaaacccaaaaaaacaaagctgatggcttgtgtctagacatgggagtcctgagccagttcctccgtgaaacctgcctttcccagatggccacactgactgtcatcacccccacctggggctgtccccagctttgggggcaggtgccttggccaggcccacctggggcccagtctcctgtgggaacagctgagtcatggcttggagctggtcaacacagggtgcccggccacagctgggcagccctgttccctgtcagtgccttagtgagagattcgtgactgcaggatgagcctgctgctgtggcagcttccagcgctcacgcaggctctgggttggcctgtgggggccttggagggtttgcctggagtagtggcccctcattttgcagaacctcaggagatctccctgcagcaccttacagaggatgcagaggctgtgacaggcagcattctcctcccccttggaagcctcaggatgctgtgggacgagggggccttcagcgtccccttcctcccagtgttgtacctgcagctgtgctggagtgaccaggggcagaggtggtgacgctgctgcccgccttgccacaatttcgccagcagagggtgctcatggatagccgccttgcaggcgctgctgccgcagatccagactctgctgccccatggggtcaggggcctctgggccacctggttagcctttgttcccacttctaaagaaggggtgggtctggtaatggattcacgatggctcaagcccacccaccagatcccagccctccgtagtggtgctgcttgtggggcggctccagcagcaggtcctgggccccccttccttggcatgtccctgttgacaccctcctgggacaccgctccttctggcccgttctgagcagcccacagccttaggcccagcacttttggctggcccaccggcatcaactagccacaggccctccatcagccccaggctcttggcagaactgcaggtggcccagggtgagagcatcgctgcctttgccaccaggatcgatggacaggaggggctggggctcccggtcatgcccacggatgaggggcagatatgtggagtgggcttaggtgcttgtggccgggccagcctgggtctgccttttaatgacctcaaattgctcctggcatgtgttgtaagaggtaattcctcccgttaacatactagggatatatttttttctaattttaaatttggattaaattcttttgatgaatttccactttttctctgttttgcgtatcaaccaggaaatgtcacaaagtacaattctagtggcggttcgaggctgttgcttcccttctcccttcctctctctgcttcctccctccgtctctctccctccctccccctccctccctcccttccttgcatgctgagtggtgtgacctcatggagcgtactaagacacctcagaagcagcctccatccagaggcagctcacagcctgagaggttctcctgagggtcaacacacagatgtgttaggcgcaggagctgagggcagggtgttgagggctcccagctggaaggaccagttgtgtttcatggaggagtttgcatttgcactgagtcttgaagggggcaggtttggccaagtgggagcagggaagggctgcaggagcagtttgatcaaggggcagatgtgcagcagatggcagtgccccacgacgggcagcacagcttcccagggtcccgggctggcttgtttgcagagagccatggctgggtgtggttgcaggggctccccgactgccttctcacctctgtgctctgttccagcgtctgcatttcccgaggacttctccatcctaacaactgtgaaagccaagaaaggcagccaggccttcctggtctccatctacaacgagcagggtatccagcagattgggctggagctgggccgctctcccgtcttcctctacgaggaccacacggggaagcctggcccggaagactaccccctcttccggggcatcaacctgtcagatggcaagtaagtgggcacttctgggcaactgtccccctgctggaggggggatcaggccagctcataccactgaccagatgtggggcacagtagaggacgtgcagcagccggtactgagactcccacagacgccgcagcagaggagagggtgctgggcttggagtcctgaaacctgggttatggtcttgattcatcctctgtggctctggggagtcacttctcctccctggccctccattatccctttgtaaagtgcactaaagcacatcaaattcccgcctgtttgtgtcagaagggacacaggaaattgtgaggttatacccaaccttttccagaaaggatttcaggtatccttcaaggacacaggtgtgttaggagtgggagtgagcatgagaaaaagcgggtcgtgccagcacgctctgttgggtgcagacctcaacaccaggggttgtcagtctcctctttcgtggtcagcacgtgtgaggtcatgccctgataatctccgaacgtcttcaatacatgatttctgaattcttcgccaagactttcagacagatccactccttccaccatttcccgtccacacccggtcttctctggctgcctgcagtttgccatcggggttcagagggcacgtgacaagtgctcgcatgcacacagcaaaatacaacggccgccgccctgccattctcccgatggctgtgaccgcaccgcagggaccacgctcccagggaccacactcctgggtcccgagccagtgccgagtgctgtgtgctcccccttccccctttcacttgggctcccggctgggcttccagggttcagacagccatccttgtctgagggacgagggttctggggaatgagtagatctcatggcacggggtgttgccctaacttgtctgattccagaggctgggccttgatctgctccgccccaccacgatcgtgcaggaagtgggccttcttcctgtgtctcgaggaatttgcagcaaaattgcttgagctggcatctgtgatccaagccctgtcttcaccatctgtttctttgcaggtggcacagaattgctctcagcgtccacaagaaaaatgtcaccttgatcctcgactgtaaaaagaagaccaccaaattcctcgaccgcagcgaccaccccatgatcgacatcaatggcatcatcgtgtttggcacccggatcctggatgaggaggtgtttgaggtgagcaggagggcagaccaacccctgtgcccaccagggcactcctcctgtggagccactgtgactgctgttggaggaggctcctcgggccgggaccggctggcggtccactgtggtcaccgtctctgttggtcagaagcctctgctgccatcctaagagatgtttgtggctttcggaaatggaggggccagagctgctgccgcctgtaggccgcgtggggatggcagtggccgcccttgtcccaagggcccagtacgtgagtctcctgggtgctggctcggaaaggacagggcctttgtccagcctcgtgctgaggctcctggaaacctgcacactcctgccgtctgtatccgaggccatcctgggacaggggcagctgtcctctgggtgagcttgaagggcagagctgggccaccgtgtggacgcaccagggagacctgtgccgacccaactcgggctggcctcactccagtctagctgtgtccagccaggggccttgctttcccggggaatgcctcagaggcttgggagtcggggcctgagctgagtgggctctgggaccctcacttcagcccatggagcccttcataggttggggttctgcgtgagagagcaggagaatgccccgtcccactgccaagaaacaggttgagagcttctgcaggtgaccagtgatccccagctgccccgggtgggggcgttggagtcaccaggagcctgtaggggttccagggccctgcctcctggggtgctggggcgacagcctgcacagggtcctggactctgcccttcccaagggcactgcagtgaccgttgcctccgcggcttgggttaggcggcagccaggacccctccactgggcttccttgtcgtttatgtaagttgggttttgcagaagatttggttttgcacccgggtctctgtggctaaaacctgttcgaaagccactggcttaaatggcctccgagggccatcctggctctgggatttcctcctccagggctgcagagatgggacaagttagggcagtgtctcctccctaaatccccgagcgctgccgtgagctcctggctgtgtctacacatcggttctgcatccggctgcccccgtttcatggctgaggtggggtccccagggccatgtttcttctcggtgactcggggtcaccaaaccagacaccgtgttgactcaatcttggtgttctgccaagggcacgcgaaggagacatcacacgtactagttcatttctgtgttaaagatatcgatgtctgctcgtggggacgggcacggttgaactgaccctggggctttgagcgtgtgagaagagggcaattctgaaagtctcacctttctaggaaatcatactggggaccacgtagtgtcactgtgaactggacattcagcagagtgctggcctcagggcaagcccacctgggctctgtcgattgttggatttgggcctcgggcaagctgctctgctatttctctgtcttagggtctccgtctgtaaaatgggatcacagatgtggctgcttcatgagctgtggcaaaggttccatgaggttgaatgcagtgacacagcagcgcactgtctcccttataggaagccccggcttaatgtcaaattcagttgttctggatattaatacagtgtcaaggcagacagaaaggcaggacacagccccgcggcccagtgcagaccgcagaggaatgatcagagcagccacgctctgtggaatgagatgggcctgttagaagaaggcagggagtaggtgtgaaggtggtggagattctgctgaacgtgcagttggctctgggtcagtttccaggaagctgtagcctggggcttcggtagagcagggcgggtgcttggatcctgctggcacagccagattttgcaagctattgagacacaccctccgggcacacttctgaacagacctgcctaggcgcctggaaggaactgcgggcacaggagccgtcctcagccaggcaggaggcagcttctgggctattctggggagctggggttaaaagctgccttggagtcacacagactgggatcaagtgctggttttgcctcttgctggtgggaggatctaggcaaagcaggtgacattgatgagctttgagactcatttgtaaaacattggtcacagtaaggctacctgcacagctgcaggggaggttctgggcttggcctgggcacctgccagagtcacccccaccgctgcctgttgttctgtgggtcgaggccctgcctctggatgggaggccacgcggtggcctcgggttttttttttttttttttttttttttttgagacggagtctcgctccgtcgcccaggctggagtgcagtggcacgatctcggctcactgcaagctctgcctcccgggttcacgccattctcctgcctcagcctctcgagtagctgggactacaggcgcccgccaccacacccagctaattttttttgtatttttagtagagatggggtttcactgtgttagccaggatggtctcgatctcctgaccttgtgatccgcccgcctcggcctcccacagtgctgggattgcaggcgtgagccaccgcgcccggcctcagggttttaatgtttgtcatgcagtctcttttttgtgctgtgtcaaatctttgtaatttctagtgtgttctgttgtaaagattcaggaaaaagctttattttatctttaaaaaattaggatcctaaaacaaatagtgcttcattgatattctaactgagcaggaaaagctgttttcccaaaagcagatgtatgtgaagagtcccttaccccagggaagcactagaaatccgtgttcagggctgggtttgcatcctggctccactgtttcccaggggtgagatcttcggtgagttgtctgaccgctccgagactcagtttccccatctgtaaaatgacaataatagtacccgccgcagttttgtgtgtgtgggaggcaccgtgagaattaatccatgaaaaatgcctatgagtggccgacagcaaacatgccagagtttacctcctttatcagcaaaggatgaaggtaacgtgtggttttcaaaaggaaatggctcttgaatggaggaggctgttttcctaccctggcttgttcttccagggaaccgtgcaggtctcactctgcagctggcgcctggcaggcttctggtcgaacggtaagtcacagataggttccgaattctgtgttcctggtgagccattttttcctgtcgtggaattcgatttgagccagagtggctgccaggaacgagaggtttttattgaccacaagttgttaatggtctggaggaggtgttttcctagccccagagtttcctggctgttagctgtgctcacgttggaaaattggacctgtctttcttaatgaagtccagcaggatcagcgatgccttcagctgccccaagcatcttttcttttttttttttcccttaacagtgtgaggaggaagttcggtgagttggcctcagagtcccagccaccttttgtctcattgcaagtggaagagaatttctatttcttttgaagtaaaagtgatttatctctgctttccagcgggctctgcataacgacacctcccatctcagtcgcttggctgctctagaaggctctaaaaatgaggggctggcactgttgagacatattcctccagcagccccaatcttcccctggaaggacaacttccgctcattcaaagccaatctgttctgtgtttagagttatactgaacaaggattcaccaaactctaagagagttcgtttaaacagggactgggggtttttcctggggtgtctgtggccccacagaggccccctttgtccaaagtgatgcgcccttgagggacagagggagatagagactctcagggccaagacacatgtgtctcctgcagtgcaaggccagggctaacggctggtgctgtgcccgcagcctccctgggtatagacgcggagcctgagtgtgtggctttggccgtgtcagcagccccctgcgcctgcagaccaggccctcactgcctcccagcccctgagtctggttctagtggggcagccttgccatgcaggggaggtgggacactgctgtccctcacagagccacgtacggaggaagtgatgggcatggagggcattctgccggcaggtccccccagccttggacttccttccctgctggtgacttggagccccgtgtcctcatctgtaaaatggggcgatagggccaacgctgtcggattttgggttggtgagatcaaatctgtgttagatgtgagtacctccaagggccgcagggaaccaccttgtcctgggtctttggcggtgagagctgctctctggcccattgtcagtggtcatctgccagtgacaatgggccagaggtggcccatcgtccacagtggcactgtcatgagctgtcccttttctcagcttttctggactccccttatgaattagatgctgtgagtcctgccataaagatgagacccctgggccttcaggaggatggagccgctgagaggtccatggggaaagaactggctgagggtcccgccagccccagctagggcgagtgctccggggcgcctcctgcccgtacctgcacctgccatcacagcagcccctcagcaaggtttgggttcgcaggcccctgtcctcctcccctggcagagtgcccctgtggagctggcaggagatccccctggcatgggctgtgtctcctaggatggggtgggatggccaagccctctcatgctgcctgttcccagggcgagtatgccggagctgcctgggacattgtcctgggaagttctcatcccaagtcttgtcccttctggatgtgccggtgccctggggccagcactggtgtcagaggaggactcagggcattgctccctaagccccaggtttccagaggtgctgggcaggcccaggaccaccgtgcaggaaggggaaggcagaggggctgggctccccccagtgcaggaaggtctttttatccagggcatagtcaggaacgagctttgtgttttcagaaacatggcctcagtggccagggtgagcatggggcatcctgcagaaggtggggatgtgtgagttatcttcacaggcaaggagaaggcggatgggagagcagccagggcccacccccactgtgccctggaagaagagagtcttgctgccacttcatagcttgggaagccagcaccagggaggttgagtcacttgcctaaggtcactcagcaacatgacagcagattgggacctcggaaatcatgacacaactgtccccagcctggaagggatcccggggaccagtggcaggagactggactcaggctggcctgacagcactgtgggcccccgcctggcattctgttctcctagccctccccgcacaggccctgaggaccctggagtcccctggcccatggggtctgtgaaactctggaaccttccaggaagagccagcataagctgttagcaagggcagagggcccaagagtgtccctcccgtgtgtgacaggtgacctggacccgcctagcccctgtcccagcaccttccccagcctgtggcgggcagcacggggctacctggctgctgatccggagggctccatgcacctctctagagtctcacctcatctatgggccctgagctggcccagtgagccacgtcagggaggctgggaggcgggactaagagggggcctggggtgcctctgccttgaggcctgccgtggaaggcccctcctctgtgggtgagctatgaccaggaggggggccgtggaggggatgagaactgccccgggggacagccggccagcgagttctgggccaggagccaaatgtgcttttaagctgttgaaggtttcaaggggcaacaagaccaaacagactataaactccagctctccctgcaaaacccctgggtgctggcgggaaagtgatggcgtcggctccaagctctaacggtcctccatctgtctgccttcatttcagcctttgaaaaacaccgagcggtttacctaatccctgattccctttttccaggggcctggcttttccactgacatgttctttctggaatttcactctccccggggcaggagtggggcctgtgctgagtgggcctttctcagccatccacggaggcaccctgggattcctgtgagtgggaacagaggagccctgggattcctgtgagtgggaacgtcccccagggcgtcaggcccttcagtgttagggcctcgaaggggagagcaagggctttgttagaggcccaggtccacgtttgctgtaacttcccaggctggggcctttggagcctctggatccttccagaactaccttgttgctcactggcttgctgacggctgcctgggctgcctgtgggacacagcaggtaggactcaggcttgggtctagggcagctctggagcccgcagcccatcactgggcagccggggaagccccaggggagggaagcgcaaccgtgaagatgagcagacttcccggcacacaggcgggcgagactgggtgctgagctgtgtgcggctggcggctccgggacgtgaggggattctgctgaggacctttcctcctggtcgggggagggctgcggagctgggaaaacccacctcgccagaccttccctgggccctgctgctcagcctctgctggatgagctgcgttcccctgtgagaggactggggaggtgtccggggagggagggctttccccgccttggaagctgcccagaggggcacatttggggggctggctgggccaactctgacttcggacatgagatggatgtgatgtgtgcacctgggcagggcagggcactccaccgcctcgggcagccccaggcaccctgctatgtcgtctctgtgcctccatcactggccaggcagcatggataggccaggtgtccctctgccagggcttctcggaggcagtgtgtgcctgcccctcccgagtcctggcccaagtccctgctgctgcctggccagtgcgcctgccattgcggctcagagcaactcccggggtgggggctctggtgcacctgcactgacacaggacactgtcacccttctaggtcctcggtccaagacccgcatctacccagccctgctgtctccttagcatccactggtgctttctgtaggatccacctccgctgtctcaggccacctgtgtggcagcccagaccccaccctggcagtgctgaggcagcccctggcagcggaacaccagcaggtgaagggcagaggccccttgtcgtgtcttcagctctgcctgctttgctgagacctcctcttgcccctggaagggacaaggacattgcactctgcatgatctcctgggactgctgcaaccaactgtcacagcccggtggcaaacagcagagatttatcctctcccagctctgggccagaattccaagatcgaggtgtgggcggggccgtgctccctctgaagcttccagcgggggactctgcctgccgcttccagccccgggtggccccagacactccttggcttgtggccacgtcgccccagcttctgcctccgtctttacacagcctctctcttccccctgtgtctctctgtgtgacccacaaggacatttgtcgttggatttagggcccatcctaatctaggatgttcccatttccagatccttcattccatctgcagtgatcttatttctggacaaggtcacctgtggatctagattctgggagttccgacctggacccatccctcggggccatgattcagccacttccctacaccagcgtggaaaaggggtttttcgtctcttaaattgccacagagcacgtgtgcttaaaagtgagcctctgggcatgcatatttggggcctctagctgaggcttcggggtgggctgctgagctgtgcctggctgaggaggggtgggggggctactcctggctagcaggcggttggccaagccccgtgggcatctccctggtgcagtaggcagctgcctggctggctggagccagtgtgcagtgtggcattggggtgcagtttggtatcggggtgcattctcatttgcagttctggtctagggaggcctgagtggtgagcgagtgaggcctggactccttcctgctgcaggtggctggtgacccgcctggtaggtgccagtgaccctgctggtgatctgtgtggcacccagcaaggaggggtccagagaccccacagggttgggcagggcctgcctcttcccatgtgctgtggggcctggcccctcctgctgcctggcccgaggtttgggcttcaggtttgttccatggaaaatgtgagccacagacccatctcccagcccagacaggaatgatgtcatcttgggagccggccttatccaaagatatcttgctgggctgacggcggatgttctgatccacagttcccagaagatggcactgagggtctctgggaagggacgcatgatgctggagggtctctggaggggagtgcccagggcaggcagggctgcggtggagggggagcaaaggggcagggcgtcccctgtgggagggtccagtggctgggggagccgcccacctgagcggaggagctgccctcacacggctgacgggcgagggggcccacgaacgtgatgtccttctttagcaccgtggccaagggggcatctgagggagccgcagtcaagccccagccctccgcccatccttcccatggctttgagccagcctgaacctcagtttcctcagctggaaagtggggatgttaggcttgtggtgcggatgaaaggaggcaaagccggtgcggcccgccccgtgctcactcagcgtggtggcaggtgcgccgctgtgtgctggcaggctctcctgcccgcgcgagacggtggctgttgtgatgatgatgatggtagtcatagtgattgtgcagtattttcatagcatcgccgtcagtgccgttaaccctgtctcattgaaaggggtgtgaagggtctacaagctcagtgggcaggtaggggagccaggacctaagcctgctccccatcgagacgccccgtctgttgggtgcagtggtgggggaggggccccgtttagtgcagtggtgggggaggagccccatttgttgggtgcagtggtggggcaggggccccatttgttgggtgcagtggtgggggggccccatttgttgggtgcagtggtgggggggcccatttgttgggtgcagtggtgggggaggggccccatttgttgggtgcagtggtgggggaggagcccccgtctgttgggtgcagtggtggggaaggggccccatttagtgcagtggtgggggaggagccctatttgttgggtgcagtggtgggggaggggccccatctgtggggtgcagtggtgggggaggggccccgtctgttgggtgcagtggtgggggaggggaccccatctgttgggtgcagtggtgggggaggggccccatttagtgcagtggtgggggaggagccctatttgttgggtgcagtggtgggggaggggccccgtctgttgggtgcagtggtgggggaggggccccgtctgttgggtgcagtggtgggggaggggccccgtttgttgggtgcagtggtggagaggcccgtttgttgggtgcagtggtgggggaggggaccacttgggggggcagccacatgggaagccgggaagggagctcccacagctggtctctgtcttccacagctggcctccgcctctgggcatgaattgttcggtcggtggtttggtgcctggaagaagcccctgtgggcctgcagagtcagctcggaggccaggttggctctgtttctcccccgtctaagggaggctgcctggctcttccccagacccaagcagacggtccaggtggtcaggccggtgacaccccacttgcagggcctgggtgctgtcgtatagaccgtgcgcctggggtgtggggctgtgtcttgccagccaggtgtgctaatgagtgagtcttgatcccagagcacatggaaaatctgtctcagaatcacttttctgccagcaccctccagtctgtttgaagatccagcagttgggaagggctgctctgttctaccactgcaccccatggtgcccaagcactaggctggatggggcactgggggctggtgcagtggccaccgcttgttcagaaaacccaaggctccgagatggaggtaaagccagagaggtaaagccacctgcccacagtcacacagctgggaacagtcagggcaggacttcagcccaggcctggatctttctgggttaagagttcccatacttaggtgaagaggggcacggcttggggtcccggataggaggcttctgcctgggtcctgtctccttattctcatgaccccttcttgcatctcctgatccaaatccccgctcttcagtcacatctcctgtgtcccctttcagcgtctcgttctccagccccatagagccactgcctggccctccccgcaagtggatggcgctgggcctgagtctcacaccctggactcctgggcctgtctgtgagtgcctgacaggaagtgaaccccctttaccctggcccccttcctgtccccactccttccccctccttcctgtccccctccttccttccccccttcttcctgcccccttcttccttcctccctccttcctgtacccctccttcctgccttccttcttcctatcccccttccttccttccccctccttcctgttccccctctttcctgtcctcctccttcctgcccatcttcttcctttcccccctccttcctgcccccttcttcctttcccccctccttcctgcccccttcttcttatcccccttcttccttcctcccccctccttcctgactctcttcttcctgttcccctccttcccccttcttcctgtcccccctccttcctgtccccctccctcctgcccctcttcttcctgtcccctccttccttcttccctccttcctgtctctcgttatccctgtccctgttccttccttccctactccttcctgttccccctccttcttattctccctccttcttgtccccctccttcctatttcccctcctgccttccctcctccttcctgtccccctttcttcctgctcctctccttcttgtcccccgtccttcctgagccccctttctgtcccccctcctttctgcctcacttcttcctgttgcccctcctcccctcccccttccttcctgttccccctccttcctgttccccctccttccttaccccttccttctgccctcctccatcctgcccctggcttttctgcttccctttcttcttgcccccatctttcctgcccctttctggccctagaccctggtgcttctcatgttcaaccctgagttgctgctttttgttcaaatggccccaccctgttctctgctggggtttccttgaccacggggaccaggtctcccctggacgcctttttccaggtgcccccagcccatacccatcctggctctgtccgcaaacctgtcctccagaagggcctgtgggtgaccaggctgcagccggggactcccagcactcctggagccctggactctccaaaccaggcgtgattcccgctgtgctccacggcctctctccagagccctggctgcctgccgtccatgcctctgggaggctgtgtgtttggaaatactttttggagctgagaagtgcaggttttcctgcgagctagccacgtggcctcaccctgcccttctcctgtccgatagtgagttttaccctagaggcagtttgagccacgccacgtggtcttcttagcaggatgcctgagccctaccccactggcttcatgctgtcagggaggctgggtcacaggcccatttactcactgcagggtgtgatggtggggagcatgtggagcagcctggctcctaacataaccccagagcgctcctccctcccagtctgcagccacagcagggctgtgtgcgctccacagagaagtgagggtcttcctgacgatggttgatttgcagagacacccgggagttgcatctgtcactgtcccatcacaggtaaagccaccttactctattggttgacagaatgaagactcagaagatctttcaagctgggactatgttctcgaactgagaaaatgaaattcaatcaggataaacgtgagcttctgcacttgggttcaaaacaatcaattgtacaagcgcagggccaggagaagcggcagtgaagtgttttatatgaaaaaaacttaggggtttgtgggtgtcaaacccattaacgatcatcagtgtggtgtggcggccacaggaatgcacgctgtcacaggtggcgttagggacagagggcagggtgatctcaggtctggaaactgtgctgaacagaagctgaatagaaagaactggggtctgaacccgggacagagaaggtgggtggagtggagagtgggtggccccagtgtggggtcttgtccagaggagaggggatgagaccacagcagactgagaccagtgatgggatgtgaaccttgtagcagccaccttctcctcctccaggcccagctctgagcaaccttctccgtgacgctctccttgacctcccaggcaaagtctgttgcttctgtgctgcctcccaagtcttctcccttgagacttacagtcagagacccagatttttttcatctttatgtccctaagacttatcagagagatgcaaaaaatactggttgaatgaacaaaagaatgaacaatcagagctggttgccttcctgcaggccttcatgctacagaggcatgttcgggaaaggctggtgagcctttctcagggatccaggactgttgatgatggtggtggtggtggcggaggaggtggtggtagtgatgatggtcataatgatgctgatggtggtgatattaatggtgagtatgatgatgatgataacagtggtgtggtggtaatggtcatgatggtagtgatggtggtggtggtagtggtggtggtgaaggtgatggtgatgtttatggtggtggatatgctgatgatggtgatggtggttgtgatggtgtgatgctggtgaaggtggtggtggaggttaaggtggtgaaggtggtgatgctgatgaaggtggtggtggaggtgatgtggtggtgatagtgattttggtgaaggtggtggtggaggtgattgtgatggtgtgatgctgatgaaggtggtggtggaggtgatggtggtggtggtggtggaggcgatgatagtggtggtggtggtgatgctggtgaaggtggtagtggaggtgatggtagtggtggtgatgctggtggaggtggtgatggaggtgattgtgatggtgtgatgctggtgaaggtggtggtggaggtgattgtggtggtggtggtggtggtggaggcgatgatggtggtggtggtgatgctggtgaaggtggtagtggaggtgatggtagtggtggtgatgctggtgaaggtggtggtggaggtgattgtggtggtgatggtgattcttgaagggtggcctgccccaccacacctgtgggtgtttctcgttgggtgggacgagagactgagaaaagaaagagacacagagacaaagtatagagaaagaaaaatgggcccaggggaccagcgctcagcatacggaggacccctgccagcaccagtctctgagttccctcagtatttattgatcattatctctaccatctcagagagggggatgtggcaggacaatagggtaatagtggggagagggtcagcaggaaaacgtgaacaaatgtctctgtatcataagtttagaaaaggtgctgtgctttgatgtgcacatacataaacgtatctggtgcattaaagagcagtatgccgccagcatgtctcacctccagccctaaggcggttttcctctatctcagtagatgggatatacaatccggttttacaccaagacattctattgcccagggacgagcaggagacagatgccttcctcttatctcaactgcaaagaggccttcctcttttactaatcctcctcagcacagacccttcatgggtgtcagtctgggggatggtcaagtctttcccttcctatgaggccatatttcagactatcacacggggaggaactttggacaatacctggccttcctaggcagaggtccccgcggccttctgcagtgttttgtgtccctaggtacttgagattaaggagtggtgatgacttttaacaagcatgatgctgccttcaagcatttgtttaacaaagcacatcctgcatagccctaaatccattaaaccttgagtcgacacagcacatgtctctgcgaccacagggttagaggtaaggttacagattaacagcatctcaagtcagaagaatttttcttagtacagaacaaagtggagtctcttatgtctacttctttctacatagacacagcaacagtctgatctctctttcttttccccacaattctggtgaaggtggtgatggaggtgatgatagtggtggtggtgatgctggtgatggtagtgatgaagatgatggtgatgctggtggtggtggtggtggtggtggtggtgatgatgttagtagtgtgttggttctatggttttggtgctggtagcactgctggtggtggtcatgatgctagcagtgtggtggttctgtggttttggtgctggtggtggctgtggaggctgtgctagtggatgctgattgctctggggagtgttctggtgcaatcccatttagtcctctgctctatgaggtagatcttattatcctcttttatcaacagatggaggcctggagtaattagtcatacgctgacatcctcacagatgacaagggagggacccggtgcccaggcctcctgtggtcagtgccttccctgtgccattcttctcgggcagtgctgccaagggtcaggtggcttccttctggggagcctggaccgagtgaacatcccctgtgctcagcgatgccccgtgtgccataaaacagtgtctgcaggcccgctgctccgaaagtcaagatgtggagaaggagcagctcaagcgtgcactgcccaagccacaagtgcaggcctttgtgaggtcaccaccctttgggtggcgagtctttgaggaggtgaacccccaccctttggagagagcaagtctttgaggaggtggacctgccccccagcccctgccattggtgctgccatttcgtcccttggtctagagatgaggccccctctccgagtttgctgagctgacccttcagtccctgtggccagcttcagggtgtgcatgaggctgtgacctgatcatgccccttctctgcacccatgcggcccacccccatgttggagacacagatgtgtcattttgcagccttgcacccagagctgttgtgagtagacttgaccctacacgtcttgggctggtggctgcaggtgagaattggactgggactggaggcagcgagcgaggacatggcggggacagcagaaagcaatttccgacgacatgaaaatatttctctgacactctcgttaatagtgtgaaactcgttctcacaggtgctgtgaaaaccatggaaaaaattatttagacctcactggcttgggggcattttgtttttccattttgtatgactcacggatgaagaacatcaaagcgagattgtaaatgtgactggtctggcccctggcagctggaatggggggatctggtggtctcctacgtgcgcagcgctaaggacgtcaaggaagtgcctcgtggagaaggggcaccggtggcgtccggccaggctgctctggcagtgtctgtcagaatccgccgggcccagcgggagggaagccccgtgcaagagactgctgatgatggcactgtacttgcggggaacgcagtcgtgttcttagctcctgtttgcagagcccagggccagactccaccctcccagcagcctctggggccagcgttgttccatccccagcttcagaaggggaaagaatggtttaacgtggtttgcgaacacacctgagatcactcagccagcaaggggcaggattcagatgtgggcccaggtgaacccagctccagaccctagcgctgcccgtggctctcccggcctccgtccctcccagtcagcgtgttaactcagctgggctgcgttttgtatgggaggttggacaacgtgcccgcctgccaggacaggggaggtttgtggcagggcctggcagtggcagaacaatctctcatggacaacatgcttgccgaccgcttctcccacagcctcgaacaagaagggtttgtcttaaatagttatttgtgtctctctgtttaccagcacgaagtgctctggctaaaattagatgataaagtctgtgggacaagcagagtgctcagctgggattcctgtggaccctgtttcggttggacgaggagggggcctgggtgccaggcagtcatgggggggctggctcaacccagggatgggggatggggttgaaaggaggagtgcatgattaaatggcagaggaggcactgagcatgcgattagagggagcagcagcatgagaagcagcctgggctggggggccgcggccacgggagcctctaatttggtgaggtccatgtttcccgtctccatggctccaggcttatggggctctccaatgaaaactttgcagtttcctcagctcacaacagagacgcagcctggatacggtctcattagcagaaaaggcagaactgattctctcagcaaaatgctcccatctctgccagagccaaggacaacatgctcccgccgtggccgccgacccatcttccgtcgaacgtggccgccaactgtgccgtgggcaggggctctgcagcagagcggaatggccgtaatgaccctggcctggtggcggaaacttccagggcactttaatgacctggcagggggcagaatccaggaatgtaaagggggaaaatggtcagttatcagagcgagggatggcatgaaaacagctgccacctgcttctttgggcagccacagggccagctgtctggagccgctggtgctgggtcttggcttttaaagttgagcagagtggttcaggggctcagcccgggaagccaagacgtggaacaggagaagcctgaatctgccaggcgaattgggcaggtgcctgcccctgctcctagggctgtgtgggtgatgggacaaagttttgggaactgggagcccacggccgttctgtgtgcaggatgtgtgacttggcacgatgtccttgactccaaggtgggcagctctggggtggggactgtgggggctgcaggcagagactcaggagccccagtcagccctcctcccatatggcctgcgagagtggcgctgcctctcagaccctccattgctgcatctgtgaaatggggatgggagagtggaaaggagaccttgccttcctcctgggggggctgcaagaatgggagtagggccagacctgtaaggaaagtctcttttgccgaggcgtgaggtagggctgggaattgggtcagtgtgaaacaccagggtctttcccgaagcatgccgggcacaggcggtgcacgctgaggatatctgacatgtcaacacaacctgtcacgttggagcggggaagtggggtgggcttaggacaagcagcctcaaagaactgtgggctgttgttgagggaggggactgagtcccaggcacctcggggccatctccagtgctgtgccaggacccatgtgtgccacacacatgcatacctgttcacatatgcacacaaggcatgccataccatatacatatgcataaaagtgtgtgcatgcacccatgtcacacatacacatgcatgtatactgtgcacacgacgtaggcatgtatgtcacgcacacacaccgcacatgtgaatgcaaaacatatgtgcacagtacacatatggcctcctgcacccatgtgcacacctgcatcaacacggtaccggacacatgcacgcacacgtatgtatgcacacacacagtgacacaacacaccagccaaccccagatcctggcgcttggcctgcaagcgggccatgggcctacaagtgtggggttgctggctgggcttccctgcgtccagtgggtgtttggccctgcaggagggctggaaaacagcacgaagaggacagcagcaagggagacccagcacttcacacactcatctcatggccagggcaggacaggggcagggcggcacatcatgctccatatcctgggtggtgatcggcctctgcctttccagggcaagggggcggctcaggaagtaggcggctgccatcgttggtaagaggacggaggatggggagaaagcaatgaagggtggagaaggggcgtgtctgaagaaggtcggaggtgacacctattgccctgctcagggattggatgtgtgccatgaaacctggcagttagatgtgacatcagaggagagccacaggccactgctgggcagggcatcaggttggttccttgcgcttgtgtgccaggggctctgatagcacctgggagggggactgtggggaccatgggcctttctgaggtcgtggtcaggctgcttggaggttcttggggtcaaagtccacccgtctgagagggcagctgcagctaagaaattcctggggtgcctcagtgcctcaggaagggtcagggcacggcccactgggcaattctgacctacagccggcctcttagagacccagggttgggtcctggaaggctgcaggctgaggtctctctggggtttctttggctgtgcgtgcgcgttgtgacccagccccaagctccagcttcctgtccccatcccctgaaaagccacgagctcacccaagcccaagcaggggctgcccaccagcccctggccctttgtttccaggccgccagcacctcccgccggccagtgccgggcaaggctccaccaggagaggaggcttcatcgaccaattttcctggtctgtagtttggagcttggtttcatatcacaggatgcactgtgaaaatgctctcagcatacaacatgaagtcgtgatcctagctttgtatttgaaagacagtgtgcgccagattatggcggtcgggctgggcatgtcctctccagcacactggggagtggctgccggaagccctgggttgagaaggattctgagggcaccagggcagagttctgcctagggctttcgtgagcttcgggcagagctgtgtgtttggtccacacagcctggagggggtcaggggaggctgagatttcctgtgatgaaatggggagactgtggctcccaggggctggttgcctggctggtaggtggctgggctggacgtctccacatgctgacctggcttccagagaggagccgactctgagtgaatgttccagaaggaggagtgcaggctcaggaactgccagggtaccactgacagaaggaggggcgtccccgcatccacagctgccttcaaggtctgtgaggggcggctccaggcctggctgcatcttagaatctcatgagcagttatggctcctgaatcccagtccccgccagacccaccacatggagtctctggggatcccagggttccgcgggtgtcacctgctgggtaggacacagtgtgtggctgcgcgtgagtcagggaagatgcctctctcaccctggacccatcacatctttcatcagtctagtgatggacacaggtctcagggatgcaggaggacttcagtgtggccctcactgtctccatccaggaccccccatgataaccctctagagccccctcaactgtccccatccagggctgtcagatgtcccccccatgggacccccatccagggctgcccaggctcccccatagtaccccatctaggaccaccctgtaacctccccatagtacccatacagggctgcccaggaccccccatgaccccgttagggctgttctgtgcctctcgtcaccccatggcaccccatgactgtgtttggatcccatcactatctcgtctctgctctgaacactggactagccaccaacccacagccccgagggcagagctggaagtcccatgcacctgggcctctggactcgcaggaatcaggtggccccaggggtggcccagggcagaggcaggtgtctcactggagtcctgcggggtgggttacagcctttccctctgcttcagctcctcctccgcccagtccttgtgggggtgcagacatcacagagccctcttctcagccctgcctggaaggtggcacagaaggagcgctagctcgtgcagccatggggctggcccgtgggaggttgctgggcttcaggggaggcatccgctctgtcttggagcctggagcagatccctcactacggccccatctgcctggggtcctgcagagaagctcctcctcaacagccttgctgggcacccaggtgttcagggtcccctccctcacctgcatgtgtagggaagaagcagtgggtgggctggaaagagccctgggccaggatccaggtctagagcgaccctgcttctgcagcactctgagcctgagccttagcacctgcgcctcggtttctccttctccacgggggtggtgtagggcctggcagacccttgccctttggcagtggtgcccgcagaacacaccggctctttctagtgtgaaaatccacctgaggatttggtggggaaatgattcgaacgaagcacgtgcatttgcagaggagggggttctcgaagtgaagggacctcatgcccagtcctactattgtctgttcactgctgcagtctgggggtgtggtgggcaggccacaaagcagggctggctgagggccaggtcagcctgggatcagagcgccgggcacctggggacacctcaggctttgtcccgcttcgtgggtgttcgttacctagccttgggccctgatggtcgtgcaggtgtgcctgggtgctgtgtgcccacaagcactgagaccagtgccagcaccttatgcagggcctgcaaggtatggccgctgtgctggacaccctggggtacggggttgtgccggacacgcccatgatccaaggagcttggggcttccggggaagcagagctggatccaggggtgcatcagggcccaggaccacagctgcccctgaaggcccctgaggcttctcttccttctttgaagtgcctttggagaacatatattcagatgtcaaattgccagttgaaaggagaacatattttatttgaattggatgaaatgtgatccagaagtcatgttgcttaataaaagtgtgtggttttgattcactgttcctccttgtctgctggagaatttgaaacatgggccaggagcctctgacatccaaagatgggggagagagagaaggagaaagagggagagggaggtgaggcaggtgggcagctctgctggcctcagcgggtggagagtggggcatcccgtttgagggttggtgtcggggagggaaggtgtgaaatgctgagggctgcgctaatcagggccccactcttgcttcctcctcaaaatgcccccagtttactgtgatggggtctcaggggcagggggcagcagcaggtagctgtcctcggtcactccccgtccccgtgctctgtccctttgtgggtcacagcccccgaggtgaagtctggaaggagaggaacctgtcacccagtgccctcctcagcccagcagatgccccagcccagggaacaggtgcaagctcagctcccgacgaccgccaaccctcagctgcttcctgcaccgctgtcctgaggcaccactgtcctgaggcaccctgcggagaggaaggacccgggttggagggggctcggcggtgctgtccatgatgtggggtgatgcggggggttcagtccctgaaacttcagatgaggcagtaggtacgtggcggccagggacgccccatgctctgggcctgatgcctgcagggagagcacccgtctctgtgctgctccatctgttctgagatgtggagacaggggaggcagggctgggtcagctagtgtcaggggccccgctgcacacataggctccaggtcctggccactgcttctgtggctctgcagttgggaccagtgatgtctcctgtcccagcctcttctatctgttaaatggaggtgacagaaatttcccttgtgagtcctgagtcctgcaagggaacgggtgctggcgtgcacccaggcaccggacggacccctgaaccctggctgcacccttctggatggggcgaggcaggggcaggtgggcagaagggctgtggccaggctatggcacagtagtgccgagaaaggtgggtccgtctgcctctgacccagaggcaggtatggatgtggatgtgtggctgaagtcaggagcaggaacttaccacctggcagagctgctgcctggaatgttgggtgggcttggggagggttctgagctcctcgctcatcatttgaggtttttaaacacaagttggggtcacccacgataaccacagacacataccccactctcttcccctttttggtgctgagagccgtttcctgttgagccccgaggtcctcccctcggcccctgcctcgcaccactccctcccctctcaggagcactgtcctggctgctgtggcctcttccctgccaccctctcacacctgctgttgggcccccaccctgtgtcctgcatcagccccctgctgacccccagttcctccaaacctactgcctgctgagggcttttcctgagcacatgccttcccccattgacctcaaaatcttttgcattacttattgagtgccttctgcatacaaggagttttgcctggaggactctacagctctgtgaggtcaatgctgccgttttatgctaattttttcagagagaaagcagggagcagagaggtgtgtgtgaacaggctcatcccaggccacacagccaggcaacggctggagctggcatgtgggccgggcctgtccggcagcacagagcttactgcttttccaagtgtgcctgcgggctgggattccctccgccccgcccgtgtgcgcagtggttgtgatgctcccacccgctccatccaagtctcagtgcctgtcttgctgtggccagaccctcgcaccaaaagtcttcgtggaagagagcagccctcggaacaatgatgggtgtgcgcacagagctcacagctgtgaatgtctcccagcccttcccagaacactggcaccctgggagtgagggtgactcgccagggtcagaagtacacagcgcaaagccacgtcacagccaccgcggctgcaggccagagtcttcaaggcggagacaaagctgtcactagactcctcctggcccagagaggggcctcggcgggggaggtggtgcctctgcttggatggagtgaaggttccgatgaaccaggctcaggtgaaccaggctcgggtgaaccaggctcgggtgaaccaggctcggatgaaccgtggagaacttgccatcctccagatggggttgggcaccctgaccctgcagcccgctggctactgtggctctggaaaagtgtgcagatgtgatgcagggtggcaagatgagctccagacccagagcactcagcacctggccctgccccaagtccccttgcctgcggcaccgtctctggtggcgggaccggagacgccaccgtctccaggaccggagcacctggacatggtcctccaagttcttttccctcccttgagtgtggtggggcgtgtagtggttggcatcttgcaggctgccttgggctgatcctgccccagctgctgggggaccctggacaggtgacctcacaggtcctcggtttcctctgttgtagagtggggattagtcggacacaattcatagggttcttgagggcacagagagaccaggtgcaggctctttaccttgtacttgatctgtggtaaacatgatctaattcgtcatcactgtcattactataatcattactatattggtcggcttctatgcatctgattatggtcaaaagatcctctgctttggaacacccagggtgctgccagggtgactcctagcgtgcctgtcatcttcatctctgcagatagcgtttatgagacctgcatttcttattcctactagcagcccttttatttctcctgtgtacacattgtggtgagagaataatggaataaattgtttacacatcatggttagaggaagaaggaataagtgcttgcatgcttttcccggctgacacagttagagtgtaggctgctcacaatgaatccgaaagttcagttgttagcagtgtgggttcatccgccttgtagtgtggggcagtacttccttcccttttgtggttgaatgatattccattctatgcatataccacactctgtttatccatttagctgtcggtagacatgtgggttgcatttatcttttggccattgtgactaatgctactatgaacacttgtatacatttatttgtttgagtccctgttttgtttggagggtgaactgatttgggtgaattgtttatgcatctgtttcagttccggagattggaattactggtcatatggtaattctagttttaactttttgagaaaccagacatcacctctttaaaaatactctcttccccagtggttgaggggtaatggcaaaggaggcagggtacctccaagccctcggggtctagggcgggtgagagtgcaggctgtttctcacaacaggcaaaagctgccagcactgcactggcatctggcaggtgctcaacaggtgtctggtaaatggatgagtgaatgggtggtggattgatgggtgggtgggtagatgggtggatagacagatgaatggatgggtggatgggtggaaggatgagtagagggacggagagatggatggaaggatgtatgtatctggatggatagatagatggatgaattaatgagcagatagatggctgggtggatggatggacaggtggataggtagatggatgaatggatgagtggatggatgggtgaatgggttgaaggatgagtggatagatggatagatggatagaaggatgtgtatgtgcagatggatggatgcatggatggataagtgaatgagtggacagacggatggaggagtggatggatagagggtttaatggatggatggacagatgaatgggtgaatggatgggtagatggatggatgggtggatgggagaatggatggatgggtgaatggatggaaggactggtagatgtagatggataggtggacagatgggtgaatggatgaatgaaagagtggatggatggatggatggatgggtagatggatggaagcatgtatatatgcagatggattgatggatgagtgaatgagtggacagatggaaggatggatagatggtttatggatggatggataggtgaatgggtgaatggatggatagatggatggatgggtggatgggtgaatgggtgggtgaatggatggaaggactggtagatgtagatggataggtggatagatgggtgaatggatgaacgaatgagtggatggatggatggatggatggatgggtagatggatgagtgaacggatggatggatggatggatggatggatggatgggccagcctagcttgagtgtcttttgtgagtggcagcttctagggagaatgtttggctctgaggacaagctcgtcttgtggcttggtctggactttcccctgcttcaaggcatggggctgtgtctcccaggtccccatgcgagtgctctgtgagctgctttttcatgagcgtctcttcttttccagggtgacatccagcagctgctctttgtctcggaccaccgggcagcttatgattactgtgagcactacagccctgactgtgacaccgcagtacctgacaccccacagtcgcaggaccccaatccagatgaatatgtgagttaactctggctgggatcttggggagcatgagcagactacttgggatggttggtgaagagacacataagccatgggacccttattttaaataaatccactgggtgagaatttggagggacctaggaggtaaacattgggatatctgactcactttactaaatagcactgcccagaatgatagggtcacagagtttgtcatcaataaccctctcctttaaccttttgaacaagctccttgatggtgaatgcccagtgctctctcacgcttgggcttgaccttgatggggtatttgtgagcacagatgccacaggtgtcccccatggactcgatccactggaggggccatgtgcagctcgccaaagaggacggagcctgggcttgtctactgtagaatggccagccctcggatcccttgagtgtaaagtgtactgtagagtggcagccgtgcctgacacctttgtccctcttcctgggacccgccatgtccatgggtcagctgtcctccccctcccgctgcacaccctcgcggcactgcagtttttcttatttgcagttcttcctatcacctctgcatgaaaatgctctcccactccctgggcccactgcctctcatttctcatccgtaatattaaatcctgtttatttctccttgggtcttccttctttcaccaccagtcaggaaagaaggaagggtagctttcaggaagctgtgggaccccgtggcccaggccacatcttacaaaccccaggaggggcaggacagagctcccagccgagtccctgctgccccggcctcctgccaggctcctcccagctcctggtgtgggaatgggctcaggacaaggcctactctgtcccactgaagccctacccgtggggtccctgggctttgaggcttggggctgaaggcccgggagcctgctggagacatggtgacggctgcacagactgccattctgttggttgttctggcctgggttccaaagggccagaagccttcacctttgagggctcatctttctctgactgctcgaggggacctggtgttccccctgctttctctcttgtgcttctgatgaggctgcgtcagctttccaaggagctggagagggaggaaccccatccggggacccacagggaggttcacgcctggggctggacggggcgtcgtggcgtgcagatctggaggttgcggaaggaaggacagcaggctggtcgctctgcgggctccgctgcttcctcacggggccgcaattcgctttcagtacacggaaggagacggcgagggtgagacctattactacgaatacccctactacgaagaccccgaagacctagggaaggagcccacccccagcaagaagcccgtggaagctgccaaagaaaccacagaggtccccgaggtctgggctgagcgggggactgggttgggctgggcccctcgaggccatggtgcaggggagggcgaggccaggagaggttgtgtcagggtagagggttgggggctgtctggtgaaggttgcgggggcagctcagtgagggagccggctgttgccatccgagctttgctgtcacggggcgtatcgggctttccgcagtgaggaggacgttgggagatgccaagtatacaggggagcatctgccagcatctctgggccctggccccggtccccaccctgtacgaggcacagggctctagcaggcccaggatgagtttggttctcgggttccttaagtgtgggtgcagctgtggtgggagaggagagaggagagctcaggggctcccccggggggtgacgcagtctgaggtcggcctcgggtcctccccgctctgggctgtcatcccctcacctctgaaattggggagggttgtgagggtgcgtgagcggcagtgagagccggagggtcacacctagcagggcccgggccccgtgcaggagtgtgtatgggtgggtgtcctcctggggaggaggctgtccagcctcagagccattgtcagaggtaaagagggtggggtgtgagcatgggcggtgtgtgtgtgtgcatgaacgagtgtgtgtgagcatgtggcatgcaggcacgggtgtgcttgagcctgcgtgtgtgtgagagtgtgtgtgagcgtgtgtgcatgcgggcacgggtgtgcatgagcctgtgtgtgtgagcgtgtgtgagcgtgtgtgcatgcgggcacgggtgtgcatgagcctgtgtgtgtgagcgtgtgtgagcgtgtgtgcatgcgggcacgggtgtgcatgagcctgtgtgtgtgagcgtgtgtgagcgtgtgtgcatgcgggcacgggtgtgcatgagcctgtgtgtgtgagcgtgtgtgagcgtgtgtgcatgcgggcacgggtgtgcatgagcctgtgtgtgtgagcgtgtgtgagcgtgtgtgcatgcgggcacgggtgtgcatgagcctgtgtgtgtgagcgtgtgtgtatccttccagggaaaggtgacctggtcatctcacattgctctgagagcctggagtgttttgctacttttgttttttaaatactgagatatgattcacccttttctggtgtgtaactgggtgggtttgagtccattctgagcacgcttagtaactgggggcttgcagctgggctgccttcttcccacttgctctgcccccaagccccatggatgggggcggcccctgcacccaagaggtctctgggcctcttgacaggcctgggctccaggcgttgccactgagatgcctgcacccggacatgcggcaagtcccagacctggcaccactgccggcctccgccctgactccagctgtctctgtccttggctcccaggagctgaccccgacccccacggaagctgctcccatgcctgaaaccagtgaaggggctgggaaggaagaggacgtcggcatcggggactatgactacgtgcccagtgaggactactacacgccctcaccgtatgatgacctcacctatggcgagggggaggagaaccccgaccagcccacagacccaggcgctggggccgaaattcccaccagcaccgccgacacctccaactcctccaatgtaatttctttccttcccattggtttggtctggggcagtgggccaagggccagggctggggccacaatgctgagctcccttcttactccagttctcaccttggtgtcctcgggtggcccctgtgttccaccacaccctggccctgggccctttgcagctgggtggcgtaatacttcccaggggaggccattgctgaacaagtttggaatccctggtttgctgagttcatctcaatgttgtcaattttttgcctggaaaatgggtagaatgaccctagcccttccggtctttgaggattcaggtggaaattggatgaggaggggggtggcttgtggacagagtccctgcctgtggcctgggtgtggccaggcaggatggggctgggagccaggatccagacaaatacagcgaagcaggagctggggccgccctggctgggacgggggctgactgtcagcagacaggcctgaaagctctgcccgagaccttggaaagttagtctgcgtctctggacctcgcggttctcctttccaacatggcactgacagttcctgtctctgggggctgtgaagttttcagattcaggaggagccttgcgtagtgtgtagcacatggccgatgcttaacatagccactgtgtgatgcagaatctccactgccagagaggacacctcgttccagcaggtccagacccctgcgtctgcagcaccgccctgggatgcattatcgcaagaccctggggctgtggggtgcagcccctgcctgagcgggtgcacgggtgtgccagctccatggtgtgccagctccgagttgtcagacctggagccctcagaggaggtctctcccagaggggggtctctgcccagttgaccgggtagccatggtgccagcacagggcctgatggatctgggatctctgcccagttgaccggatagccacagtgcccgcccagggcctgatggagaggcagtgcctggtgcgtttgcgaggcaaccctgcgccttcctctccctctgcagccagctccgcctccaggggaaggtgcggatgacttggagggggagttcactgaggaaacgatccggaaccttgacgagaactactacgacccctactacgaccccaccagctccccgtcggagatcgggccgggaatgccggcgaaccaggataccatctatgaaggggtgagagggtgcaggcccccgttccgggtggggttggggggctggtggggcatcatgggggctcctgcccaagagcctcctcaggggtgggcctctacgggcagctcaagtgttacaccctattcccaaaactttatttttaaagagacctcggtgcctcgaatttgctctgaataacgtgtgtatcggagcatactctcctctgggcctgtttcttcgttagtagtcacatgggctcccgtgggcctggcctctgtcacgctcctgccatcctcctgggcctggggagatgcccagctacgatagtgccctcggccttgcgaaatcgggcagattttgtgtaatctggactttctttctcacttttctctctgattctctttccatctgccttttatcacccccagattggaggacctcggggcgagaaaggccaaaagggagaaccagcgattatcgagccggtgaggacattttctcattccctccctgcgccggggtgtccgctgctcggggtcacagcggggtgtgtagggtgtgaacaggtccgtgggcccctgcacctgcgcgcactgggtcacttcgagcaaccacctggtctcgtggagtccacgcaccacttgtccccaggacttgtgaagaatccccttgggtaggggatgttctggactgtgatggagggggcgggataggtgctgatcaaagccggtcctgcacccaagctctgggcatctcagtgctggtcagtttcacctgggatgaaaagcagctcagagctatcgaggcggaggcggagtcccctttgaggggtggaggagaggatgtaaatggcccattccgtgtaaaagatgcgcgcggcagtggtagggaatagttaacacgtggtcgtacctctctgcgtctgttatgcaaccgtttggagtaagtttacagaagctgttgaaacatggaatactgtttatgaaactttatcaagggaatgaaataaaacagcactgtgctgaaattccagctgagtaaaacccaactatgttaggtaatgagatcacgggtgagttcaaaaagttactgttgataatgccctcaagcgtgggactgtagcgaggacgttctagatgcccctcctggttggcgcgtttggtgggggccctgccccatactggggtgtccttgtcccatagggggccatggcctggctgggaggcctccagttctccctggggtctcagagccactaaggtcttgatgccccgccccgccgccggcaggcaggatgccctgtgatcagctgggcagggagtcctgccgctgcatgtggtgggcacgaccggagagcagggaggagccagcaccaaggcccaccctgccatgttgtccaagtgcccacaggaggaggtgtgcgtcctgcaccacggccagtcatgaggctgggggcagctgtttgttctgccgccaggactcagttcctgagggctgagctcaggatacaccttgggtctcccagaagccccctgaccttgcagttcccagaatgtgcagtcacagtgacccgccaccctactgtagagctggggacattctcttggaaccttgacggatggcacttagcaggcctttatacccctggaatctctttgaagcccgtggccagggcagacgggatgtgtcccatctctggggtggaattcccagggtccagggcttcaccccttcctggcctatggaagcgtctggatggctcttgtggggctctatgcccttgctccaggcccaacccaggggtgggacctgccggtgcctacagacacatccttttctcggaccccctttccagtgctctctgggggtccagggaagacagagcttgtctgaggcagaagggtcatgggctgcagggcaaaggggtgcagaggcatgaaaggagactctgaggccaggatccccctgctcagcattgtggaaaacctcagagccaggcctgggctcagggaccagagcagctgtgggggagagtgactgccgtccgcctgggcggactcacccagaagcagggggctgcgggcctgttctgctctgcccaagggtgtttgccagaaggtgaacaacagcagaggctacatccaaggtcccagccccaagctacacttgttattgagaggtgggacatccggttgcatttccccagacttggcccccaggtagacttgaggttggccttgggcttcttttgtgctgtccccattgcttcagtgaaagggggtccttgctcggggaggaagatgggatctcagggtgggcaggtgcccctggctctgcaggatcccagttcggtttcccctccccgctctgggagggccggactgaaacctttgaatgagcttcgtgttggctcatgttcccgagtaagctggctctgtgagtgtagacgtggtgtctgggctccaggagggggttgggagtgtggggtgggcacaggttttccactgccaggcacccgggaaggcagcagtgggcaagggtgggccaaggagagggccgagagtcgaggtggccccacaggaacatcatggctctggaaagtccagttcacctttgttgggaaaagcagcagccgtacaggaacatcatggctctggaaagtccagttcacctttgttgggaaaagcagcagccgtctgggtgcagttaggaaggattccctcccccgggccccagcctgctccaagtgtcctggggcctttggccaggccccctgcagagatcacataaacagttggaatttctcaacctggaacgttgccagatatccttgggtccaagctgcacataaacagatggccaggtcctggggccctgcgggcgtcccggcctgtggaagggggtgtctgttgtctgccccacctgagctccctcttgggagatgcatctgttccaggggcatgcccaggtctttcccactcagtcccgctccctctcattgtcagccagaccagaggctccctaaaaggacaggaatccacggaaccgagaggagacaggttcatccttatccttgtgcttccaggcaggaagcccccagactcagtggctgattttacctgggccacatccattaggggcatccaaatcaccatctccacttgacactgttttttgtttttaaaatatgtgctgtttaccagatgggtggaccctccattgagattgtcttgagttctgccaggtctgaggtcttttatttcttttgttaaaattgtatgcattcggccgggtgcggtggctcacacctgtaatcccagcactttgggaggctgaggcaggcagatcacctgaagtcaggagttcgagaccatcctgaccaccatggcaaaaccctgtctttactaaaactacaaaaaaattaaccaggtgtggtggtgggcacttgtaatctcagctactctggaggctgaggcaggagaatcagttgaacccaggaggcggaggttgcagtgagccaagattgcgccactgcactccagcctggacagcgtgagactccatctcaaaaaaaaaaaaaaaattgtgtgcattgaaggtgtgcagcatgtttgatagagttacccaggcacagacagacacagtgaagtgatcctgcacccaccaccaccaccccatagctgcctctttttcttctttatggtaaaagtgcctaaagtgtactcttttggcaaatgacatctacagtgcaatatcattaactatatcgaggcgttttcctctcgttcctctttcgctgggtcaattttgagagtggcgtccgtggttgggtgggccggggcgggagcggggccacagcttgcctgggaaggttcaggcatccccaccctcaggcgcattcatccagctgttcccagcttccttcagacgctgacctgggatgatctggtgttggcttccctgcaaggtccccgcccgcgttgccccagttccctgagaaaagcaatttgcgtgtctgggaaggcagctgctgtccctggccccttgatggccagtggtttctcccttaatcccagctcagccctgggctttctcagctgcctttgtcagagacggaaattggaaaactggcatcttggaggctgcttggatgagctctctgtgtacagcacacacacgggtgtctctctgagtgtgcatctgtgtaaacacagtgcagagctccccagctggggcaggatgggaggggtggggagatcggtgttccccccaaccgggagtcccctcatcagcctggtacccagcacctctggtgacagcctctggtggcctgtggcctggctggacatctgcggcccccccagccgggagtccccttgccagcctggcacctagcacctctggtgacagcctccggtggcctgtgaactggctggacatctgcagccccctggccgggagtcccctcaccagcctggtacccagcacctctggcagcagcctccggtggcctgtggcctgtggcctggctggacacaacctttgacttgtcagaagtgagcttagttcattgtgagctgctgttacagcacaccacagtcagggtgatttagaatgaacaggacttcattggcccacagttctggaggtcaggaagtcacatatagagggaccacatctggcgagggccttcttgctgtgtcctcacatagcggaaggcatcgcatggtgagaaggagcgggagagaaggtgactgctgccatcctgtcatcaagagcccactcccaccctaacgagcccgctcccatcgtagctgcattcacccatccaggaaggcagagcctggtgacctaatcacctcctgaagatcccacctctcaacacggttgcattgaggattcagtttccaacacatgacttttggggagacacattcaaaccctagcacattctgtcccagcccccaaattcatgtccttctcacatacagtttacattcactccatccggtacccacatcatctcaaaagttcgaagtccagagtctcacccaaatcaggtactgatgagacttaggctcaaattatctatcttgaagcaaatccctgtccagctgtgagcttggggaatgaaacaagcctcatgcttccaaactacatggtgatggggagggggacaggttcccattccaaaagagaagcatgaagaaaggggtagcagccccgaggaagttcaaaaccccacaggacgaacctttctagaataatctttcacttggtgtgccacctcctgggcacactggagggaggcggccccagggcctcaggcagcactgctcatacagctttgcacagcaggtctcaggagttggagcctcgtccttgctgccctcccaggctggcgctgtatgctggtgacgctacagtcctggggtctcaatggtgcctccacttccatagatccaccaggcgtcatcccagggaactctctgcagagcctctgcccctgtggctggtttctgcacgggaccccaggctgtccatgccacactttgacctctacgtggagggcgccatggccgcagttcctgccttccttccctgcagctgcaggataatcagtacccatgggtgtcgccgaggccacacccacaccctccagagctgagccagagctgcccctgggcctgctggagccttggctgggcggctgacgggtgctgtgtcgcaacgtggggagcagacacttgaggggtgcagggcagggaatgctgagttcctgggtacctctttgaaaatgtggtcccccaggtcctagcttgcctcaaagatctctggctgcctcggggtcattctccattgtcttgttgagtagcacctggttcccatctgtcagagcaagtcccttgaggaacagtcgccctgaagtcgtcatggaacacggaggactcttggggcattgggggtgcctgaccctggcgttgccaggtcagaagtggagagaggaatcccgccctggggaaggggtcggaagtgggggtctcagggcagggagccccgtcctgcagggagccgctcccactgctgccttcacagctgtccacattgcctttcccagggctcaggctgacccaagagccaggaggccctgtccccattggggttagagtgaggcctgggtgtgcttgaggcagatgggccctgtggtgaggtgagggccagaggaggagggctgagtgggcaggtggacatggcagggtttcccatgggttctgggctgctgcgtgcatgggaggatgcacctcttacctggagggaggcggggtctggaggttgcagccctggggcctgacggtggtcctggctggggacagaagttcagcctggagctggggcacctatttttcccttatccttcccaaatccacccgagtccccttgtcctggcatccacctcctccctcgagtggctttggcctggcggacctgcctggcactcccctttggggtgatgcagggagcctggcggtctcggctccttttcctcatctcggcgtcttcaggtgcttctcgtggcgctggtcttgcgggagcctgtgtctgtcactggccgctggcccgggttgctcttctgccagcgagtgccaggaggacagccactgaggccccaccacaggccccctttgcagtctgtgctcgtgactccccaggacagcaggagctgagccagggcctcttgtgcatgcagctgaaggccgtccacaccactggggtctggggtgtcgggagggatgggctgcggtctcagacgccctctctctgtctccccagggcatgctcatcgagggcccgcctggcccagaaggccccgcggtgagtatccggctttatcctgtgacttgcagaaggtgctcttggtggggtggggttggtgacaccccttatgtctcctggatggaaaagaggggggctctccgcttttgcagatcccctgggagccggcgctatcccacccccacctctgccttggttggccagttggaacttggaccttgccctgcggccccatcttctaactgccccaactttatttttaattctagggtcttcccggacctccaggaaccatgggtcccactggccaagtcggggaccctggagaaagggtaagaggttgactgtgtttcctgagatcacacaaggtgtggggctgcccacgcctcctctccacactgtgacccgagctgtccctgcctgtggaggtgacccagaggcttgtgtcttcaaatcccccctcacccaggcactcctcacaccagccccgttcagatgtttctggggctgaactgtggctatggggagagtggggcccctcggggcccagggagcctgccagtgctcagcccagacggtggcctcaggaccctgcagttgcccagcaaacggccgcagcagcagtaaccacagcagatggctccggggcctttcccactcctcgcccctgggcagccacaccacgtggaattggccaccccccttgctgggtttgggaacttccttggtctgggttgcacctggctcacaggctcagaggcatcctcgggtgtccctcgccgcgggaggagatggagggagagctgctccctggctgccgcgatttccttctgacacctggtgggcgctccaagtactgcggcctcctggtgtccggcggggcgggagttttctcttcctgctgttggaatgaatgtggatttgagtgcagaaggactaagaactgattcctggacagctggcttgtgggtgggagaaacaagggctgcgtgcgggtgttcgcgggtgttcacgccagggccctgcctgctgtccggggcagagtgaggaccctgtgggtgttgtggtgggtggatgcagggcagggtctggtcgtgtgagaaggtggttcgtgatgtcagagcgcagtggctagggatgcttcccaggttactgcacggggaggcgtttggggagtgtcttgtgcagtgcctggtggctttgcagcagtgctcaggaaaggcgggccagggcgcaggacagtaagtcctggccttggacctggaggttcttacaggtgctcagtacccctggaaagctggggaggggcaggacaggtgaggtcaggcagcaggatgcaggggcaggcggcggcagccttcttgggagcaagagccgagccagtggggatgcttgcttggggaggagatgggagcactgaggccggcctttggaggagaaggattcaggtcagctatgcgggaggaggttgttatcgttctgtgtggctgggtgacctctgagggcagtacgcatcagattgggccacacagtaagattctctgccacgttgcttttcacggtcagggatttggaggtccagaagaggcgggtcttgctccatggcaagggccgtggcgggaaacagagtggggtgggggcttggctggcctctggagcacaaagctttcacagcatccccggcctggcagccacatttccaaaactccagacaggcaacagcgagtggccgctgctcttgcccagccagcaccggccaaaactccagacaggcaacagcgagtggccgctgctcttacccagccaggaccggcatggctggagctctgtgctgggggctgcagccaccccagctcgctctggagaccccttcccccagattcgcgtgagatggggcaacggccaagctcctcctccgcagagctgcctgcggatgggtccacaggtgtggctgggttcgtatgcaaaggagagtgcattgcatggcactgggagctgttttctctcccagatgtaggacagggtggtacccacagggcacaaatgccggttgacacacagggcacccagatgctgactgacactgcctcagtggtgttccacggctccgtcctccttctatccatccagcgtacagatttgtactgagtgcctgcagggctgggcactgctctagcctggggatctcaatggtgtgaaccagaggggtgctggttcacacctcaccatgcggtccctgcctttgggctgatcctggcttgggagtcactggtgggtggccctgccagtgccttgtgacaccgtgacctacccagctgccgtggaggagccaagggccctgactggagaatatcgttggtttaggagctggtcctcctcaaactcacatcagggtccaggagcatgaggactgaggttggggttggcagaggagccaactcctccagggtctgccatccgtggagtcagaggagagacctggagcccaccggcctccccagggcccttccagtgagaggggtgctggttccaggagctgagagctgaccacccctctgggtccagctccggccagccttgttcaggaagccatccctgctcaccgctcagcgccctcttgatgtccagatcttgctcgatgcccgctaatcagctgtgaaagatcactggctatggggtgaggccctgcagtgcagcctgcggtgggccgggctcaggtgcctgtgcggcggagaaacaacattgtctctgccctcggaggttgagcatctggggcctccaaaagacagattaacaagagaagaggcatacgattttaacacttttaatcttctatgcacgggggcttcgcagacaagaagtaaaaaccaaaaaaagtgcttgggttcgggagcatatataccattttaacaagcagcaataggatgtggagaagtggctagaccaaggaaaagggggtttgggcttcgcggggtgacagatggtgggcaagtgactaggaactccatggaggaacgaatggaagattaaggttatcttggcaaagtctgttgatgcagattcactgggggctggcctccctctcaggtgataaggggcgctctccaaatcctggtacagaagcagaggcaggagggtggggtgggaggagggggtaatgccctgcttttaggcagaagaggggaggtaagagaactcttcttgcgtccgtcgattcttacttggcttcagcagaaaatagtcgttctgcaggggagtggcgtgctctgtcccctccgtctgcttggcctcctgtgcctctgtctgggagggccttttccctggggtctggaagagccctcttctccctgccactcccaacctcccgccttgggcttccccagcccttcctcccttccccaagggccgtctggccgtgaccggtttgtgccttttcttcctcactggatggtgagttcctcaagacaggcctcacttctgtgcccttcctcacaccctgctccctgtgggcagccgtgggcagccgtggcaattggctgggagccgtctgtgcacctgtgccgtggcatcccactgggtatcatgcagccctgaccagctgctgaagcccacaccctgtgcctccactggctggccctgggtgttgcttccttcacacactctggtgagccctgcacactctcccgctgctccccttggatgaccttccatgctgcatctgccttctagcacctcaaatcctttcttgctcttgtgcccacggctgcccgcagggagcagagtgcaaggagaggcacagaagtggggcctgccttaagaaactcaccgtccagtgaggaagaaaaggcacagaccaggcacggttagacagcaagaattaattagtaaaggcattggaggaagagctgggaatcccgagatgggaggtctggagcggctgtgtccgggtggagaaggggctcgaaccatcatcccatccagtttccctcaggtgactggtgagcaggtgcacagctggggcaatgtgcccgcagggagatagaggtagacctggggttgaactcagatctcctgtggcagaaggaaggtggccactcttactttgaggttcagaggaaacccaagagagctgggagtccccaagtgagctgcaggccaggtggccgttactcagcccctctctggcctgggtttcttgtgggtctggcttctgtgccacctgccagtgcgtttctgtaggggctgactcttttgcgcatccgggaatatagtgagatatcagtgggtctgaaatcatgaggctgtgcatttgtgaaggttccctatgatgccatggtggcagtgccgtgcccctgtgggtcgctgagcagtgtttgcccagcgaagcccttccctgggctcctcgggcaggtgggggaaggagagggctggggaccatcagtaaagattcaggccccagtgagtcccgccttccatggacttccagggcccacacctgctagcctcgatagaaacacccggaaggcaggcgccacctctgtgctgcttgtgagcgccccctacatccattcgcgtgtgtgccccagagctggtgtccacggatatttgtgcctaagaaatgttccctgtgatcagagcgtctttgaggcgagtcccttcctttcccttccccgtgtgcctctccaaaagccttgcaccccaggcactcctgtgttttaaggcagctcctgaataccgtccagtgttactgtggatttgattgcatttttcaggatgctgtggccaaactcctcctgaatctccgcagtccactggagagtttaacgttttcatctagaaataagcttgcttaccgtctaattgactcccgagagcgccagctggtgttgaccagccactcatctattgctcttaagagagacttcacacagatctttccacctacagcatatttattacttttgggtaaagtagcgatctgcttctgggtctgtgggcaggtcccacctgctggggggcctggatcctcctctgggaagccccagggattcagtatgcaggtttctttcccagccgcctcagggtcagagtggaggcagtttcccaagctttctccaaattgccacacaggggcacctcgctccctgcacagtgggatgcatttgatgccttgggaggaggcccccacccttcaatgaccccattatgtgcagaagcagcctggcaataatgatgctgcccggcgctgtcttatcagcccctcctgtcactcagcaggggctcaaaccttctccccctcttttttatgtgtccaggattagccttccccatgggattttgcgtgagtgcattttctgtgccttgaaaagtttcgtatgtaagccatgccctgaaaaacagcagtcactacctcccagccagaaagtgtggctcacctctacctaacaggttctggtgtggtctccccaggaccagccttggggtgatgccctgctatgccatcccctccccatggcctgctggtgctacacccagggtgggagaggacacaggctagatcactggcaacttgacagagtgagcaagtccactcacgagcacgcagctgctgtctgactccgaaggagttagcttcgagaaaagctgtggggaagaagcaagcagcatgggattcatttgctttcctggctcccaggctcctgtggatgggacacgccaatccagtctctccttgtctttagaagtgttcaggacatcttggcagagctgctcagagaggttcacacacacactcaagcacacacgcttgcacactcacccacacatgcactcacattcacatgcactcatgcacacacactcatgcctacgtgcacgcactcatgcatacatgcccacacatgcatacatgcacacactcaaccgtatatgcacacatgtacacacccacacacgcacacactcatgtgtacacgcacacactcacctatacatacacgtatgcatgcacagtcacccacacctgcacacactcatgcacacccccatacatgcacactcacacccacacatgcacacacatccacatatacatgcatgcacacacacttacacatgcacactcacccacacctgcacacacactcatgcacacactcacccagacatgcacacaggtacgctcacacacatgcacacacattcacacatgcatgcacacacccatacatgctctcacacagttacacacacatgcactcacacacctgcacacacattcatgcacatgctcactcatacatgcacacacatacacccacacatgtacacacattcgcacactcatgcatgcatgcacactcatccatacacatgcacacacatttacacacatgcactcacacacctgcacacacactcatgcacatatgcacacacccaggcgtgcacgtgcacacacatctacatgcacgcgtgcgctgtctgggttcacctccacacggcccttccatggaggctggtctgcaggcttgtgtgcccgaatccccagcagcctggtcgtgaatgacttctggccatttcgagtcacatttatcttcaaagcttagtcccctgaggccactgataggaatctgtccaagcctcaggtgccataccaggagatcagtgggaactgtgggtttctctgctgtagccctggaggcagtgtgtgtctcccaaagcgagctcagtgttgaagattcattggagggtatacattatcatatggaaaagaaaatcaagtacagtttgtggagagagaggtgaagggagcaaaggcctcgggacatttctagagtgaagggacagctggcaggagctgcatgaatggcgccaagtgcactatgctgtaggaccccatgcagggtctgccagggtgttcatcacggtcagttagtggcaatggctgggtgagtccaggagtctttctcacgtgggccccttaaggccgcaggtcttacccagagccccgattattggtggcctatggataaagagcccctcctgtggattttctggttgttagttctggttgaggggtgcggtctgaggcatcaggcttcttgatagggccccgcttccagtcttttagatgggccctagggctcctggaagagtgtctgtctagctcttggaaggggctcagtaggaaccctctcaatgaacgaacgaatggtgggttcatttctttgggatcctcggacaattgatgaccaacttggggtttaaagcaacaggaatgtcttctctcttagttctggaggccagaaatctgaaatcaaggtgtaggcagggccgcaccccctctggaggctccaggtgagggtcttcctcacctcttctggctcctggtggccactggccgtcctctgcccttgtagcttgccggcgcatctctgcagtctctgcctctgtcttcacccagccctcccctgtgtctctgtcactgcctcccctcctcttcccttacaaggactcatcattggatttaggacccaagatctcatctcaagatcctcactcccatcctcaaagaccccaagtaagggcacagtcacgtgtttcaggacctggatgtacctttgatgagagacccttcagcccaccgcgcgtggtcatgcacgtacgtgttctgcacagccaggagatgtccagcaggaagtgaccactgagagcttctcccagccactcccgagctgggcctgcccagggtcgggcctggacagaaccacatgcacacaaaggttctggagagacgcctgcacactgccctcctgctccagctctttccgagagtggaagggagcttttcaacacaaagcctcctgcaggcctacagctcctcccaaacctgccaccaccatgaagagaaaaggctcagagttctctgctcactgctttgacccaaatcccggcctggaaagaggccttgtgcctctcccctgaggttgagccgagggtctcgtggggacagtttcacgtgctgaatctgcagtggcagagggagccactttgtgaggcatctggtcacccagccacatcgtctctgtgcaaaggacgtctggacgtcctcaggaaagaaaccctgttagataccagtggtgccttcatttggaagtaggcacctgatttcttcacctggtataggtatgacactgagagccctcctgtgccagggccttcagaacattgctgtttgaccaagttagggcactgatttgggggccagctaatggagtaacaggaaaatacatgcaaatagcaaaggcaaggtgggatttcttattttgccatattttgcctgtggctggagccaagcagcatccgcatgacctgtgtgtgggcctgctggagcgttcccttggtgtctgacacctgccttgtcgcagacaacagccacatcgctggcccgtgctttgtgtcatgaaaattggaaatgtgactttgaggtgtagccgtgtctttcagcccaggggtcaaagtctttacgttagagaccacagggcttggcaaaggcttgctgacaatgtttctaagtgatagcaaatgcaggttcatgttggtggccctgaggacttgtgtcaaatttgaacacttcggaagggttcatgggggtggcgacattctttcctttcttctccacactgtctccttcttctaggacttcacgttatccttgttcatctacgttcccattctttggaattgttccgggtgtcggtgagaagcggcatcagagggaagttgctttcacagcctggggattggattttcaccaccgtggcttagaacaggcaggaaggatgctgaaaagagggtctttggaaatggacagcagtggacaaggagtggccttgaggagacttcctggcttcctacagcaacaccatgtgagcaggagcatgcatgcacagacacacatgcacacacatgcattcccacacaaacgtacacatgcatacacacatgcattcacacacatgcacacacgtacacattcatatggacgttcacacatccacacacacctgcatatgcatgcatacatgtattcacacacatgcattcatacacacatgcattcacacgcacattcacacacatgcagatacatgcacacatgcattcatacacatgcagacacatgcacacatgtattcatacacacatgcaaacacatgcacacatgcattcatacacacatgcagacacatgcacacatgcaaacacatgcacacatgcattcatacatgcagacacatgcacacatgcattcatacacacatgcagacacatgcacacatgcgttcatacacatgcagacacatgcacacatgcattcatacacacatgcagacacatgcacacatgcattcatacacacatgcagacacatgcacacatgcattcatacacacatgcattcatacacatgcagacacatgcacacatgcattcacacacacatgcattcacacacacatacacatgcattcacacacatgcattcatacacatgcagacacatgcacacatgcattcacacatgcacacacccacaaacatgcatgcacagacatgcatccacacatgcatacacagacatgcatccacacatgcatacacatgcattcacacattccacacgtgcacacacatgcattcatgcatacattcacacacatgcacacaccccatgcattcatatgcacacccacacacatgcacacatgcatttacacatgcacacacatgcctttacacatatatgcacatgcacacacacatgcattgatagtcacatacatgcacacacatgcattcacacattcacacacatgcacatacatacacttacattcacacatgcacacacatacacttacatccacacatacatgcacacacacttacacacatgcactgcacagacagcagcttgtccttgggagacactgaccccaaatcttaaatgcaaggtttggtttggaattgattccgacacaggaatctcagctgtaagtggctatgaggattgtatgtcaatgacaaaacctgggcggcaaacatgttttggatctttattttttaaacacgatttttgtcttctgagagtgttttccaaaatggcagttgggagcaattgggcagtatccattagcaattcagaaatatacacatatatacattctttgacccagcagcactgctttgagggacttacctagtagaatatgttagcacgtctgtcgggcagtgtttgtcataatgcaaactggaaccaatccaacgtgcatcggcagaagacgggttaaataaacaaggagtccattgtgcctgggagatgcaacagatgttgccaaggatatctacagagacaggccatgatttcaagagcaaattgcagaatatttagggacagtatcattaaaaagaaagagactgggcgcggtggcttatgcctgtaatcccagcattttcggagcccgaggcgggtggatcacgaggtcaggagttcaagaccagcctggccaaggtggtgaaaccccgtctctactaaatatacaaaagttagcccacgctggtgtggacacctgtaatcccagctactcgggaggctgaggcagagaattgcttgaaccggggaggcggaggttgcagtgagctgagatcatgccactgcactccagcctgggcaacagagtgagactctgtctcaaaacaaaacaaaaaaaacaaaactccgaagccacacagcctcatagtgatgaatgtgttagttagtgtgtccagcatgtgcgtcttcatctttgcctttgcacttacagaacttgagcactggttacatccggagatgaaaagggacctttcactttcactgtataaatgtgtaccttaagccatttcacaagaaatggagttacttctgcaacaaaaagcaaccagtaaagacaaggcaggcaagtttaggttcaggcccagatggctccacagccttctggatagttccagaaaaaccactcaggttcttggtctttctgtctgggagttgggaatccatcatgggtttcctggcagggagcgtctcactcaggtggtgtgaacacacatgctcagtgtagctgttgctgattcggaagactgcagccagcacccatccgctacactggagtgtaactggagtgtagttggtggaggcttttctcactggggagagggggttaagctccagtctctatgcaagacaagcctcatctactttaggccagctgagaatctgcttgcttttgtgaaatagctttgtgatcaaatattattttgaaaataaatcatcttactggttttacatgcgtatagtggtctgaagctggctggaattggtctagagaatccagtcctaggtatgtctgtgtggccaggttggctgggcgtgaggagggcactgtgtcgtttacatataagtgggttcttgaagttgctgtggctgagtgtgtgctctgctgtgttgcgtgtccatccacgcaagtggctgctccatcccgtcttccatctgagcaggcacaggcggctcgctcggagcccattaaggacaagtgcccactgggcacaggaggcactgggccttgagcctggagtctttgtttcctgttgggtatggagacctaaaaggggcgttcctggagcgacaagagcctgacactgcctcctcaccttcgggctccttgtctctgccttgaggccccagaggacgcctgctgggtctctggatttctctatatccagctcagacctccctcccttcttatccctccctccaaagcctttccgatcctcagcccacagccgtgcccctcccttctccgggtgggggtttctgaaacattcctgccacggggtctcacagcttctgtgcgtgtccagtgcatttcccgggtgggccgcttctccgacgccctcattctcgctgcagcccagccctggcctggttgcactctgacttgtctctcttggccccttgtcttcagggcccccctggacgcccaggccttcctggggccgatggcctgcccggtcctccaggaaccatgctcatgctgcccgtgagtacccttatcagtcggaggtggggaggcagctggggcaggtgggatccaaaccagaccctctgaggctgcgctgtcactggagaggcctgtgggccccgtctcagtctgtggtcttgcctgggtgccacgtcactgctcccagagtgacccttgtcttacacttgcagttccggtttggaggtggcggcgatgcgggctccaaaggccccatggtctcagcccaggagtcccaggcgcaagccattctccagcaggccagggtgagtactgctgggtcccaagaggcctgaaggggacagagcccagccccaggggccaacaggagtgagtgagtcaggctcagagcccaacttggagggaagcagctgtcttgatcccagaatgcctgcttgctggggtcaggagctgtgggagcgtccagtcctcagtgtccagtagggaccccgagagcatgtcagtgtccagtaggggctctgagagcatgtcagtgtccagtaggggccccgagagcgtgtcactgtccagtagggaccccgagagcgtgtcactgtccagtagggaccccgagagcgtgtcactgtccagtagggaccccgagagcgtgtcactgtccagtagggaccccgagatcatggggactgtttggggagtttctcagcagttctttgtccatgctgagggtccgggttctaactttacaaggggcttctgggcccctccacctctgacccagtaggcccaccttccaccgttggtgacctttgcctctgtgctaggccctctgctgggatccagaagtggagccggaaacccacgtggctcctggaaggggctgcctgggctggagctgggctcctctgggagagagcccttgggccccagagcccctcactctcagcctggggggtcctaaggagcagggtccgcagaggagcacttgcctccctattgtgaagtagctcattagtggcctgtgttttctgtagacttggctccggattgctgattgcccacgataggtgtaaacactgccccgtggggcgggtgggtgggtgggtaatcctccagcggagtgcaagaaagctgctaagtaatcccttgtttgagaaatatttatgcagctcccacagcagccagagtagatgttaatgatcagagtgcttaggtaattacaggacagtgtaagcacagagtcgttaccatggagcaaattgcctgaatgatggaaggtggtgtgtagcaaaccccactacctgccactgggtttatgggcttgggcctgcctggctggccttttatcttgtgtattttaattgaagctaaatggatgataggctataagattttataatgcaaaacaaaatattctaaaattcagatggcatctgccagggaaacagagtcacttggcagctgcagaagcggctctgtgggaaagcggtgggccctgcactggtgcaggtgggggccacatgcagagggggcaggtgggttcctaccctcccaaaatacttccccagtggctgggagtgcttgaagcgcctcccatgtgaaataaaatatgtcatgactcagcttgagctcaggtgtaaaatgtactccctatgcccagagtaagaggcttatttctgacctagccaagggtgatgggctgggagcaggccctctctgtgtgggctagagagacaggaaggagggatggggcctatcccccaagggaggaaacgggggcccactggcttgcacctctgcatgtcccacgtcactcccgtggatgctgagagccccatcgaagtcggggggggggggcccttggggagtcatcagacctccttttccagagtctcctgtccctcctctgtccagtctgcccgttccctcctgccacatctcacggctcaggcgccagcaaaccggagcactgctgctggggccctgtctcagcgtgtctcactttcctttgcagttggcactgaggggaccagctggcccgatgggtctcacagggagacctggccctgtggtaagtcattggcaaatctgagagctgggcgtggtgtggggattggcccactccctgtgtcgttggcggacagtggcaggtggccctggggtcctgtggacacagagcggcccttggtccagtgcctgttcccaggagggtggccagggggaccaggggcctctctcggtgctgctccagcccccttgttggtggggggtggggatgggtgactgtgcctcgaagtcacttgagggagttcagcggggtagagctgacatcagcgatcctgggaaacagcctccaactccatcctgaatggaaaggagctggcaggaatcagaggaggaggcccctcctcacccctgcattggagttccaggctccccctgcagagaacacgctatgagctgtcaccagaggagtggctccttagagggatggggtcctgctgcagccaggggcctggggaagtccctcgcacaggctgtgactgccttgtggagcaggggcctccattgatctttacagccctgttccagagttgaagataactaagtgtggggcagaacgcaggatttccagcctcacccgcccctgccctgtggcctcaacttagctctcatctggggtcctcgatgcatgagaaacatacagtgtgtgcccagggagacttgggctgccagtgtcaggcacaggggctgggttccggggcctctggggaggagtgtgggtttgcaggcacacagaggagttcaacaccacaggggccctcctggctttgccacctgccactgggtctgggctcggtcgcctccacacagggcctgactcagggctggcctcccacatctgggggatctggccttgaggggcctgtagcaggtgcatacgctgctcgaagctttgggctgtaacggaccacggtcaggttcaccccggagagagaaacatctccaggagctttgtggtgtttgcgagccccaacaactagaattgtattcctgattaggaagagatccaaacaactgcatttcccggctcctggaaagtcatcgttcttccccccggttctgttcgaggcagacaggtcgcgctttgtgtgctgagcaccgtggccgaagccctgtcccctccccctgcccctcccctgccacccccagcccttcctgtgttctcgagtccccacctcgagcagacattaacacacaccatgtctccctagggtccccctgggagcggaggtttgaagggcgagccgggagacgtggggcctcaggtatgtgggatccttgccttcgctgtctggtgggcgcctcccgttctccggcggcagcgacggcgagcatggagggaccccaactgctgcatgttttcaaggaaattcgtgggaattgtccttgctttacgcagtgctgagggtggagcacaatgaactctgacacctgcggcagaaatgagctggctgtattctgtccctggccttcattctgggcagcagatccgtgtcccgtccccgaagtgcccacatgtttgtggcttggacagccaggcatgggcagggtcgatgagcacagggacaaggctttgctctttctcctgagaaaggcggactcgccactgaccctttgtctcttacccctggcagggtcctcgaggtgtgcaaggcccgcctggtccggccgggaagcccggaagacgggtgagtggtgcgagtgtgtgtggtttagtgacagcagcttgggcgctggaggagcccaaatctggggtgcgggcacccccaacagccagctgggccacatgaagccaggtggctccccttcttgtgatgggtgcgtccatccccaaggctgcctctgagccagctgcctgggaggggcgctctgtgtcctgggcgcagacacagcggaccaggcctcttccctgggcacattcatttagtttaataaacctttctaattcaagaaacttcccaggccctttgggagcaaatgttaagaagacaaaactatcagcgggccttatatatttcgggcagcactgggactccagaaatggcctgattcgggggcatgggcgggccttcctgcgccttacctgctgtcttgcctcctggaattttctgtctggtgcatggttctcctggatggaactggtttgtttgcacatgaccctggcttctaaaagaggacacacgtttcccgagtgctgaccaccacccagacaggctggggcaggccctgggagcccagattgtgctctcaaaagtggaccttttcaaccagcagacctttctggtgaacgagagaaatttcggtgcagggttggatttgtttcagtgtggacctcttcccagtatgttgtctacctaagctacccttgactgctatagtctgagtcaacaaggcaaaaatgggtccttccctagtggttctggatgctcctgacttggggagcaagctgtggttagtgggtagaaatgacccgataagccgcagtttggcaggtccgagggtctatgcagggatctgggcatgaaacagaggcctgggctggataattccaggaggattagcagctctggaatcgactcttggtagacaattgggccatttatttggatctgattctgaaaaatgttttatttccttaaggtgtttttgtgtgtctccgtaaatccttcccacccagtttcactagaactggtttcctagagtgaggttaaaaactggaacaagaggagactcgggaaatgctgtctaacatggccagctgcagagttgcatggtgtcggggccatgcatatgcgtgtgttttaaggcattaagtatgcccagaagatctgctgcagaagaaaagatggtggtgagagaggggcttggagctgaggggtcgattccaaagtggtctgagcagcctcttccattctttgctagcatttcctgcaaggaacgctcgcttgtgaattgtagaagcatctgggtgctttgcggggctgagttgtgctgtgaaatcctgtgaagttttccgacaatcttcccttggtttctaaaagtgtttggaaatctagaagaggctcccaatgggcccctccatttgcccaacagggcgatgtctttttggggagcaacgggagcaccgactgtctccttggggtgtgtttggatttctctctttttgcttctcggctgttctcgggtgccaccttgtctgtctccagtgctttgagaccctaagctgccaccctccagatcttctctctgcttggtggtgggttgggggcaagggcctcatatgaggaggagcccctggaaaatggaagtgcagggtggcagccctctatactcgctggctggggtgcctcgttgtgcagggtggcagccctctgttctcgctggctggggtgcctcattggcgtggaggtctggctgagtttcatagagaccctgttcccttgcagggctctcctgtggtgaaggtggggcctgcacagtgggccccggaaggtctaggtcccctcttcagccccatggccagtcagttgggcaccttgtccttgactgtgtccatagctggccatcaggaacagggcatctgctcaccgtgcagatgctgcctcccgtcgctgtgtggtctgagtgagactgggcctcacttggggcctgggcctcttccttagccaagtggacaaaccagatgtgtcctttctctctttcctctgacctccaaatggtggaaaggagctgtgctgtctgtgatgtcagtggcctgcactcgcctgagtcctaaattcacggtcccctagactgacgcagctcctccagccgggtctcctctgccacattgtggcgtcttctcgaagcccaggggcagtggcgtgatccccctttgacagtctgggatgacgtggtccggaaagaccagccccgtgtgttccatccgttggtgtgaggcacagaacagccccgcccgggctcctggatctgggtcctcgcagcagcccggccactcgggctgtgaccttgggggtgggcgcggctctggtggaacgctcaacttggtttaacggaaaaccatggcccgggggtctcagtgaaccggggctcttttgcattgacggttttgcctcctttgttccagggtcgggctgggagtgatggagccagaggaatgcctggacaaactggccccaaggtaggtcacccaccaccctcctggtgccctggcatcactgtcatccctggggtcatgttgatgatgtaaccaaaatgctggttatgtgatgactacgattatgatgacaggtggctccgtcactggcatttgacgtgaagatagggttggtgggtgaatttcgccagcaagcgtgacagttgcagttcattttcataagggagaaatttgctcccttccagcagtggcgagcagggatgggggtgggatcccgactatgaaaaccatccgtggccgtgcaggtgacgaggcgcatgtagggcagaggcggggcatatggcaagtgcgggggccagggggtcttgtccagtcgggactcctgggtgttgtggaggtgagtagatgttgcccgtggctaaaggcagggctgtgtgtgtggcatgaatgaggctgcaccaggcatgcaccagctgttgctgtcgccactcatgcctgcccgctgctgtgctcagtgtatccacccctctgccccagcactgctgtgagcattgccccggtcttggctcacccctcctcctcgcctcttggaagcatttgtcccaggccacggggggcaggggagatactgaccttccgtgaagagtgcacctggggacagcagctgtgatttggagattggagaccgggcaccaaaaaaatgccagggctcaactacacctgttccctcttaacgggcgtggatgagctctgaagtgcatcccgtcagtcccaagctagtgaggtggcctggggtgacaggaggaaacgcagtcttgttgactctgtctcagaagaccatggtcttctttcaacaacatggctgaaagcctaaaatgtcccatcatcgacatcaccccagatggtgtgcacacccatgagacagggccctgttcccgggctccagggcatgcagaagaggggccggccagagagccaggatgcctgagggtagccagtgctggcccgtccaccaatgggtacgcgtacctcctgagcgcgggcagcccctcggcaccatggatacagctgtgagcggacacaccgggaccctgctctcctggagcctccctggggtgggggagatcagcagcagacactcacacacacgggaaactgcagcggtcgctgaaataccgcatgactaaggacccgtcggggcctgggacttggggatgaaagtcatctccccctttgcagcccatgttcatgtttgcaggggaagaggctgagattgtagatgcaaagtgggggcctatggggagagggctggccgatggggttcagggtgcatagatgctgtgtgaaacgtggtccaaggcggggcggccatcacttggtggacaccaaggcggggtgtccacgtgtgcagggtggcgtctgaggcagcctttctgtcctttttgcagggtgaccggggtttcgacggcctggctgggttgccaggcgagaagggccacagggtgagtatttcctctgtgagacacaggcatgacgatgggcagcagaggtgtctctcgggaggcccttctccttccaggcagcctcagatttcctgtggggtcaggtctccgccattccaacagtcagtatacaaacctcacgggagtcagcaatggcagtgagccccaagatgatgtctttgttgatgggtggccagcccaaaggaattggagctcttatctacagtttgtgacaagtgagccagatgggcctacccacctgaggcgcgtgaagggggcagggaaggagcccttccttttagagatctgtttaatggagtcctttaacatttcaggaaatccaagcagctgccatttcaggggcggccaaggacactttgcaatattaaagtggtggtcccaagggggtggggacaatctcaagtggccatgtggagaccaggtcacgaaaacatgccaggtgtccccctgttccctgttaatgggcgtggatgaatttgaaagtgtgtcccgtgagtcccgagctagtgcggtgacctgggggtcttcctggctgcgccgtttctatgtggttgttggagaacacagatgcggcagctttggataaacggcaacagccaagcccctcgaatcttgaatctgtctcaatagactgtggtcttctttcaataacaacgtgatagaaagcctacaatctcctgccctgttgaggaggtgtggtggggaaggctcgtcctggccgcctgccctgctttctcagcccatttgggggcctgacatgagggctcttcacagcttgtggggtgttccttctctgacctgctttctgtgaagcagatttctctgatggctcctttatattttagcacactgaggacatacaggcacatgagtatgtgagtgcacaccccccatgcacacacacacccacacatacaccacatacaccacacatgtgtgcgcgcacacactcatacacacatgcacacacacgcatacacacccacacacccccacactcatacacacatgcacacaagcacacacacacacccacattcatacacagatgcacacacaccacacatgcacacatacgcatacacacccacacacacccacactcatacacacatgcacacacccacacccacacactcatacatgcacgcacacacacccacacacacccacactcatacacacatgcacacacacatacacacaccacatacaccacacatgcgcacacacactcatacacacatgcacacaccacacacccccacacatgcatacacccccacacccccacacacatatgcacacatacacccatattcatacacacatgcacacatacgcatgcacacccccacacccccacactcatacacatatgcacacatgcacacacccccccacccccacactcatacacacacaccacacatgcacacacacccacgcacccccacactcatacacacatgcacacacaccacacatgcacacacgcatacacacccacacccccccactcacgcacacccccacacccccacactcacacatgcacacacaccacacaggcacacacacacccatgcacccccacactcatacatgcacacacacgcatacatacccccacacccccacactcatgcacacatgcacacacatgcacacccacacaccccacactcatacacacatgcacacacacccacgcacacacgcacatacacacccacacacccccacactcatacatgcacacacgcatacacgcccacacacccccacactcatacacgcccacacacccccacactcacatgtgcagacaccacacatgcacacacatacatgcacacacacatacacccccacacccccacactcatacacacatgcacacaccacatgcacacacacgcatacacacccacacaccccacactgatacacacatgcacacacgcacacacccccacaccccccacacatacacacatgcacacaccacacatgcacacacacccccacacacccccacacatacacacacaccacacatgcatacacacccccacacccccacactcatacacacatgcacacacaccacacatgcacacacatgcatacacacccacacacccccacattcatacacacatgcacacacaccacacatgcacacacgcatacacacccacacacccccacactcatacacccacacacacacgcacatacacacccacacacccccacactcagacacatgcacacacaccacacatgcacacacacacacccacacacccccacactcatacactcatgcacacacacacaccacacatgcacaccccccacactcatacatgcacacacacacccacacacccatacacacatgcacacacaccacacatgcacacacaccccacacatacacgaacaccacctacacatgcacacacacgcatacaccctgacacacccccacatgcatacacacatgcacacatgcatacacacatgcacaccacccacacatgcacacagacgcatacatacccacacacgcatacacacatgcacacacacacgtacacacatgcacacacatgcatacacacccgccacacacatacacacatgtataccaccccgatacacacatacacgtgcacaccagccacacacgcatacacacgtgcacaggctccacacatgcccacactcacacccacatgcacacacatgcacacgtgcacacaccccacacatgcacacaacccacacatgcacactcatacccccacatgcatacacgccacgcacacgcatacacacctatacacacatatgcaccccccatccccccacatgcacacaggcatacacatgcacacaccccacatacccccacacactccacccacacacgtgcactcgcatacacacatgcactcacacaaacacacaggcgcacccacacatccacccacaccccactgctctgttgattgctcccgtaagcatgccctgcagccctccatgatgccttgagaaggggcttggctgttgccatttatccaaagctgctacatgtatgttctccaacaaccacatggaaacagcacagccatgaaggctgtccctgactcagctccagcccttttgcacgactgatgagcacatattgagcacccactgcgtgcgagctctgaggctgcaggcaggcggggctccctgagggtatgagcgtgaggctgcttcacctggagcacttgggctgaggatagctcagacctcggctcagtgtcctgaggctgcccacatgtgtggccctgccttgcgctgctgggtgctcagtccagcaccctcctaccttcaggccatcgtggtgagactcaggtgagagtctgcagcctgcattagcccggctgaggcacacgtgatcttctaaggaaaattcccccattctggaagggtcttttgagagcttgggaatcttactgtcagaattagagaaaaacaaagtgggaccttggacaagccctgcatgacctgctcaggagaggctgacgttgaccctttcacttcctagggtgaccctggtccttccggcccaccaggacctccgggagacgatggagaaagggtaggtattctgccgtccctccgactgctcctgcctgccctactcctcagtgatttgggcaggaaaaccacagaagagaggcccaggtgtgggattggcctgccgcatgtggagggccagctgggagaaggcagatggggattccagtgggcaaagcgattgatcagatgccaagaggctgcggggcattggagagaccctgactgcaacgtttagttactccatcggtcctgctgatggatggagctcggggccagctctcagctctcactgcaggatgcaggtgccccaaaccccactgggaggaaaggtggccagagcgtttactgagctcagcgtctctgcttatctcgtccagatgaggagttagctggaggcatgtgggtggcagaaagctgagatttggaggagcagaagagggtggggggattggaaataaccctctgtgggcctggaggtaggggagcgagtggctgtggccatggggccagagcacaggagggagctgttctccagcatggacgcacaggccggggtctggtatctgccacgccgtcttcatgtgtggaggcgaagtgggatctctgggccacagcacagtgggattggggcatgggatgcacgaggctgtgggtttccaagctcttccctgcaggcaccgcagtcactcagacgccttctttgtatgtgagaggtgtttagggggaaagctttaaggagctctggagggtgagaaagaggagcagctccaggggcatttctgtctcaccagctttcaggctgacatggacggggcacctgctcctgtgtgggcctcagcacagtctgctgtaagatgaggaaggagagagggacccttctagatgtcagtgcttcttgattgagaggacgtgtgtgtgtgtgtgtgtgtatgcgtgcatatgtgtggctgtgtgcatgtgtatgtgcagggagtgcacgtatctgtgtgcatgcatgcacgcatggctgtgtgcgtgtgtatgtggacaagcatgtgtgtatggctgtgtatgcatgtgcatgcacagggtgtatgtgtgtgcacaagcatgtgagcatggctgtgtatgcatgtgcatgcacagggtctgtgtgtccatgtgtgtgtaggcatgtgtaggcaggctgtgtgtgagcatacatgcttgcatgtgtgaggcgggcgggaaggtgcagtggtgctttggcgagggacagtgtttgcaaacagcccgtgggttgaagcagtgagccagggaggcattcccttctgcagccaggaggaagcctcttgctgtactttccaggctgtttaggaccccggcagggacacctggttccccagagggtggcccaggggatcttgtgactctcccctgatgccctgtcctgccccagaggctgtcattcaagaaggtcaccaaatcctttcaattagatgctctttctgcccagcctttcctctggagagctgtggcatgtgagctcctgagccggcatctcagagcctgcaggcttcacctgcagtgtctgcacacctagcagcttgctgggagcgaggacattccaggcctttccggctggtaccagagctggtaaacctggcgtatgtgaagcagccccaagccagagaacccttgtgcaccactgaggggaagctggtgtccaggctaacagctcatttctctaaccttgccttttttctcctctgcagggtgacgacggagaagttgggcccagggggctgcctggggagcccgtaagtctgtgagctgagtgggacggtgggggctcagtgtggagaaaggctttgtccaaggctcctgctggagcaggatctgggatcagccaggagcttagaagagagagagctcgacctgagaacagacggacctgggcatctcccagggaagccaaagagaggaggcacaggcgaggctggctggcaactccaggaggaagtctgagcctgcctacaggagcaagcctggccctcaagggttgttgtgggggtccaggggcagcgtggtggggtctgggggcattgtggggagtcgggggcagtatgtggggtccatgggcattgtggagggtctgagggcatcgtggtggggtccggggtcagtgtggggtgtccgagggcatgggggtggggggtacaggggcatcattgggagggtccagggtcagcatgggtgggtacaagggcattgtggggggtctgagagcattgtagggggtctaggggcaacatggcagggttcagtggcaccatagggggtccgagggcattgtggggggtcaagggagaagcatgggaggtctgaggtcattatagggggtcagggggcggcatggggggttcaagggcattgtgggggatctgagtgcattgtgaggggtcccggggcagcacagtggcatccaggggcattgtggggggggtcacacacctgaatcagcccgagcttgggcccgtttcaatggccacccttccagaggcagattcctccagcagactctgccccagccctgggcatgggaaagctcttccctaagcagacatatatttaggcccagagcaaatttcctgatggataggacattaattactattcatttactgttgctttaaagcatctcttttctcgtagccaagtcagcccggctgcgtgcgtcaggtggtgctaattgatgagaaatatagcaggcactgcatagaggaggcaggggtcggtgcctgcagactcatttgggactaaattataccccagatgtctgattagcctctaaggagaattcatgaactccactctctccttaacacatgtccaagtaataccttctgggctgttagcttccaagaaatgttgctataactaggtattaaaataacgaaggaaacatttaagaggcagtaagtgggggaaggagttctcttctacagaatctgaaaaggttctgtcaaaattaagggcacttgaagtccacgtacctggggtgaagcctctgtaattctccgtgggtggggggtgtgagtgccctgtggcaggcagttctcccggaatctcactccacctgcggtaaaggggaggttctgcacgagcctcgccgaccggagagggcgtgccagctcttgcccagagtagcgtcctggaaaagatctgtaccccacgcctccttctgcacattcagtcttggggttcccaccagggactagtttcacctggtgctctcctgcccgcaccctctgaccctgtgatatcataaaaacaatcgtatgtcgctgcggaggggaattcaggagcgagccggtaatgaggatagggcacaagggctccgtgcagtggaatgttatagcgtggtgattctctgggggagcgtctgctcacctgccccagcaagtgtcagaggagccggtcagcttgaaagcccccctttccctgagggtgccctgtggtgtcctctctgagttctcaccaattccagacacctgcccctggttcccaacaccagggtggggtggagggaggcagcgcagcaggctgggagggagtctgggcctcactcctgggaggccaggaggcctgagtcaccagctggggttctgggtggagtcagggccaagtgggcataggggacagagaggagggctgggatttctgcccgagtttaaatcctattttccctttcctcttacaggggccacgtggtctgcttgggccgaaggggcccccaggtcctcccggacctcccgtaagtcccattaccgccctgcttgtctgcccccatctcggcctttgagaccccgcctcccagccggtggacgcttgggcactggggcagcaagtccgtgctggcccctctggcgcctgcctgctgccagtgtgaggcgtgagcgggacactgatgttcagacgctgtagacacggccccagcaggtgtggccttgcaggtggaggcccgaggctgccggcctcacgcctccgcttcaccctggctgcacttcctcctggcagacagcatgtgctatttcagttataagcagaaacccaggatgtcacgtttcttccctgctagaaagaacttccagcagcttctgtgaacattctggaaggaggctgaagcccttgattccagtggggctgtgtcccggtgggcagctcccccagggccaggcctgcccccttcagccttcccagccccgtgacctggttttctagaacctgaggcctgccccgtggaatgctagggcctggcagttcagttaacctttagctgagggttactggggctgatcagtggacctctgggaagggatttggagtcaggtccttcccttccccagagagcatcccgtcctctgattcgtcgtgggatgggcgtctgagctgagttgagtgggattttcctcttgagcactgtgagttctttcgcattcagttacatgtttttcttcttaaaatcgtacacagggtgtcacgggtatggacggccagccggggccaaaaggaaatgtggtaagtccctggggtcccgtggcctggcttcaggggcactttccctgggcacactccttgcctggctagggaggtccatcgctgtccacatcagctgggaacatgaagggcaggttgcagaccctctgctgtggtgcccaccctccagtggtgagtggcacctggagactttagcatgatggggtgacttgggagttttctgcccaataaatcatttctggtcagttcctctcacgtgttccttcctggtcggatgtctgggcatatttgcataaacgagttagtgctcactccatcagagtcaacctccacagcctcagaggcgctgagtcctggggctgctctctgtggtgggacccggccgcctttcccttcccgctggcattaggcagtggggagcagtttgaaaggatgggaggccagtgagggggcacacgacacccaggaaggggatacagttcccagagcccccttcagtgcctttgctcttgtctcctgtagggtccccagggagagcctggccccccaggacagcagggtaatccaggcgcccaggtaagtgagcctgagagaggcagctcgcagggatccggccgtgggaggcacacgtctccagtccggagccctgggaggaagcggggagctctgtcccctccaagtagcagcccctccccttatctggagggagactaggacctgggttggtgcctggatgagggagacatcaatgagaagatggacagatggcaggggagggttctgagtcaatcagcgccctcaccttccctttctggctctttctccctcttagggtcttccaggcccccagggtgcaattggtcctccaggagaaaaggtaggtgggcctgggctgtgttgcaggccactgcccgcctgcaggtggattccctggccccaccctgggaggacccctggtatccaccagctctcaatgtatatcttggtgctcccaagagacgccaaagctcagagtgccaagaactgggccagaagcatgaggaggattttggatccgtgtctcattgattcatacgtttattcattcattcattctctagtatgtataggggttgctggatttagcaaggaacaaaaatacaggacatgcagttaaatttgaactattgtgtatctgaaattcaaatttaaccgggcatcttgttttgttgttgtttattttggtttagtctagttttgctaaatttggcaacttgactgtatctccagagcctactgtgtcctaggccctggaacgagagctggaagtgcttgcccttctagagcttgtcgcttaaccaggcacaagatagttcaggtagctccaagtgccttggttgcgatcagcaaaaacacctccaaggggctggttctgagtgcatgagaatccccggggggcctgagaaacacagagggctgggctgctgccaggcctgggaccttccaggagctgctgtttatgggatactgaggctgtgggccttgcactgcaggatgccctgccctgccctggggtgttgatgtgaacagaccagggaggacagggtggtgggagcacttgaagaaggcacagcactgtaagagcagaggaggccagatgatgcccccccgggccccagtatgcagcaggtggatgtggagaagaatgggggcacttggtggactgattccgttcctacagcagaacctgaaggtgctgagaacagtggagccgcctcctcctgggcgctaccgtggctgcacgcctcacagccagggacccagtgcctctgaccacacttctcagcaaatgctgtgtgggcagaaatgttgaaaagtaaccttggtggccgacggagaggtcaggtgagcctagggagggcatctcctcatggagtctctggtttgttctagggtcccttggggaaaccaggccttccaggaatgcccggtgctgacggacccccggtgagtagccctgcccacctcatccctccatactctccccacctccaccctgcggatagggctgcaggcccaggctctttggggttgttgttggacggcattgactcattctggctctgttgatgaagacccgtttggtctccagttggactgctcggtcattcttgggttctggacacccttaacatcatggattttaatcaacgagtggcgattgcgcgagtaggaatattagctatttattaggttgtgctgattaattaccggaagtcaggcctgcgtgctgagccgtgaggagggctgggccgggctccaggccatcgcttgcgtccccagggttggaagcgaagaggcagggtacgtggtgtgtatttttagtgttcacacactgagaagggaggtggtgagcaaacgcgtttgcagtgtgtgcgcgcacagctgtggagccaaattagattctgcctggaaatagcgagttggtgacaaatccaatctgtgtctaagctgtgtggaggggggaggtgtgaggaagtagaacacactcagaatgcgtgcgtgcgtgcacacgtgcgtgtacatgagtgtgagctgatttgcacccacaccctctgtaagtgcctgctgtggttttggttttgattattccgttaatgctgagtctgtttcacaaacgagattagcagaattaattattgaagatgcagtatgctttatggttttaataacactgttaaaaactaaacaaggaagttaaatatgttgatgattatcggtgactgctcaccacacagcatccctcaggccgagtcagttggcccagtgactcccacatcacaaactgccctttcttggtcagaagaagcagagtggagccttctcatccccacgcgcgcagctgtggggccccgtggtcacctggccacatgggagtttgcatactgagtggttcatcttttccaatgtgttgtgtcctttaatttacatttatatttcattgccctttctaatgatcagaacagcacatcttgttatagaaaattaggaaaataaataaaattacagtaaaattatagccacctttgatctcatctcctgatttagccattgacagcgggtggacgtgtgtccttccaggctagttttctgttcccgtgctgctggctgtggtgtccatggagtatgggccgcaatctgtggggacagtggctgggcccagagccctgcggggaggaaggggacctgggtgtgaagcaggccacacgaggaaggggggcctgggtgtgaagtgggctgtacccctctttccttctgcggggaggaagggggcctgggtgtgaaggtggctgcacccctctttccttctgcggggaggaagggggcctgggtgtgaagggggctgcaccccaccttcctgccaagatcattctctcggccctcagctgacctaacttgttctccctggaattcccctccccatgttgaaacctccaaagaattggggtccctaaagagcctgcagtttccttttatattctttgggggaaggaaaggcctttaaggtgtcccttccccagcccgaatttaaagcttaaaatgtgagcgtaggtggaccccattcacatgaaggtgcttcgagcaaaaggaagcaaagggtaggcccaaagacagccccagccatctcccacgaaaatctggaggaaagaaaagatgtttaaaaattctcctttgcaaaggcagcacattgagggtaaaccctacagagagagttttctttttttcttgttttggttttggtttcaaagaaaggaagattgccttaaaatccatcaagaggtatgaggcacttcagagcagactcagtgcctagaaatatgttgttgaataaatcctgatagcacacgctggggaaatggctaagtgaattatggctcagtggaatatattcctggtatcacacgctggggaaatggttaagtgaattatggctcagtggaatattacagagccagtaagaattgaatttagacaaatactccgtgacatgagaaaaatgctcacaatgtaatattaaattaaaaatagatctaccatgccaagggcgcatgcatatctgcagagacgacagatgattctatcatacaattagccacagccactccgagtggtgaggtgatgaaggattttaattcctcttccagttgcctaattgtctatgatgaacatacgttacttttttaatcagaaaatatcaaatacaaataatgtaagctttattattttcccattacagaagcactgctcattatagaatattgggaaacacacacaagtagaaagaaaggggaaagcggccctgcccggctttgcaggaaaatcagtcgtggttatcttgttacgtttcctttctgccttttcctgttcaaacattttttagtaagggagctttgtgcttccccccactgctttactctcattctctatctgtaactgaaaatatacctaaaggaatttggcctggatgggaatggaggccgccgtgatgccggccgctaactctgcttggtgctccctgggtgggcgcagttctgagccccttgcaaacgctctgtgcgtctccgcagcggcgctgtgtgcagatgtgctgttatctccagcctggaactgaggaaatgaccacgtggagaggcctgggggcttcctcgagcagccggggctgggtctgcccggtccagagccgggctctcggcccccctgcagatccacccactaggtccttcacagaaaggtgtctgtggctgatagaaagtgtaataaagggccacaaagaacccctcctggccaccctggaccaggacaccctctagttggctctgttcaggtccagcccggccactctgaggtgctggcgccatgagccttgtttccggaaggcggcgtggtggccaagcacgtcccctcccagctggagcagcgggtgaggtcccgcaggtgcctggacttcctcaaagcctccctcaaggggaactttgcgccctcccactcacttgctgctaggataggctgtctgctaggataggctgtctgcaaaggcatcaaacccaattggacagctaataaaaacttaaaagtcacacacgaaccatttaattgaggcaacgagacttgggtcttcttaatgctactgtgtctagaaagagtctcagatcaacgttaggccactcaaggtagaagagcatcttgccaccctctcgtgttatacctgaggaagcgggaggcccagagagggcaagtgacctgcccaagctcacacagcaggttgagtgtgtccaggagtagaacccaccctgccagccttctcatcaccctgcccagcctctttcctggaatcctcgttggtggaactgcatttctgcacagtgaacattgatgatctttctgcttttatcctggaagtttggctcaccgatcctgagctcacaggcattaaaccgagtgacccgcctgggttggaaagtcagagaaacctgcattcctaggaatggaattagtacaggcccaggcaggcaggagacacaggtccttcctagagcctcggctgggtacctgtcacatggggcataggtcctcaccttcgctcagctcccctccatccccgaggccaggtggagacccgagggtgtgggtctcaaacgaggcagctgtttgaagactcacggatgtgctgggacccctcagtcaagtaacacgccttagccctccaccccgcaccaaccttgctttgcttttggttccccaacaatcagagattccaaggtttgcagacagctcagcaattgctagtccgggaagcagggatgccaggaacctggtcccagctcattattgtgcagattcatcttgtcaggtgacctggggaagaggcccttgttggccctgtccccactcgtgggtcactggtctgtggacctgcactggagggcgggctggctctggccgggtcaggagccaccgtgcaggtcacctgtgcacttgggggttgctgcatactccccgcaagtctctggccttggccggggttgggccagggtcaggcttattgttcccattttgcagatggagcagccgaggttcagggcctggcggctcggggaggccgggctgtgcttggctgcctggccagctgccttcgacttctggtgctctcagttttcctggggaggaagggaaatgggctccatgatcatggatgctacgcagggaggggaagcgagggaggctgctttctggagtggcactgactaatcaatgcttcttcttttgtgacagggacaccctggcaaagaaggccctccaggagagaaaggaggtcaggtgggtgctcgccacgccctcctacccttcagcatccaggtggggcgggtccaggtgctctgggctcagcctctgctcagggacatccagcttggaaaggaaggagccggggacactcagcccttcctcaggtgtctccgccaagggacccagcctgggggggacacaggccttttccccaagaagcggggcacccctctctgggtcagtgcccctcaccccaccctccagttgctgcccatgaccggatcgggtgcccatgaccagatggggtgtgggcagcagggcagtgtctccgtgttcagccctggtcttgactctgcacaagctgggtggcctttgagttttggggagatgctattatgaatggggacagacctaccaggtcacgccggtgccagggatggagtctttctatggatgactgtgtccgacactgtgagcggcttgtggttcctcctgcggggcctgctgggctgcgagggtcccatgcagcacgtccaccagcgccttctctccactgcgattcatgacaaagctgctgggctgcaagcacctctgtgggaagagcctccagacgggaggagtagccagtggggactgctcttgctgtcctggtgtgcgccaaccttcgttcaccccaagactgcttttcttgtgtgttgaaaccgcacaccgagctcatggtcgtcgggagcctggggctgagggcagaggcccacctgctccagggttccagaggccccagttgtcacaggctctggaatcgggcctgattaacatttatctcttgaagcagggcctgtgcaggcaagatggggtctggggcctggtcccagctccccttgccaagggtgtggtaggccaggactgaccctccagggcagcagagctagcgccagtcctcacagggagttcaatttccagtgccaggcctgctgggcagtggcacttctccaacgtgctgcctctgagacccagagcggtctgagattcgccacttctgccccgttccctctcttgaaggtcgcagcagccactggggtgaaccctcccctcggcccttggcttccgttcaccatgggagacccagttcccgctgcctccagtggggagtttaccagccctcctccctgggcacagcctcttatcatcagaggtggaggcagcacctggggccaccagagctcgcacagtgcccggaactggtgctgacaggtggttggcacttggagcccacagcacaggcccactgttctgagagctggcttttcaactggaacgagaggcattcacttactccctgggacttcctgagttcctctatgtgccaggcatcctgttagcgatgggatacagcagggagcaaggcagaccgggcccgggcctcagagctgcagccttgcagaggaggccaccaagcccatcctgcctgggagctccagccgctgccgtgacaccatgtggaaagggggctgggagggaggcggtgggagccgttcatcatgctggagtcttgggctgggggcatgggggctggatgcccacccccatgagctctagttgagcatcggcgaggcccttggctgctggaggatgtctcttccctgtctagcagccttgtcccttctcccagccggaagctctcctgatttattccaaggaccttaggctgggaatgcatttctttagggacaacactccttgcagagctccaacgctgacctttcaccgtctcactgttcccccagcctatcccttatttccctgactgccggggtggggccagcgtttgcttcacctctgtgtcccgctcagcatgagacacagccacacctccactgtcagtgcaggctgtgaacacctgtgcgagtctcccacggggggcctctctggaggctctgagctgggatgttcgccctgctctcagcaggaggggtatgccgaactctggagtttcctgatgttccccaggcacctccacactggcatggggctaacggtctttttctgtttggttttagggtccacctggcccccagggtccgattggctacccaggtcctcgaggagtcaaggtgagagagactcacgccactccaggtcgtcctggaggtcagggttgggactgtgggccttggcgtggctggttttagggaattctctgtggtttaatgtccctgctattcagtctggagtagcccagtcctcccagtcacttgtgtggacgctaggtctcaggacagcgggcctgagcaggtgagggtgtgaccagctagagtcaggagggctgatatggagcacaggacagtctgcagtctggtgacgacgccaggggcgcgctggcggccatctgtcaggacgggacacgtccttttgcttcttgcctctttaattgttgccatttgtcaggcttctgtcactctcctcgcagacagcagatcccggctgaagccaagagcctggcctctttcctggggaagctcggaaacatttcttcccagccatttgcacattccgagtgagaaacagagtctgtctccaccgatagcatctgggtgggccagcgctgtcgcaaggcggagttcatgggagctgtccatttattcacaatcattcgtgtttctgccatgacgggctctgacaacctcgttacatggggcgcacagctccagagcaatatcccagacacaggtcccctctgtcacagcccagctaactgtgtttgctctgagctgggtaatgcaatctcgagttgtgctgctctctggacacggcacgttctgtgtagacagacatacccctaggcgcacgcggaccagctctcctcttcctctgagaatggggacttgcggtatcttaaaggctcatgatgattctttccttcaagatgcttttaactggatgtgaaggaatatgtgtgtatatatagcaactagtcaagcttgagggatttgtagaaatgactcaccagctcccctgcccctcacctccctggtctgaagggctttatgcttttcaaacattgttgcacatcagaagtgtgtggccgccctggggcatggaggccaactggaaactgtcgtctgctccgaatcaaccctcctgactctggctggtcacccctcacctgctctgagagcccaagacatcagttttcagtgacatgccccagattacactaaaatcgaggctgctgtcagaaatcaaaccaggttccaaatcaagtgccccacccttgtcccccggaggccccgacttccatttcccaggaatgaggaccttccaagttcacgaggtattgaagagagacctcccaacggttgggagccttaggcgagtcaggtttttccctaaagccagcttctaccagcaaaatgcctagcgaattttataagggtgataatttagtagaaatgctgattatgtgagttctatagcatgtttattttacaaattcctgtcgcatagcagaagcctctgccaactcccatacatggctaattgcataacgctgcttctgtgagctaaaaaggtgtttgctttaaaatgtttatggagaatgctcttatcttgcctatctgattaaaattcattcatgacatgagcaatccagttagacttggaagcagagggtggaaggaaaaccgaggtttaaaattattttcatcggggaaaaagtttctcatactcctgtgcatttggaaatgtgagtggtgtcggcgcctcacgagtttggcccgggtggcagtgatggtggcagggcgtgggattgcgtgggccgagctgccgccatttgaggtgaatagtccttggtgagagggggcccgttattttccaccaaagccctaccttcttcccaggaaaaggttcttagtccagtggggctgctataaccaaaagaccctaaaatgggtggcttgtaaacaacagggaattatttctcacagtcctggaggctgggaattccaagatcacagcaccagcagatgcagtgtctgcggaaggctgctgtctagttccttgatggtcccgtctcactgtgtccacacatagcagaagaggggggacgagcaccctggggcctctggtaaaggcataatcctaatcacaggggctccaccctgtgacccagtcagtcacctccccacagccccacctcctagttccattgcctcaggtattggggttcaccatatgagtttttggtggacacagacattcaggccacagcaggctcgtgttcctttgagttcactgacctttagcccacctccaggcttccctctgccttgcacgtctgaaggggcacctgtttaagcttgactgtcagcagagtcaaatccacccctcgtttagcccccagctgctagggggttgccaggaggccccaaatatgagttcacatccaggccttgggcgaaagcctgtccctctctgggctgtgcgcacatctggtcccagccgtgctgcagctcctgagtgctccttcccggggcggctggccggccgagtcacggatgccccaatccagcccttcccagccagggccacttcctgcatgactggggagtgccctctaatgggaggtgctgctcaccccaccacggacacagcagccccaatgtcaacagccccgtggccaagaagccctgggaagtgctggttctgtctagttggtcccattcctcctacggggatcctgaaacggtagaactgtaggaccgggaggggtctcaggaggctgcggctggttctgtctagttggtcccattcctccgatggggatcctcaaacggtagaactgtaggaccgagaggggtctcaggaggctgcggtcctacctgcctgctctcagcagggcatgggcagggagggagcagcagcgtcccccagcctgcccagccagagggaggagagctggtgccaatgcccccgggtgctgtgccagggagtttagtgctcctgggaaataatgccagccacacaaacccagtcccccaggactcagggcagggaggggcagctggacatcaccttgcattcaggatcagacgctgctgagcaggctcaaccctgattgtattctcagccacacctgcgattttcctgtgcgtttcagaggaaataagcagaatccaaagttgctcttctattttgcaagtatggtgaggactcaaaactgccctaagaaaagaaagtagctcatctcctaaaaagcccttcttggtggggttctggggctgttgtctctgaggcgatgccacgccgtggtgagacggcaggtggttttctggggcccccagctctgtgtcagccagcgtggccctacctgttctcttttcaaaactctgggggcttccagccaggattgctttggaagaaggcatctgctaggaaaaaaacaccaccaagtgcttagaaaccactcgcctctcagcagctggcccagctgagtcacttctcaccttcctgggctgcccgggcccacaggtgctgccaagcgcgtgctgtgctcagtgggggcagtggcctgcagcaggctgttctgagcctcctcgcggcttggctggtcgttcccactcagccctggaatacgcaagctgtgtttgtccggcgcttcctctccatcttgaggtccatgtcccatctcaggctggggtagagactagcgtaggagaggcttgtttggagtcggcctccctgcttgggccagtgctgtttctgagctgtgccctgtccccccaaggcgctccatgctggcccacattagtgtgccaagtgccaggccagacgaaccagagctgctccgagcccaccttgccctcccggctgcctccgccctgtgctgggcgtagagggaggtgtcccaggcctctccactagtggtggcggccaggtgtgaagcagacatgacttcagcaatggtgcctgcaggtgtagtggcagaactcttgcttgtctccggtgctccaaatcctccagtgattatggttcagggcaaccacgccgctgccctgtctgcgtggctggaagtgccttgcagctggcactggagtggaaggcgtttctgcagttacatccgcagctccttggcagagccagggcacgcagcccaaggccagccacctctgcagaaaggagctcctccgtgtctccatcccttcccagagcccctccctctccaggacctggggaaaggccagaactgccaagtatgtgggaagttctgaccaccagagggcagccggcaggccctgcgtcctccagtgctctgtggccccggcttcagcctcagcctggaatcccggtgccgggggcagtgtggcttctctctctctctcaagtcccacgggcaggtggcctgaggtagcccgaggtagtctctctagctaaaagtcaccctgctgggagggctgaagtcaaagacattaacagcaagggtgtggctgcgtaattccaccccacagatttacctccactgccccaggcgcttggcacagtgagagtgtcagagaaatagtcctgggccccgtcccagaaactcctgttcagcagggaggtgggatggtgtgtcctgaactcatgacaactgcaataaatatgttatcatcattcattagtaatatcacagtatcatctcttcatgttaacacggagttgaaatacatggcactgggcttctgtttattgacacctgctgtgtgctgggtgctaggtgctgttctgagagcttagcaggcatttccctcccaacagtggtaacgaggtaagggttgtcgtcctctccacttcccaaatgaggaaactgaggcacgcaggagtctggggcattgtcagaggccatggagggggagctgggacctaatcaagtctgccttagacctcacctcctgcttcctccccaaacctctgaaaggtgggggtgtttctagaagatgatgctataatgggaagcaggaggggtgtgttggctgccgggtgtgggcccttggaagggcgggtccagagcttgggctggaaggtgggggatgggtttgggtctttgcatgaagaacaggagtcagtggagtcagcccaggaattgtggacacgctgggcctcctgaggccacagggggacatatgggaggaagtgtgttgagggcagggcgctggcctcatctgtcagcttcagcgagctcagcctgtcttgacacgcctgcgacagctctagaaaggctgagacttgtaaccattcactcctttttcttttcccacccgcacagggggccgatggcatccgtggtctgaagggcacaaagggcgagaaggtaagtctctccttgcagccacggggccccctgcttagtccggagccgaattccagccagcggggccctcccacaatgcttcttccatgaaaccagctgaggtggatgtcgcctctgagtactgagggggatggatgccactctgtggaaagtgtctctgtttgcagacggaagaagagtaagttgaggataggccctcgggtccccaggggcacatctcctagcagagctgagtgggtccagggtttgtgtctctgcacaaggagaaggccttggccccagagacaacacacggccccccacgtgcctgcaggggccagtggacacctgtcaccctccccactcccaggtgggccgccttgcatggccgctggcacgagggtccacttagttgttagatgttcatccctgggcagcccaagctgcagaaactcacagtgtgcagcagagccaggcagggagggagagaggccgtgccattggccatggtccgtgggggcaggtcaggcctaagcagatcactgtggtgaagacaaagctaaactacacccccatgcatgcctgccagagtcagaagcttgggtgcagcctgcagcggcgacagcctgagccacatggagctgcgtggccggccacctttctcttctcactgtggtggaaggaagctcagagccaaatccaaggcccagttatgacacagatttaggcctcaggggcggcctcaccgtgccaccctccccaccgtggcctcacgctctgttgtgggttcgccctgccatgccgtgtagccatgcaatacttgctttccgtaaggcatgttggtcccctttgctgggcagactctgggctctcccctggccacggcggcctgcggggctggagtgcgggtgctggcgtgatggtccacgtgccgagactccttatttgctacctgtcgaagatgtcgcttggatcctttcttgtgaaatctgccggccttaaagccattcccgaggggacgcattgagtggccacaactggatcagaaatgatgtggcagcaggaacgctcttgttccacggagtttgttgagcgtgctggtccctggtttctgttcttagtgtctgcccttgtgggaggaccggccaggaggcctgagcctgtgccatctcggctccttcccaagggcatccgcacagcggaatcctaagtcctcatccgggaaagctgagcagtttggcctctccaagagcactgctttctacgtggagcccgtcggggcttcggaacacgagggccttacgaacacagggtccccatcccagaattccatcccgttggtccccgggaggctccctcacctgaggacctttcatcctttccaaggtggcttcacagagtccagctttgccgcttgatcttgtcacgtttgtccctagccagagacagggctgcctgagatgatactgattgggctgtgcaggggatgccttcttgccaggagagctcccgcactgttcccgagggccacgcaggcagcccgacatggtctggggaaggagtggggcagtgccaagggaccgtctttgtggacttctgcattatttgtggccgctgctcagcttccagcactatgtgaacactgtgaacaagtgccttgaggccctgggagccccgggagctggcgctggctggaaagggctggattctcactgcacagaaagctgcctcccttgcgtgtgcccccagccgggccttgaatgtttacgaccggctgagtccccagatcctgtcctttcactctttttggatcaagatgtagcccctgaataatgacaggaaaagcccagccaagggtcccctctctgggagccacccgtgccctctgctgaaggatctgagggcttttgccctgcggtttccgggatggggaacgtctagaccagggactcaaacggacagcagggggcactgacgcgcggcagcctcacttgggtcccaggttcaccagtaacccaggggtgcgcgggccgctgacttcccccgccacccccggcaacacccctacccttcagaaagcactgcctgttactgcagtgccggcaagagcaggcgttagggattctttgcaggggcattttcatccagctccccgtcctcaattgtcaccccctttacccgtcacttcagtgcttcagtgctgatgggacgccacagagtgcactgagaaatgataccgggagctcaggggcctgggcttgctgaggcctcgccatgcagaacattcagattcaaactgggcctgcccaagaagcagggacgcagctctctccagcttcagaacgttacagctgggaacgcagagctcatgggaaagccattctcgagggatgggccccaagcccaccccgtccgggccatgtgctgccccccaagcgtgggggacctggtgctgagtgtggttgtttggagcggggaagggaccgccagggaggcgggtcctcttgcctagactagggcactctcttgtcccatattcagggtgaagacggctttcctgggtttaaaggagacatgggcatcaagggtgatcgggtgagcatctcaggtttgggatttgggctggggaaagctgggtgggcttggccgtgtgggagggggtggggatgtttgccgccacagggcagcttctcagaatggaggtaaactcttggtagagattcctggtgggaaggggacagtggcgtggagcccagggcccgactctctccagctcctcttcacctcctcttcctcagtttgccccttggggactgggaataacctgtggtcgccagctcctccgcccagtgtcccacacagggggtcagtggggctgggttcacttctgactgcacctgtggactgcagagttactcacctgactcaagagggataagcggtgcctgggaagagaaaagagagcagctacggaaatgacccagcctaccgaaggagcgcagctgctgcccaggccacacggccggcgcccacagggcagcacgcgacgtgggtctaggatccctgtgagcctggggagcgtcctggtccccagacagttcttcagggtccctgggactcccacacagtcctgtggtctgtgattttggctcaggagacctggcttatttttaaatgaataatttagctcggctccagagaaagccggtgggtgctgggagggactggggcttgccggcaaccacagaaagtgacgggctgcacgttcctgtaattaaagagaaggtgacgcaaagggcacgaaggaagggtagggagctcttagagcagccagggtggccaaaagactcttggaggtttccccagtaacctctcagcgagcagaagcccagcagaaggaaccgaagacgcctcggcctccggtgggcacagccgtggtgacagctgtgcacgcaccgggacggacatctgtcggctgcagcagggctgtcacccagctgccgcagtcatccccctgcagcaccggctcgcaggtggctttccagaacaggaaagccccacacacttggcacttcgtcccaacctggcaggcaaaaggcagaggcaatctgcacctctgtgggaaggaagggggaggaaggaggggatctcttgcgcaatgttgtcccagttaagttgctgctaaaggcacccattctagaacttctttcctagtagaaggctcctgaatccccacatcccagcggcttctcggtttgatggtgaaagtccttttctcctcctttctgatgcctctgttcacacatgtggcgtccacgtgacgagggtgcagcttcagaagagatgacacacgttcccgtgccagggctccgagagtggagctctcgttgccatgggacgagggtgggatgcaggggtgggacccatcctgagcccagggaacaggaccccatatgcggacctcttcagagagcacagcctggcactttgcaccttctcggtgctctgtaaatgtgtgccgggttattttgttgaacgagaggaacacctcttagggacagagagttcctgacccgatgacagattagagcctcagaattaggaagttattcatttttctctatctgagcaatacacatttctgttgtgggcttgcaccactgctttacagctgctcttagagacagatgatcagaggaggatccatccattgctggacaaagagtgccgggaagggcatttagagactctgccgtagcgctaccattgcctgggcaggctccagagccctctcccctttctgagccccgagctcccaatctgtaacttgaggaagttggacgaggcggaatttaagcccgtctgttcctgggacgcctcctgaggccctcccgtgtgctcgttatgcccaggtaactgccccatccggggctggggtccacttccatacctcctggggtttcagaagcagcagcagctcccagtcactctgctctatttggagaaacagcaattcagagctactattgttaaccaaagttattttagctaagaggcactcaatttagagaaggtaattgggaagtaggagcctgcagccttgagaaaataaatagcaggcaacctcggtgcagagaccagcttccgcagagcccgggagcccgggaattcgcggtacaatgcgctcgctttgtcagtggctccgggagcagctccgtggtctgagtgaggccgagctggtggagcagctctgaccacagggtgcctgtgacctgtccccttgctccttgctctcagaatggtggtggagaatagtgtgtgtgcggggggtggtcttctcacctcctcttttctggcttgcagggggagatcggcccacccggtcccaggggagaagatggccctgaaggcccaaagggtcgcggaggtcccaatggtgaccccggtcctctgggaccccctggggagaaggtttgtgatgtgggacgttcagccactttcttgggagggatctgacaggcccttccccatggcctcgggctcccgttggctgtggctgccctaggcatggggtgggggtgattcctgagcgggctcctgtctccaccctgggttctctctgctgttcctatgaagctgttggttgaatgatgaccctttccttgtcccgggttcgccctttcccagccctccaccatcgccttggaaggctccttcctcccggtggctacaaagcctgcgttctgagccccaacattccaggaccccgtccttgtcacattcccgcctccacagctgggtaataacggtgtccccaccatggcctgaaggtgtggcagcctggcaggaaggaaggccggggtccttggagcaggctctgggcatgcagccatcaataggcctgcagtttccagctgtgggaggctcctgggccagccacacaccctggctccaccctgtttccaccctgggctcaggcaggaatggtgcatgcagtggtccagacttcctgccctatcctgctacgtggacccatacaaaagggctcagaggtgccccaggatgaacacgctgagttgaggcatttgcctctaatcgctttgctccacagtggcaagacctctcctccaggggccttcgcttcttcctcggtgcagggaccatcgggtaccccctggatttcatgggtgctggcagtcaccctccacctagggcaggcagggcttctgcataatgacgtgtgcccccgcctctggaaaccacaccctcctccaggcccctgccagaacgcatgtcctttctctctgctccggggaaacggatggagcaataccgtgctggccattaatgcaactctttcttcccccagggaaaactcggagtcccagggttaccagggtatccaggaagacaaggaccaaaggtaacttctggccgtgttaggtgtcccgggacaggcggagggatgttctgcccggtctccccaccctgcatccggccgtgttaggtgtcccggcacaggtggaaggatgttctgccgataacttctggccatgttacgtgtcctggtgcaggcgtgggggttgtaccgccaggcctcctcaccttgcatccagctatgttaggtgtcccgggacaggtggagggatgctccaccggccgtctccaccctgcacaggttcatccactccccatccttgggggcgtgtgtgacactgtggctctcagcctccaccgtgttcactgccttctgcattaatttgccgagttgaaaggaggctcttgggcaatgagtcttctgccccagtcggcacagacacctggggtccttctgggatcctcctggagtcccctgcagtcttctgcacctgttgcttggctggtggcccttttcccctgggttgtccatacccagaatccgtgggatggtcgcctctcaactctacctcaccggcgatttgaaggctatttgctcataatggagtataaaagaaaaaggaaacctttcttatgtgaaatcatgttcaggtttaagtgaaacagctccttgaggctttggaaatcattgaaaatgttattttttttcaaatctcacattttattattcatggttcttccttaaagaataaccagctgcctgcactggagacataattaacagccgaagcggggtcccgtctttctcagatctgcctctgcccgaggcatctccttttagcctcagcaccttttcggtctcactggagcagtcttgttaacaggaggacgggcgtggtgggctgaggctgccctccaggtatttccattctcattaaggaaatgctcctgtccgtccttcctgtggaatgcgaagccccctgctccgtgtgtgtggatgcacaccccatatgcaggagaggtagcttgctgtgaaacaggaatttcatttaggatctaacagtggctcgttgaacgtgggtgtgatgtagctgctgaccgcagcatcgtcactgaatgtggtcaaaggggctgatgggcacttttcctctcttaatatacatccctctggggatggaaagaagagaagtttgggaaagatgggtggtctaaatcaagtccaggcaactttttggaaaggaatggtacatgtgtcctgggcagagactagaagtagccatcagcacagtgacccggtttctgaactgagctctgtgtcacctgcactgaggtttcctgggtcctgccccctgcctagattggcaggcgggcgtgtgagtggcttggctgaactcagtcccctgtgagaaatacaaggtttggacatgtgtgagctcttcatggatacaagtgtgcattcaggacaggattttaagccagacaaatagagacctgccaaagacagtggccagcgccaaccctgtgggcagctgagcgacctcactgcggtgctgcttcctgtgtgggtgtttggatattcaccaggtcagagtccctaaatccatctctggtctgtgtgcaccttgcaaacttctagaattaaagagctggtaggtgctacagtcagtgcataaatttgcattcattcccaactctgcaagctgctgtgctttatttaaagggattgtgggacgccaacacaacgtgcacgaggcacagaaaatacaatgtcacagtgcaatgttcatgtctcacctcagttcagctcagcagtgtgtgtccctttctcccaaacaccagccaccctcctatggatatgggcgcgtgggggatggtggcaggggagggagcatgatgaaactccatttggctttctagagctgaagcctgtgaaatgcttaggaaatatttattgagtagagaggatggataaagagataggtggctgggtgagtggaggggtgtggataggtaggcagatggatgaatgggtaggtatgtgggtgtgtaggcagatggatagacagatagatgggttggtgggaagagaggtggatgaatggatgggtgggcaggtggggtagatacatagatggatggatgagtgggcaggtaaatagacaagtggatgaatggaggggtgggtttataggtaggcaaatcgatgaatgggtaggtgggtaggtagacacatggatagacataggtgggctgcttggcagagaggtggatgaatggatgggtgggcaggtaagtagacaggtcgatgaatggaggggtgggtttataggtaggcaaatcgatggatgaatggatgggtgggcaggtaagtagacaggtggatgaatggaggggtaggtggataggtagacaggcaaatggatgaatggttaggtgggtaggtaggcaggtagatgtatacataggtaggccagtgggtggataggtgggtgaatggatgggtgggcaggtgggtagacagttgggtgaatggaggggtgggtggataggtaggcagatggaatgaatgggtaggtgggtgggtgggtaggtggatagacagatagatggatagagagatagatggatagacagatagatggatagacagatagatggatagacagatagatggatagacagataggtgggccagtgggtaaacaggtgtatgaatgggtaggtgggcagatgggtaaacaagtggatggatgggtgggcagatgagtagacaggtggatggtggatgggtgggtagacaggtggatgaatggaggcatgggaggataggtagacaggcagatggatgagtgggaggataggtagacaggcagatagatgaatgggtgggtgggtgggtagacaggtagacggatgaatgggtaggtgggtagacaggcggatgagtgggtgggtgggtagacaggtagatggatgagtaggtggataggtgagaaggtaggtagacaggtaggtgggtggttgggtgggtgggcaggtggagtctggggcagaggctgtgcactggcatgcaggtggtcccccaggcggcccatgcagcatgactcattcctggcccagctctgatgcctcctccttaaactctctttcagggctctattggattccctggatttcctggcgccaatggagagaagggcggcagggtaaggatagcctggcccctgggcaggcagcttgttcggctgcctcggtgcctagcaagttggttctccagccgacggcctgtttatttctcactctcttgcttctgaaactgctctcctgaatggctggccttaagctcttgaacttcagcaccacgtgttggtgacactctccagacgctgggctgggcaggtatgtgataggaaggggcagaggcaggaaggaagtgtgctgagaaaatggagctttctaattagcaccacaatccagaaggctctttcaggtcattctgaaaatcagattcttctcctctacccaagtgggcttttcctccaagctaattttaaaaggaagggaaaaaggagattgttttttcccttcaaaaatgtcctgctacttaaccgtcgtccaaatttaaagtcatttaaattaacattaacttggacgggattagcaagctgccattgtcataaacacccaccagcttgcagtgtggtttgagtcccctttgtcctcaccctcagcgaaggaacagggggccgggctgagggagctgtgttctccctgcaccttctggagcccccgctggcccaggcctccctgcaggagcggtcctggatgcttgttagtgaaatcacagtgcctgagcattgccacttgggaaaacaggagagagatggtcctcaggccttggactctgagctggccttgtccacggggcatatggcggggacagagaaaggccagtctgtggtgtacatgcaggacagcatctgcagagcaggcctgggggacatgctccccgaaagatggcagagctcacacctgccttgtagccccagccatgatcctgcagccctgcccagcccatcctcctatgccccatcctgctgtcccagggcagacagagctacagggttgcagctccctcttgggcctgtccctcctggccaaaaccttatgagcaaacaaatgtgttctgccagattcacaaaataggaaaaagaagtctgttctgagtgtaagttggcagcacagacccaaggagactattatctccatctccacccctctctgtctctgtccttttacccatccatccatccacccacccatccatccatccatccacccacccaccaacccatccacccatccatccatgcatccatccacccacccacccacccacccagccacccagccatccagccacccacccatccatccatccacccactcacccatccatccagccacccacccacccatccacccatccacccacccacccacccacccatccattcatccatccatccacccacccatccattcatccgtccacccacccacccacccatccatccatccatccatctatccatccacccacccatccatccatccatccatccatccatccatccatccatccatcttctattatctgtctatctctgtcagtatctatccaacccatccacctctccatctgtctctatccagctgtcattcttcttctggagaagccctgagtagtgcctttgggaatacactgtcttctgaaatactcttaggtaccactgtgagaaacatggggaatgtgaggtaccccggtgggctgctcctgtgctgggggacctttcacactgcactgcagtgagagtgtctgggagaggatatggccttctgcagctggtcatgggctgtgactgcaagccctttccatggaggactgtgtgggaccagggacctcgtggagcaactggagcccttgctcactcccatgctcctgactggggctctgcccctcatgcgtctcagcctccccaccggcgagccgaggagcttagatggatgctccagatgtccagggcatcagcactgtgggtcacgggacacaacacaaacctgactcaagcccagacctgccaggcaccacatgccccagtcacacataggagctactcacagcctttctgcagcctctgggtgtctggccctgcccaaggacatttcgttcactgctgcacctggctggtggcacaacccacaacacagacctcaggccaaaagggcgaggccgtgtgcttccccttgagccatggtagtggtggttcatgtgtgtgagatggagccctggcctccttcatctttgccatcacagctcttcagagcctcccgttcaggacactgagcacagcctttgcccgcatgagccttcagtggcatcgtcactgcagaatgaagcctgcagcactgcctggctttctggacagggttgatgctttgtaccaagttcggggaatgacggagagtgtgggtgccctctgatctagtaggttgggcttcccgaatgtccacaggaagctgagggctgggctgtccttgcaaagggacccttcctcttttgttgactgcagaagcctcacttaggttacccagaagcctctgggcgctggcttgccttctgcgcctcggtgaacagatgctgcctcccaggtttcgcccttggccgcccttcttttgccttgggctttggacttggtagtcttgggtgcagtccattcacttaaacagcacatgcatcgcgagtcctttctcagtgctgggtgttctgccaggctctgaggactctggtggtcaaagcagacatccctctggcatccagagtggaacaccacctggtaagcagcactcagaggagtggtggctgtgatgatgaaggacaagggtgagtcagggaaaggtcataggcaccagggtctgacccagaaggtccagggaggcctcctggagcagtgacatttttgctgagccctgcaggagggacagaagtggataggtgaggtatggaaagcaggcagagctgtggggtcaggaggtgaggagccgggggccggcacagggccgagcccggcaagggagacgtgggagtgggctgtgggctgcagagcctgccggggcagccagctgctttgggggaagctctttatcctgaggcactgggacctacggaaggttttagccagggggaatggcactgaagattgtttgaaacagctctggtcccagtgtggggcaggaatgggaaggggaccattccaagggttgaagggaaagccagtgggatgtctgtgctcatccagagaggtcttttatttatttatttatttatttagagacagagtctcgctctgtcacccaggctggaatgcagtggtgcgatctcagctcactgcaacctccacctcccaggctcaagcaattctcctgcctcagcctcctaagtagttgagattacagatcgcctggctaatttttgtatttttagtagagacaagatttcgtcatgttgaccgggccagtttcgaactcctgacctcaagtgatctgcccgcctcagcctcccaaagtgctgggattacaggcgtgaaccaccatgcccggcccagagaggtcttttagaagatcttagatattccggccagatggatgcttctaggtgctaggatgccaggcctgagtgtccgcatgcatgcgtgcatgtgtgtgtgtgcgtgtgtgtacatatgtgtgtgtgcatgtgtgcgtgcatgtgtgtgcatgtgtgtgtatgcatgtgtatgtgtgtgtgcgcacacgtgtgtgtgcgcgcgtttgtgcacacgtgtgtgtgcgcgcgtgtgtgcacgcgcgtgtgtgtgcgcatgtgtatgtgtgtctgccttccacatgagggctgcctgctgtctgcctgctgtctgtctgcctggtcctaccttctgcagagctagcgttggttctgtggaccttgactatgggccagacgtggaaatggcaggaacataagctgctatgtcaagccagctgaagccaaaggaagaggagtgggtgtgagcaaagtgtcgctttgcccctcgggcctcgggccaaggagggatcccaggagccccttcccgggaagggggaaagacccgctcttcagatgcacctgcccgaaagtggaaggcctctcctagctgtgtttgacttccccagtagaaggtcccctctcaagctgcgtttggcttcccagcatggccattgctgggactgtccactccttcctaagggcaagaagacaggtgcccacaagcaatttgcaagggagaaggaaggctaaggaggctggggggggcattctgttccacagctccagtcacagggactcgagattctttggcttgagttagtttataaagaaaacagatgagcaagatgcctgctgggagccccagatggcgttgcggtcgagccggtattttgctaactgccagggccccagcgcctgtgcctcgggcacagtcagtttgggttgcagtcatttttgttgcaggattaaacctgtggtccaggtcatagtgggactgttttagggtggagggttttcattctaggggaggatgggaatgagtaaatctggcagcccgggctcattcgcacctaaatgccaggagtcatcaggttggccgtgggcatcctcgcctgtagaacgcctatcactggaagaaagcagatgtttcgttaattttcatatgcaaatatttatttgaagccagaggatatcaccatagtaattgaagaactggaaccggagcgcattgttaaaaagctacataattaactcatcatcataaatggttttaataaatgcatttcaaaatgggagactctaggaagcagttttgactctggcagcaaatgaatgaaagatgatgagcggaaacttatctgatggcctccagccatacagatccaccttgggcggagcatcagaaaccagtcaagttcagccaggcacggtggctcacgcttgtaatcccagcactttgggaggctgaggcgggtgaatcacgaggtcaagagatcgagaccatccttgccaacatggtgaaaccctgtctctactaaaattagctgggcgtggtggcacacacctgtagtctgtcccagcaactcaggaggctgaggcaggagaatcgcttgaacctgggaggcggaggttgcagtcagccaagatcacaccattgcattcattccagcctggcggcagagcaagactctgtctaaaaaaaaaaaaaaagaaacaaaaaagaaaccagtcaagttcaggaagctgagttgggacacggtgggggatgtaggggcccctgcgtgttcagcccgtggcttccgtgtaatgtagcttaactacattttccagctctgacatctttgcactgcatttgttttctgtggtttggaaaatgcaaaacaacaacagaaaaaagagtataaattctattagaggagaagccgatgactcttggatatatgatttatatattaaattccaagtttgcgcgtctgcagagcctgttgaaaatttaatggctaatattcttaactgtagcaaaagtaaattatgtatgaaaggggttgactttcttctcttttcttgcaataatgatttccctccctgctgaggacagagagagaaagagagatgaggaggaggggaaggagggaggaaggaggaggagggatgtagcggtgctctgaggaaagaaaccagataatagtataaacatccatcagactgcaggaggaaaattggatttcagcaggacttgtgcaggagtgcaaagctgtgtgtgtcgggtgtgcggtgagcttctcgccctgataaatctcctattaaaacacggaaaaggtgggtggcggggaggcccaggttcctcctatcctgctctgaattcacagtctctcaataacccgggagacagctgccacctgagcagggccgggcatttagagagtgactgaccagccccttctctgattctaggggacccctggaaagccaggaccgcgggggcagcgaggcccaacggtaaccaccctttcagcttgtgggcatgtttgggaaacgggagcatggtttagggagcacgtgccaggggctgggggaaggcagtgtctgtgtgtcgggacttgagctgaccttccttctctcccatctgtccagggtccgaggggtgaaagaggcccccggggcatcactgggaagcctggccccaaggtatgtttttggcctcctgggcggtgggcggcgtgaacccaagttgcaaggctacagagacgtggagcgtctgagggtgtctgtgaccttttttattaaaaaaaaaaaaaaaggcaggacattttcttaggtgtgtttaagaagcttgtcccctccagcagcctctggatgcctcagatcagatgtaattaagtggctgagaacgatggtcatgagaagtggccccagcagagcagggacagggcctcgccccaacacctgggaccccaaagacggcagcagggggccaggcccaccgcagactcacccgccctggtcgggaggccccatttcctctcttgaaaggggtttgagagctgcagaggcctctaccagaacctacagaaagtgctttctggcaggggaaggcccaggccggcctcatgcacattcttcccaccgaggggcattgaagccactccttgggtggagaatctggacacagacccagcaggcaggctactcctacctgtccaggatgccactccagagcgggttcctgctgggatgagtcttccaagggctgaggggccgagctggcccgtccctcggctgaccggaatgcacccacaggccaccctgaactcctccaggacaagctctggggcacttctcgtgtgccccgtgacctgacctgaggctcacctatgagaactcagagcagcagctgtcacatgggggtggccctagagcgggtccctgcgttctgcctttgcatgacttttccaggtgctcgaggctggggcacagcctttgtcccactcaggagactgttctggaaatgtccagccttgtagacactgggctgtcagctgcatgcagaggcacggggacaggcaggctttgatagccacagatcagcgccaatgccttctgccccttactgagggtcagggccaccttcaggggtgcacacaggcaatatttgactcagacgttttgatgacgttgtgggccagagtcttttcatccaaataataacaatcataagcttttcccccctctccttccctctcaagggcaactccggaggtgacggcccagctggccctcctggtgaacgggtaagcagctggagccttcgggggtgtctccaagggcagagcctgcctcgaatgccccctgcactttgtcctggggtgggctggggccagggaggcacgcctcagaccctgctgaagggtagggttttcctaagatcccaagggtgggtcacgccctgggagtgaactcttccgtaggtcaggggcctcgaccgcagccctggtcttggggtttgggagtggccgagatgacaggaaatgggtcctgggccccatcctgcccccgagggtgaggcagggtgagggaggggctggaataatggaggaaaggccatgggggtgggaagaaatgacacctgcgttcagagagccaccggcacaggcaggtcagcggcaggagctgctcgggagagacctcttgtcctcaaactggcctttctctgttcccagggacccaatggaccccaaggacccacaggatttcctggaccaaagggcccccctgtaagtaatggcttccttgctgggccagcactgcctgtcccctccaaaacccacctgtcccctccaaaacccgcctgttttctctgaggtctgctcggagctcctcacagtggccggtgggtggagggaggcccgaggtgaaattctggctggtcagatgagggggagacccccccaccgccaaggcggctgtggggcagtctgtggctgtgtcccactgccgggcccgctggcactggagagggctgcacgctggggtcctctctccttgagactgaagtgattttctctgagttctgtgttagtgccctggggccgccatcacaaatgaccaggaactggcttagaactgggtgtggctcttctgtcacagccctgggggccagaagttggagagcaaagtgtggtcagtcagagctggcaccttctggaagctctaggggagatggggtaccaggcctctcccgggggctggtagctgctgccagtccttggcacccagtggcctgtgcacactcaccctggccactgcccccatcttcacgtggacttccgtctgtgtctctctgtcttctaatctctttctttttttgttttttgagacagagtctcgctctgtcgcccaggctggagtgcattggctcgatctcggctcactgcaaactctgcctcctgggttcaagccattctcctgcctcagcctcccgagtagctgggattacaggcatgcgccaccacacccagctaatttttgtatttttagtagagatggggtttcaccgtgttggccaggatggtctcgaactcctgacctcaggtgatccacctgcctcggcctcccaaagtgctgggattacagccaccgtgcccggagcccccacgcccggccatctctttcattttataaggacaccagtcactgggctgggcccacacccatctaggttggcttcatcctaattcagttacactggcaaaaaccccatttccaagtgaggtcacaggcacaggttctgggggtcagagcttccacatgtcctttttggggacacacgtcgccttatggcaggtgtgatgtatctcctccagtatggacaaccatctagcagtgggattatgacccagcaggcatggcggggctggtgggaggaggttggactttgcaactggacagacttgggtcctggcaccggctgtgtcacctgctggctggacctcaggataccaactggcctcttatgcctcggtttctcccttggtagatgagggtgacaacagcacgtcccatggggcagttgtgaggattttgtacgaggacaggcaggagccaaggacagctttagatttgttgtcactgtccccgtgcctgccaggtgattgcttttctcagaggatgtgcaggggcaggagccatggaaataacggtcactccacgtggcattaattctcaaaggtggttgcttctcagacacgaatgaacctcctttcctttggttttttcttcagggccctccaggcaaggatggactcccaggacaccctggacagagaggcgagactgtgagtatcgagggtgctgggggacgtggctggctggctctctgaccaccctgcacgtgggcacagccctcgctgcccagcgccatctaggaccctcctggcctgggagagacaggttggcctcagaaaggctcccaagggccgggccggcttccgctgactcagagccaggctgtgaggcagggccagggcagagcagtcatgcaggccggcagcgccttatggcatctgtgggcagaaggcaggtgttggctttgggctggttttggaaactttggtgagaggccacatttaaagacacacacagattatcctgggccgactgaagcctcatgcatccagccttattttccctctagaataatgctgagtgctaccccgcttgagggatacgtcttttaattgagaaagtgctgggaaagggtctacatgttactcagcgtcattcagtcattcgatgctgcaatacttcaagagggcggctgtgggccatgcaccaaccccacccacgttcacccgggcccttccagctccaatccagggggtctggaggatgcctgcaatgtccctttttacactaaagaaaacaagcgccagtcaggtggaagtggcctctaactagtcactccgctgggcacatggtctttgtagtcagagactcccctttgaccttgcccttcactttagaaatgcatatcacaggctacttcatccagaccagaaaggactccagtgttttcagttgggagaaaaagccctcatcagaaatgggatcattttcctggccccatcagcccttcgaaatttggcccagctccctaaaggtgtgtttcaggaaagggtgcaggcacgcctgtaacctggcccacacctacaagcttggggctccaggctctgaatatctggggacgtgcagtgtcgggtgacttcctcgtcaccacgctgtgttccttctccgagtgcccacctactctgtccagcttaaaggatgaattgcacagatgcaaacatttcccacagaggagagtgaggggcatgccaggatcactgcaagggtccctgcagccaggtttctagggatcaaggtctctacaggactctcccagcaaaagcaggtcccctcgtggaatgggtctctgagtgccctgttgaatatattctccatgcctgctttgaaaaaatcccctttgtctctctttggttcatcgtgatgaaacctcttttaattataccttcactggtgttctgcacggcgcatgctgcctgataaatggagattgctttgctcttttgtttatagagaaaaattaaaacatttcttctgagctttgcatatttttctctaatgccttttcaaggagacaagatagaaggttttacatattatgtgcttttctccctctgacttattctggacggaggctggtgaaagaattaagctgcttgtctctgctcagaaagttgcacatgtacttccggctgccttctgccaccccggccacctctctagacacatggcgctggagtgatgcctgtgtctctgagagccacttgggacatagcatctcctccatgggctagtccagacaagccttccagaaagagcttctctgcagtgttgatttccttcttttttaaaaatatgaaacaccaacggtcattatttctcctaaatgtgagccagaaacttatttctcagcaaagggctaaggtcatattctgtcctcaacagccagggtggccgagggccctggggaggccttttttgtttcgtgttaactttgacattagcaaaacttaaccaaggctccgatctcccttcaggctcttgagctcttctccccgggtccactgagcagggcatgcccttgacacccatccaccgttccttacttctgaccccataagtgcaatgaacattagaaacgatcattctagcccacagctgagctgggcttaaagaggcgagccctcctagagtttgcaaagaagctaagtctgggctgggcacagtggctcacgcctgcaatcccaacactttgggaggccgagatgggcggatcacctgaggtcgggagtttgagaccagcccggccaacatggtgaaaccccgtctctactaaaaatacaaaaattagccaggcatggtggcaggcacctgtaatcccagctactcaggaggctgaggcaggagaatcgcttgaatccgggaggtggaggctgccgtgagccgagatcgtgccattgcactccagcctgggcaacaggagtgaaactctgtctcaaacaaaaaaaaaaaaaaaaaaaaaaaagaagctagtctgctgtgggttcatgtggccccgtggcttggtgtgaggttttgcctctgactgctggacagtgagtcagtgagcccaggcctgaggccgctcaccctccagccctagcttggcctcagggccagccaccttctcctccagcgtctagagtttgcctcgaggcctccgggtagaaggtgtgcatgtctccaccagtgtcatgtggcacctgcagatggcttctcgctggcacctgtcatgctctgcagacgtgcctggaaaagaagcttatgttgccttaaggtcatctttctcctttgagggagagtacagaagtcgtggcgacacccacagccaagccaggatcgttatctacgcgtgagcatgcagagcgggcgtgagatattcccgctgaatcaagctaaaaataacgcatccaagctgccgagttatgaaagcagctggccctcgctcttgcctgttttaaatacatgctgaggagcacgcgggcagagtcacccgtcgtgcatcagaggcgttcacgccaaagcaggtcagtcgtcacagagccactgctgagaaacagccagaggtagtcgcgggtccagaaagggcaccaagccaactcagaaaaggagcgtttggtgacatgataaaggcgaatcgcgtcggcctaaagatgcagaggcaggagagcagccagtgagatgagcttgtgtggcttcgttaccctcgtgaaattagtgcaaacgcacggtggctcacgcctgtaatccccgcactttgggaggctgaggcaggtggatcacgaggtcaggagttcgaggccagcctgaccaacatggtgaaatcctgtctctactaaaaatacaaaaatttgccaggtgtgatggtgtgtgcctgtaatcccagctacccaggagggtgaggcaggagaatcacttgaacctgggaggcagaggttgcagtgacccaagatcgagccactgcactccagcctgggcgacagagcgagactctccatctgaaaaaaaaaaaaatgaaacaagagacatgggcctcttacacaaagtctggaacatctactctggggggaagggaggtggggggcaagcgtcctgctgagaacagtgcagggcagggtggcgcaggccactgcagcaccgtcagtgcagtgactctctcttcacagggtttccaaggcaagaccggccctccaggcccccccggcgtggtcggccctcaggtaagctccagccttcccagattccatgggtcactcggtgtcacttgcccacagggaagagggtcccagcccgggcatctgttccctccacgattccggaggtgcaggtactgctgagaggttatcttaggtcctgaatgttggtcagcgtgaggctcgccccacgcaggagcaagcacagatgtgtttgccctcaacacaaacccaacacgcagggcaaggaaggctgcccaaggctcacagggtggctggggccagacctgggccagctcaggagctgggctcatccctgctgtgggtgtccaaggcagccgagtcctcctgccactggtccctgtgggtgtcacgggcctgcgattctaaccgcagaccagtggcagatcagtgtcaggggcagcttagagccaggattgatggcttagagctgcagaacggggaggggtcaccttgtgtcctagaaagcgcacacctcatgtagcggtgagtaagacgtagacctgctgcagccacagaactgaagggcatgtgggctctgcccctggtgtggcttttctcccatccttggcctgtcctgtggctgaatcagcctccctcagggcacatcccaggaaggcaggcttggccgtgcctcctgaaggcgccaggtgggggaagagggccacgcggggcccagcagatgccaggcagtgagcagcgtaccaacacccaccctctagatttttgccgggaagagaaggcttgcaaaggcacttggaggtttggtgtgcccgcagcagacctttgcgtccatgaccagggctgtccttagatttaggaagagattctcactcccttgcaagtcactcgaaacgtctgtggctgacactgattttccccacagggtcccacgggagaaacgggcccaatgggtgagcgtggccaccctgggccccctggaccccccggtgaacaggggcttccgggccttgctggaaaagaagggacgaaggtgagtttctggagccttctgtgtcagctcaggcgtttcctcaggaatcattttgggactttgtgtttttcttgcccttttctgatgaatgggtaattcgtcaaacagacgcttctcatgccggttcactccccagaccgcacgttttgctcacttttccttgattcactccaggagtcgcgctgacctgctcagggatgggcttgaagggggagcgcaggggtcaccaccatcctccaccctctgctctctccccagctgccagccctgctcccagaaatggataaaaagctctgggacttcatgtgtccataacacgtttagcagaaagtggtccttttaaaaacccctcaccccagccaggtgcagtggctcacgcctgtaatcccagcacttttggaggctgaggcaggtggatcacctgaggtcaggaagttgagaccagcctggccaacatgacgaaaccccatctgtactaaaaatacagaaattagctgggtgtggtggtgcgcacctgtaatcccacctacttgggaggctgaggcaggagaatcgcttgaacccgggaggcggaggttgcagtgtgccaagatcgtgccagtgcactccagcctggttaacacaaatgaaactctgtttttaaaaacaaaaaacaaaaaacacagtgaaaccccgtttctactaaaaatacaaaaaaattagctgggtgtggtggcgggcgcctgtagtcccagctactcgggaggctgaggcagcagaatggtgtgaactcggggggcggagcttgcagtgagccgagatcgcgccactgcactccagcctgggcgacagagcgagactccatctcaaaaaaaagaaaaaaaaacagccctcaccccaagagcctgagaaattataaaagtgaaaagcaaacgtgtttttatcccacctcttggtgccagctccaactgcccccttttcatatctcctcccctgggcgccccaggttcactggccataacttgctgtgttagcacaaaaatagcccttccctttcagctcttcaataaggaatgcaacaaaggcaagctctccagcctgtaggaccacagaagagtaaacctgaaaaataataaagtgaagcaaatgaagaaatactgaaaaaaatcacacacccgggtgtgcatgtagatataggaataaatacacatgtgtacatgcacacgtgtgtgtattctagacacaaagagagctctccgagcttggaaaggcggccacgggcatttgacctgctcgtttgaaaacagcactgtgctccatgttggaccccagagaacattttggaagatatcaaagctttactgtacctcagggaaagtcgaggctaaggggtgactttttttcagaaaatgtggtttcgggcttgaagaagttccttaagtgataagtccatttaggacgatgcttttaatgctatttcgaccatggatttctttgtctgagcacggtcttacaaggagccccaaatctatggaaaagatagacgtgccctcagctcccacatggcccatcgtagcccttaagggccttgggaggaaggaccccggaactccgtggagcaggggtagagtcagatttgcacgcagagcccgccagatgagcgtggcttccaggtggaggctcaggctgtgctcccacgtgtgggctgctgagtccagtcacgactctgaaaagtggccaggagaagcccaatccaacccaagtccaggagtgtctgatgagaaggccccgacccttggccttgctccggggctggtgagaggtctgtgtcgctggctccaggagagaaggccccaacccttggcctcgctctgggactggtgagaggtctgcgttgctggctccaagagagaaggccccagcccttggcttcgctctggggctggtgagaggtctgcgtcactggctccaggaaagctcatctctgactctgttttcagggtgacccaggccctgcaggcctccctgggaaagatggccctccaggattacgtggtttccctggggaccgagggcttcctggtccagtggtgagtgagaggccaggcggggaatgaaatgggacaggtgcagccctggaggcctctccccacgtgcccttgaccaaccttttcatggctttgcagggagctcttggactgaaaggcaatgaagggccccctggcccaccaggccctgcggtgagtcaaagcctttgtcccatcctctttcttgaatcctactctccaggtcagaaggggcagtccccgagagcccagagcatgcagctgccccagacccccgaggagcctggggaggatgtggaggggggaaaatggccttcagggagatgcggacggcgcatcccaagctggcagccaggatgacgaagggtcccaggggcacaccgaggaaaggagagtgctgggcagcctggagggcgggaggagccactctgtgttgcctgtggagcatgctccctggaggagcaaggagaaagcctacacacctatcgtgggtctgggctgggccagcaggggaagaaacagacacgggtctgcagggactctgaagatgcacgctaaagccaggctgcccacggcgggggcccactgggcaggatggccctcacgattaggccaggtacccacccatccatatgccagcccccaggcaaggcatcccctagaaaacgcaccccatggaggagcacagcagagaggggagtgggtgccccatgggcatgggggccctggaggggaggggttgccctgcaggcatgtgggccctggaggagagggggtgccccgtgggctctagagggaagggggtgcctcacagacatgtgggccctggaggagagagggtgccccgtgggcagaccctcaaggggagggggtgccaggcttctagaagagggagcccattgaaggcaagcacaccacagggcacactgtcagacaccagggggaggagcacctgggagcttggagttacaggaagacacagagccccgaacgctagaccaggtagtctgtgcttgcaaagggccatagggagccactgtgggctctagagtgagcaggtaagtggagtgatcagctggtgctttacaaagtcacgaccacgcagtctgagagcctttgaagcagactgttttcttgctccacctcagggatctccaggggagagaggtccagctggagccgctgggcccatcggaattccagggagacctgggccccagggacccccagggccggcaggagagaaaggggctcctgtaagtactgccttggattgggggagcccttccctcagagatgctggggtcgttccgtgtctggccttgtccctccccctgtgatgtccccaggggtatttccttgggattggggatggggtggggtctgcggccctctaggacagagcgtgtgtcccatgggaacctggtgacctgcctgaggagcacaggaggagtcctggtgccggccacattctttccgccatcagctgagccagaggagccctgtgggatgatgttgggccggtctcagcctgtccacgcgtgcatgctggtgttccccacatgcgtggacagaggaaggggccgaagacagtcagtgcgctgtggacttggtctccgtccagcctcagtgccacctgtgtggtcgggccacagctgcccactgtgtgaactgttccctgctgctggcccagacccatggctgggctcttcctaggaaaggatgtttggaaccggggagtcctgtttcttggttggggggcaggtgtagagagcagatgtccagcaaagaaggggcaggggatgggtggataacggaaagacaaggcgcctccctctgtgtccaggaaagcccacctgctggtaagccccgaattttgcaggctttgtgaagcctcgggagtggggaggagcatgtcttgaggccacccagatcttggtctccaagaaggagatgagcgagcgccctttttgcctagatgcttcctgctagcctgctttcgtgaataacccacaaaatgccacttaccgtccagaagtggtccaccctgacccgtatttggcttctgccacacaattttgcagtgtcccctacctctgcattcaatcagctctggagaccaatttaatctcaacttctccttcccagtacagagggtcagaatgagcttgagttctccaggggaattggcagataatcggtgcagaccatctcaaattgagttaggtctgagtgctgattgttagaaagctgttttctttctctttttttgagatggagtcttgctgtgtcacccaggctggagtgcagtggcgcaatctcggctcactgtgacctccacctcctgggttcaagcaattctcctgcctcagcctccccagtagctgggattacagatgtgtgctaccacacccggctacttttgtacttttagtagagatggggtttcgccatgttggccaggctggtctcgaactcctgacctcaagtgatctacccgcctcagcctcccaaggtgctgggattacaggcgtgagccactgcgcccagccagaaactgtgattttcttgtacgtttcactctcagtggctcatgggtggcaggaacagcctacattccctgggcaggaacttccctggaaaccacattggaaacatctgggccattgagaatctgttcaatacattattggcaattttggtgtcttctaatcatttccagtgaggcacccaggacatggatccagctggattctgtgccagaaaactgaagccaactgggcagtcagtgtatagagtgcacacaaagtcagctggaaatggcttggttcacagtttcaagagagtaaatatttgagcagaaaccttgcaagagttgctctatccaggcagaagctcgtcatcctcccagaatagctccagagggaaggaaaggccaagcaaaggttggacgtctctgagaactcccgacctgaccaggaatgtaggacaggaagcttccacaaaagccccacacgtggtctttgcattctctggcttaagtagggtagacatttctatgaataggagctcagtttgaggagcaggacatgaattgtggagggaggaatggtaagacgaaatagtgatggatgactaaatcccggctacatttagaccagaacattgaatgtacattctctattccatgtttcccttcccaatgtgcacaccctccttctgtgtatctgtcggaagatagggatccctgtctgcagtgagaaaatataggctgctcacagagtgatgcgatggctggtcaaactgagcaaagcaagaacttaagaaggatcatttgagattaccaagcaggcagttaggaggaaaatgaatcaaagttacaaggacaggaaaaatagtgtgtgcgtatgcctgcaagcatgtcctgtgtgtgtacctgtgcgtgcatactcatgtatgcatgcacatacatgtcagtgtgcttctttatatgtccttgtgtgtacatgttggtgcatattcacacgtgtgcacatgttggtgcatattcacacgtgtgcacatgcgagtatgcttgttttgtgcacatgcatgtgcatgcatgcatacctgtgtacataggcgtgttcacatgtgtgcatgtatgcacatgtgtgtgcgtacatgtcttcatgtgtgagcatgcatgtccttgtgtgtgtgtgcagggagagtgtctgcagagaatgtaaagaatcagaaagctggtgaaagctggagctcaggctatcctggtgactgggcttggctcccggtcactagcttagacaatccacatacaggctcaagaatttggccggctggatttggatcctgtctctactgctcactaactgtgcctcagtttccccatctgtaaaagagcagcctttcctaggatgagtgtggattaattgaagcgatgcaccagaagttcatggtccaggggcgggctcagagtcggccctcagtggccctggctgaaatccattaggactgtggggacggtcaccctcaccaactcccacttcctgccagcggatccctctcttgggtaatgagctggtggggggatgttcccaggttggagccacgtttgacctgagatcttctgtattctctagggcgagaaaggcccacaaggcccagctggccgagacggtctccaggggcctgtggggctcccgggtccagctggccctgtgggtccccctggagaagacggagataaggtaaggcaaatccagagtgacccatggctgggcctggctgggcagacgggtgtgggggagggtggtgaatttaaaggacaggatgctggcaggtagagcggctcagccagcggagtgatgccacacccaccccgcagtcctggcattaggggatgatttcacagcagcccactggtaaatggtaatacacgccgtccccggcacgctcgagggacttagaaaccacaccctcctgtgtcattttgaggttgcctgcaacatttgctgtgagtagccacagcagagaaaaatgctccccggtccccccgaataatttcaaattccgaaactgcggagcccggtttaatgaggttttgctcagtatctatttttaaatgtctccgcttgaattatccaggctcccgttcattaagaatgtgctttataattccaaaacgatggctgcaggagcttgcattttatccttcatttaacgcagacagtgaaatttcgctgtgctgtaactttctattgatgacccctctctggggacatttctgactttgtcacctctgcatggataatgccttacatctccgggcgggagacagccttgcaccgacaggaacaacagagaggattttaataacttcttcggcaacatagtaattgagttgcctgttgttaggttgtcatggtagtggcccaatttgaaaaacagagtaaatattttcaatatgacttttcccacatcttcaagtctactaaaagcctgtcgagcatcagatcgagacctcgtcccttttagcccttgtattaaaaaggaaatcaagctaatatatggaaacatttattcgtaggaaagttttagggccacctggaaaggacactgttcttaatctccaagaaaaattcattacggggaacagaaaaggtccaaacggttgtcaagctttctaaccgaatcccccacaccttcccctagggagagatcggggagccggggcagaaaggaagcaagggggacaaaggagaacaggtaagtattggcacgggggcgcgcggcagcccccaggtcccggggggcctcgtcgcaggctgtaggccgtgtgccatgcacgttctcttccaacgttgctgatgactagcgggacatgctgtgaaaatctcccgtgcatgtgtgttcccacaacgtgtgtgtgtgcacacgcgtgcatatctgggagtgagtctctctgtgttagaatgaacaggaagcatccaccggttttgcgaaattaaataaatggagtgtttctgtcctagagggcttgggttctgcagacacacccattgccctctgaggtgagggaaccagaatgctccggcagagacagcaccattgaccaaatgcctgttcatttttccccttttggttttttcatctgttcagaaatcctagtgggttcttgcaaaaaccccatgactctgctaccagctccctcccgatgagtgacatgtcttcttatcctgtacagccaggcctttcccccagtatgttgattcctaggcaagcaggatccgtgctcctgggaggcctgccacagaggctgtgtccttcttccagccgtgggttgggctaccagggccaagggcactgtaccctccttgcttgcctccttcccatggtcccatgcgggaggtctcttgaggatggcacagcaggggacatggtgctgggcgcaagggctccagaggagcttgtgatcctggaccctcactgttgaagggggcctcacgtgcccctgttgtgggtgcatgatgggagctgagatgacacacggtggtctcgagagacattgggggcagctctttgccatccagaaatgggctcagggtggaaccaagatcctcatctgcttcccagagcctgcagcaggcttgcatcgtggtgcaaggaacgacacatttggagactgaactgacgacgttggatgcatcagtccccgggctcaggatgcggtccacccctccctcagccttatccacgatccaagaagctacctatgtctctgtcttgttccccgcagggtcctcctgggcctacaggtcctcaaggccccatcggacagccaggcccctctgtgagtatccatggtcaatgaccttcgaaaagccccacgcccccccagagctgctggcattgccagcatcctcacccatggccggttatttccctgcagggagctgacggcgagccggggcctcggggccagcagggccttttcgggcagaaaggtgatgaaggtcccagaggctttcctggaccccctgggccagtggggctgcaggtaactgtggggttctcaccacaccgggctcctccgcttctgacgccccctgtgtcttcattgtgctctctcctcttgtctttttaagaatggaaaactaaagccaggctgcagggggcctcctgggcctcctcattccaactggaagtgctgtagcttcccagaattccagacatgcccgcatttaccacacttcagcagtggcatttatttctgtgctcattgtggaaactgatgattcgtgagaaacatagtaacagtgacttctaaatgcacctcctagagatgacaacgataaacatttgggcatgtttcatggccatgccttttaaatgtgtgtattctcatgcacagaggcgcatatgtaattgtatttggtgtttgacaatgaatcatgtcataagtcagagagaaagtttgttcccagctttccccattttccatcctccattcccgttttatgttacgagtgtgttgaatgccattacacatgactttctatttatttggaaaacatgatttttagtcactgcacagtaagccagcatctggtggtgacataatttacccaggcgtcccctgctggctccttaggctttattgttttatgggttcctgccataatcacctttgtcgtaaatctttgcaatcttctctgcttatttcctcgggccgattctgagactgggaaccccgggacgtcctcgtgggtagctatgcacagagaagcaccttcccggggcttcgggggctcagtggtgctgtgtgggtggaggtcgtgaaagctgtgtgtgtgtttgacatacacatgacagaacagcgcttaactgggaagtttcctgttctcagggtttgccaggacctccaggcgagaagggtgagacaggagacgtgggccagatggtaagtgtgcctgagactccaaggccttgccgtactagcggctcatgttttggggaaacatttgcgtttcctctgggctcagtggtctctcccttttcctagggccccccgggtccccctggcccccgaggaccctccggagctccaggtgctgatggcccacaaggtcccccaggtggaataggaaaccctggtgcagtgggagagaaggtgaggctcgtgcctgctctggtggcagatttgcggttgtttgaggagtgtgtgtgtgtgtctgtgtgtgtgtgtctgtgtgtatgtgtatgtgcgcatgcacacgcttgtgggggtgcatacacgtgtgtgtacctctctgtgtgtacacagagatgagaagtactcatttctgtgggcatggctggtttattcctatgaagggcattttgaaatgtaggcagatgcttgtgaaatggaactgggaactctgactgtccatttgtgacagccttttgcagaatttccagacgatgccccaccagcaaagcccctgcctcctccaagactcagctctggtggagatcatctattccttaaataactggtgtttctaagcttgcagtttccatttcagccgaattattttctcaaatgggtcctctccatttgatctgattggttttggagcccagactccatgagcgtcatggacccagtcgtgtgtgtgtgtgtgcctgtgtgtgtgagctcctgtgtgcacatcggtgcatgtgtgtgtgcctgcatgctgggtgggacagcatttgcctgactgcaaaagcacctctcccagttcccctggacaagagggaagacagagtgtacatccatgcacttgagccccctgtgcaccgtttccagagctttctttctgacatcaatcaggccattaaattggaagacgccttccaccgctgctcattttttatgatacagaaattaaagaggaatatgccctgctgagaccacagggtgatggtgtgcggcttctgctcagagaggcggtgttttccttggtgtccccgctgtagggcgcatgtttctgttcacctgctgccactgtgcatgccctcttccctgcgtccctctggcctgtgtccctgaggactgcgtgcctgtcctcctgcctcggccctggccatcccccacctggagtgccatcctagccacttaccagcttctcatagttgccctccacaacccttggagcagcgctccgggaaagccttcacagacagtgttgcttgcagtctggacactctgccctgtatccatcacgtgcctgccacattcctcacgcacctccaattctgggagtgtgtggggacagcactccccagaaacccctgggtcctgggtgcccaggggcaggcagacagcaggcaggatttggcaaatgcttgaaaccgtagcactgcgttcatcgcggtgctcaccgctgccataaccacatgcactgtctccctagggcgagcctggcgaagcaggtgagcctggccttccgggagaaggcggccccccggtgagtgagcgggcgctgcgggaggggtgggatatggccgagcgggtgtgtggacggggtgctgggttggaggctctggctctgccttagcttttccatccacgaaatgggagttgtaacccctcttgtgcccatttcatggaatgaccgtgaacaaggtgtgtgatgtgggagtcagcatgtacacgcagacctagcaatagctacctgtgcccagtggcctgcagtaactctaccctctgtagtgtttgctcctggccccttcgcggggcagctgctgtcacctcgtccccccggaccttgagggccagactaggaatatccaggccttctcaggccagatgaatgttcactatgaggccagcccaaaggtggctttcaggcccaggaccagctgggtggactcgggtcttctggttctagctgctccctccccatgagatccgtggagtctgtgggcaccccttgtggtcttcactgactgatgtctggtccaggagtcagtccctcccacccagagctgaatctcaggctttgagggccccagaaagtgaaggctcctcaggtccccctcagggtgcacacaggagctgattctgcccagggcttggggagcgacctggcagccagccccctgcagggctcagcagatacttggaaaggctggtctgaatggggtgagaaaaccggggaggcccaccttgctctgggcggcgacgtggttggctctgaggacttgacactggcctctttcctccagggacccaaaggagaaaggggagagaagggcgagtcaggcccttcaggtgctgccggaccccctggacccaaaggccctcccggagatgatggtcccaaaggcagccctgtgagtattccagacacacctcaggggccctgcagcaggggcggggctctgcactgggatcattctgactcactggcggtgcactctgctctgagaacagcttcaagaccattccatgtgttgggtaaattttctagacactagaggttttcataccagctactgaaccaaaatagtggagatgagacagggcgtggactggaggagaaagccctgagtgattcttctctgtgggccaggcggccggctgagatgcacgagtgacagccaggctttgggaagttgcccccgcccttggccggccctgattttgcatcaggaggggcttcggagaggcacattccggaagtctgaaggtccaggttctagttgcagcctggagctcccaggaatagacctgtgggcggaacgcctgccccttgcttggctctggaaagcaagagaccagctgacccctgccatgcccactggccaggcttgctggctctgggacatgctgcacgtggaagggtctctgggccataaagtgcactgggttgtcggaactgctggaaagtcttaggagctggacggtggcaggtggccatcttgaggtggtgacatgattggccgtgtgtggtctcagtcaggttgctgatggccttggctgcttccttctttcttcctttcagggcccagtgggttttcctggagatcctggcccccccggagagcctggccccgcggtaggtgctcaagagggcaaagccaccggatcccccacagtgctggcctgcctctgccagccccatttcccctctttctggtggttctttgtgatgaactcccactggggcaggcaatgtcccaaaaggcactcgtgttccggtgatcagagcaagaaaacgcctttgaccccactgaccatgctctgtgctggcaccagaatggatttgggttttgggaaggggctggagatgcattgggaactggtgcatgaactcagggtgccatccggggttcagcaaggagctcgcttttgcctccatagggtcaagatggtccccctggtgacaaaggagatgatggtgaacccgggcagacggtgagtccacaatctgggctggcttcctggtggaggtgtcagtgtattcttgggaccttgcagcttgcttgactcatttctgggaaaaactccaacctagttgatattgattcctttatgatatcgattcccttatgatattgattcccttatgatgttgattcccttatgatattgattctggacagtgacagagctcatgaactccctctgagatgcacgtgctgtctcagcagcaggtttgcaggcagccccagggcttccacgacccaccatgggctcgcccgggaacgtcagatcttacccacagctctgcctagcagggccagtgcctctcctcaccaggcccttcctgccttaccttgaccgagatcacactggacgttgcatctgacgcttggcgttgagtgttttaaacaccgcttcaagcccagaacgtctttctgggacggatcgacccccatgggccctgggcaggactgggcctggaggaggcccctgaggccttgcagatgcccttgccccaccttgcacccagcctggccaagcgcgggggactgcggacctgagggcaaaggccatgtcactgagttgagaggagcgtccactcagagaaggggttagggatctagcctcgggctggatttccctgacagacacccccagtccaccacttcccggcctgtgtcctgggacgattcttgtccccccttctgtgaaaggggatgccagtgcctcgtccctgcccaggttgtggtggggaccgaaccgtcattgtgtatcaagagtcagcactgtgagtggggaagttctcttccaaaatgcagaaaacccgcaggatgggagttggggttccttacgctgtcacagcccgggtgcgacactgtcttaggaccctctgtgctagccccaaaagaagagagaggcggccgcagggctggccgaggagtaaatagactgaaatcgccatgtgttttgcctcaattgagtctaacgggccccaattcctcacactctgttctttctcccaataccagggatcccccggccctactggtgaaccaggtccatcggggcctccaggaaaaagggtaaataatcctgcaggcacatccttgctgtcaaatccctgcatgaaacacccccgcccctccccgtcacctttgcttgggccctgggtgctctaagctgcactgatgaggaagggctcgggtgtggcatgttctccacttagcctcggccacatcatcacctaatcacaggcttgccaggtcgacgcagctgctccttttaggacaggccgcctgctgacacggtcagtgatatccatggtgggagaaagacacccgcaaagctgcaaaggtccttttcccctggctcaggttttactgaaaagccagaacaaatgagaaggcatcttttgcagattgaatggtccagccacttgctggtggggcagtaaacagctgcctggtgcacccaggacggaggccacacacaactcgcggcgtgcactgcgcctccccacgtggcctgagaggcctttacctgggactggagtccataggactcatgctgaggacccgtgtcactgcgggtggcccgggagcagcctccatgaccctgcacccctgccctgcagcccggcacaccctgagcacctgcacccgagctcgtccctctgcccctgcaggccacacacacacacaccctgagcgcctgcacccgagctcgtccctccacccctgcaggccacactcaccacctgctgttctcttgcttctttcagggtcccccaggccccgcaggccccgaaggcagacagggagagaaaggggccaaggtaacgtgttttggagccaggctgtgaccgcgtagacctcccccaggggagcccagagggtggggagtggacaagcgtgtgggcagagatgtccatggaggctgagagtggctgccccaggggcacctggctcatggcctacctggggaggagacctggttctctctcaaggaggcagccaagtggtggccacaagactggggccgtctgccttgcccacctgagggaggaggcgggtggtgggtgcgggattcagggagcccaaggctgagtagttatgtcccccggagccctgcgacctcatgcctggtctttgagtcggccagacctgagccgcctacctctgaagtggaccgtgtccgatggtgaccgtgtctgctgcggggcccgtgcagaagatgggacgccgtcacccatgcagttggcttggggcctggcccagagcacacgggaggctattctgtcagtgaggtgatggcggcccggcctggcactgtctgcctccctcctggaggcgcctgttgttaaggagacgggaggttgtgcggttccatccctgctcgggcagtggcgctgtgacacccggtctgtggtcggcgcagtcagcggagacgggatccctgctggcctgggagatgatcgggatggagacttgaccagggcagcttccacaggcaatgaaatgtggagaattagggcaaccccggatatggggtcacctgggactcctccagaggtgcccagggtttccgagcagtggtcctgggccagggtgcctggagcctagagctccggacctcattctgccctccgccgtcctgcagggagaagccggcttggaaggccctcctgggaagactggccccatcggcccccagggggcccctgggaagcccggaccggatggccttcgagggatccctggccctgtggtgagtaggctgtgaggggcagaggggttgccgagtggagggacgggggaccagcaactcatgcagagcgtctctgtgtttcagggagaacaaggtctcccaggatccccaggcccggacggtccccccggccccatggtgagtcacattcctcatggtgagcatagcgggtgggatgacttcgccacccaaagccccaaggatgaggactctgatccccctgcctcctcccacagggtcccccaggacttcccggcctcaaaggagattctggtcccaaaggtgaaaaggtaagaggggcctccctgccccagcaactgtgactcggggccttcaaatttgtggccgtgggtctcaaactcaacaagctcttgatccgtcacctaaatgtgtcaagcacctgctgcaggctggtggtggggaacctgaggggtgacaaaggaaaatagacacgctgtgtttgaggcttggcccctgcctctggggggtcctgagcagctcgggagatcccggaggcccctgcggtattgacggagaaccttccagctaggcacagaggccccggctgatgggtgtccaggatcccaggttgctgctctccctgggctgagcggccccagatcctttccgcaggaggtgtgaggacatttctgcagtgggagcaaagcccttttatttttctaactgctgggaattgttttccacttgcattgatttatttacaaacataaaaggtactcaggagtgagatggttgtatatgaagcagaaggcagtgagggccctctcatttccactctgacgtccgccaccactgcccccagccccaaggcaaatgagagctggggctgccttgcgaggcttgccctgggttcctagaagacaaacatagacagcgagtgtcatggattcttctttttttagaaaaacaacccatgattgtaatatctataatactctgcatctttctttccgtgtcagtccacaaactttgttttagttccgtataggagcaggcgttcggatttgccataggaaattggagagcgtatacgaagagaaagacagagataaacattaccactcaggaaaacccctttatcactttggtctgtctcagtgtctgtggctccctgtctgtttttagacgtgactgtggccagcgaagggccacctcggacctgccgtttcgtcacctggcccctctgttgagcctgttccccttccaggggaggctgaccatgatgtaaagcttcctgtgccatggctgtgctgcgtgctaactggcccaccgtggccgagcatgaggcgtggctccctcaaatgccccttcctgtcttcattttcccacagggtcatccaggcctgatcgggctcatcggtcctccgggtgaacagggtgagaagggcgaccgtggtctccctggcccccagggctcctccggtcctaagggagaacaggtgcgtgagatggcacttcttgcatgtgggctgtcgagaggcattttagatccctggggcaggcacccaggggacaggaggcccatcagagcccggaaggacgtccacacgtcggttgagtccggtcatcctgcttggcagatgggaacactgacgggctgggcttgcccaggtgcacagtgagctgggcagagccgtctcccagctccatgccctgactggcaggcggggcttcctcctcatgaccgtggtgtcccccagagctggagggactcggaagtcaggtcattctgcctggttcccagccctgtgggagagcctgtcacccaccgcttgcccaggaggtcactggtgacaaccagccgtgtttgccagagctgcgggcagagtggctgttctggctcctgcttccaccttgtccccagctgcccccaaactgtagctcattggagtttgcagcctctgcaaaccatagccaaggaaacgccatgcagagagcttcactctgtcccacaactctgagtgacttggaagtggcctggggagggtgacgtgtgccatggaggcaggagaggggatgaggtgacctgtagtgcctctgtccttcccccatgagggccacgggtccttattcctgtgtgggaatctttccgtcccgagcaaggtgtgacggacacacacacgcacagtatgctgtgcccacccacgcccatgcctcataggatgcgggggacagggcaggagcaggcagagcccctggaggctgggagtaaggtggcaccctcactatgggcccggggaaggttgcaggacatggctgaagggtggagctcattgcaaaccctacctcactggccagtgtcctccatgccattgactgttttcctctgccggtatccccaggccacagcagggtcgtcggaggagtgccgcccagggtgtggtggcccggcaaccacgagaattagagaggcatccagggtccccacggccagcggggaaagcacccctgtgtccaccctgtttgctcacctgccctcaccccaaaccatggtcttggcggcattgctgatgaaggtgtcgggttggtgtgcaggcttgggtagttgtggggtccttacaatgagccacagcccaagttcctgcagggacaaggtgaagggagggaagcgctccctccccagtgaaatacggccatcagccctccgctaccctcgcccccagcttctgcccggagagagctctgagtggaatccagggctgtagggagagaggctgcaggtggctccagctgcccgtggcaaagctggtcaaagctgttctgtgccagcagctcagtctgggagggagtcagtggggagaaggggtctgagcggaggttccacgctccaaggatgcagaaagcacatttacaggcaggacaggacagtcagcatggatgggactccctgcccaacccctccgggcttagttctagaggggagactaacaccatgagcaggaaacagcaagaggggcccaagccagggccacaatgtcagggcagtggtttctgtatttccaaatgaacgtgaaaagaggtgctcagcctgaagtcctcggtggcctgggggatgagagtgagttcctggcagcccagccgggggagcagtgccgagggctggcagccttggggtggatgctcaggtcgatggctcccctgacatgcacagcccaggatcagaaagcagccacaggaggctgctgaggggccaaagggcataccgtggggaagggacaggggagccgaggggtgtggctgggtagcagggttgcagccccgcagctcctcctcgtctgaaggtgataacctgcattttctggtccttttcagggtatcactggtccttctggcccgattgggcctcctgggccccctggcctgccggtgtgtatctgggaggggcttggtcattcctgggagggcagggagggtggggataagccttggggcctcagtgtggagctagagaattgtggaaaagtcacacgagaagctggaattggggcctccagggtggatttgcccattaactcaacattggggttccaggagacagaagaaaggaagtggcgttgcccggccatggtttttggtggggaagacagggacaggaaacggtggccatttcagggaacgaggccacttgtctgtaggcatctggggagggtgcggaaggtagtagttggctctccagccctcccaattcccaggagcccggccagcctggcccagacaagagcagttagctgccctcctctggcaccgctgcctgggtctcacattgctgggagacccagcattcccagggcatccccacagccgctgggctgcaggtacacatggcccccgggggcccctggcacgctgagggctggcccctgctgtgtgctatcagggctggggggtgcattccatcagccccttctgagccaggacatgctcttttccgctgcgccccccccgcggctgtctgagctggggtttcctagccagggtgggtggtaggctggccgggggcaggtaggaccaccctgtgtctccacgaggggtgagcaccagccaggccccgaccctcctcccactctagccgggcaaatacaagcatagactcttgagggggatgcgggtgggagaggggcgaggggcgagaccaggctgggcaggacatggagcacggtggggctggagctgagacccggcttgctgacgttctgccctcctctctctgcagggtccgcctggtccaaaaggtgctaagggctcctcggtaagtaacatgctgcccagccaggccaatgcctggaaggtaggggagggcgacgggtcccctggcacgggaacaaactacccagacaaccgtcctagctcaggccctgctgctcacgatcctcccatctttctacactgacccatggcggactgaggcaggtgggctgctcgccgcctgccctaggaagggctccatccctctctgttctcatctcaaggatccaggagggtacaggggtctctgccattctcttctctgctgtggctgatagggccacctcccccacataggtctccagggaccattctagagctgaaggtggattcaaagtcccctcatacctctgtgaccaagggttgattcttttctttctccccagggtccaactggcccgaagggtgaggcaggccacccaggacccccaggccccccggtaagtagcccttgaagcccagaaagcgggacgggggctctggctagctccgagggaattgagaaagcaactgtgtgtgtgtgacccctcctgagactcatgaagcccatgtggcatgcccgggccttgtccctcgcacgcagccggggaaatgagccacacaggtctatcacaggaagcttacaggccaattggccctgagaagaacagctggccaggagagagaggatacacgtgtgtgctgtgtgtgcatgcatggtatatgaatgtgtgaacgtgtagtatatgcgtgtatgtgactgggcacgtgtgtgtgcatgtctgtatgtgtacgtgcatcctgtatatgtgcatgcatgtgtaatgtgtgtgtacatggtttgtatgtgcatgtgtgtgtgcatgatgtgtgtatgggtatgcatgcatatatgtggggcacatatgtgtgtgcatgtgtagtgtgtgtatattgtatacgtgcatgcatggccgtgtgtgtgtgcatatgtatatgtgtacatgcatgtctgggatatatgtgcatgtgtgtgtgtgtgttgggatgggggagcactagacaaggccctggaggtgaaaggtgaagcccagtttgaaccagggcatggcgagtgcactattggacacccccctttggttgtggagtctctccaactcccatcgtcatcttagctgtggccttctggaagtgaatggctctttgcatcaggaggcattcatgtggccccactgtgttcagccccagctagggctgcagaggccagactggggagacctggtccctttcctcaaggcttggccttttgtgtggctgagggcaggatggcagatgcaagcccaaggctgcaaactgttaagtttcagctctagagagaaaggagaggtgctccatgctggcaagcacctggcagtggggatgggtgtggaatgttccagagactggaggaagggatggaaacagttctaaggcggacagatgtccatgtagcccaggttgccaggccccagggaacccctgcagatgtggccccagctgtccctgctctgctcatatcctgggacccttcccatcctccatcacccaccgctgctcctgttctgtcccccagggccccccgggagaggtcatccagcccctgccaatccaggcatccaggacgcggcggaacatcgacgccagccagctgctggacgacgggaatggcgagaactacgtggactacgcggacggcatggaagagatcttcggctctctcaactctctgaagctggagattgagcagatgaaacggcccctgggcacgcagcagaaccccgcccgcacctgcaaggacctgcagctctgccaccccgacttcccagatggtgagggcctgggggggcaggggtggccccccaaagcgggcatggacctgcaggacacatggagtgtggcaaggacagttcagccaggcacagcggaagggacaggacgggcagccgcagcctccccatctgtggggccggggtgcgcaagagcctcccctcttgaactttatggaggcatctcagggtgaggccgggtgcagaggccaaggctttgaggtcagactctccaggttctcatctggtcttaggcattttctggcggggtgacctgcttgaacctcgtgttcctgacctgtcaaatgggaacagaaacatctcccaggaagaggacagagttgcgtgaggcagtgcctgagaggctggcacagtgccagtggaagtaagggtcagtgttaggaccggcagcagacgctgtgcttgggcaaacggccttcaaactccgcgatactgtaaaaacacatccttctcctcaccatcatagcctcaggcaccaattgaaggataaattcccattagcttttcttccccctgggaagtttgaatgttccccctgcaagattcgagggatgttcatggttccagtagactctgatcctacatgcatgaatttccagagttccttccagaaccctctctgcatttctgtccacccagagagtaggccggaccccaaccctcctggccaccagaacacgtacccagttgcttcatgcaccagctgtgttcttggtgaatgagtttgtccacatctctttatgggcccagcaggagaagcaaaatgcaataaagtaaaccccagaaaggcccgtgttggcggcattcctggggcgtgcattttaactgctggactgaaatgtcacagcggcttccggaaccatccagggagcaatccttctgactctgcctgcctccctccccgtctctgaaatccaggtgaatactgggtcgatcctaaccaaggatgctccagggattccttcaaggtttactgcaacttcacagccggggggtcgacatgcgtcttccctgacaagaagtccgaaggggtgagtagctgtgtccctccatggccccagcggggcaggcgtcacagacagggccatgccgagggcttcaagcatttcttgtatatgcagctttaagactgaaagccagaaatgaatccgtttcatcagtgaaactgttctttcagaagtagacctgaaattgttttaagaaattttttagtaataaaataggtttgtgcagcccggggtcaggaagggttggagggctttccacctggcatcctgccgtcccagggctgggacttcactcactggttgataaaagcttttctccggtgactcagtggtcccactgacctgagacccccattaaaaccctttaaaggaattgggagcaggtacaataacgtgagcctgagacatcttccggaagctgccctttgcctcaattcttattatccagcctgtttctgtgggttggccctggtccctcctgagtgctttgttttgaagtctgtttagtgaagaattcggggtggggagctgggctctgttgagattttgtggcatgtcacttaaatacccacctctgtggcctttcggaggcctcagcgctgtagcaggagtttgtgtgcatgtggatggtgtgtgggcacatgtggatgagtgtgtggatgggtgtgtgaatggtgtgtgtgtgtgtgtagatgctgtgtggttttgtagttggggtgtatgtggatggtgtgtgtgtagatggcatgtggatgatgtgtgggtgcatgtggctggtggatgggtgtgtgtatgggtggtggatgggtgcgtgtggctggtatgtgggggtgtgtgggtggtgtgtgggtgtgtacatggtgttcgggtgtgtgtggctggtgtgtgggtgtgtagatggtgtttgggtacttgtggctggtgcaggtgtgtgggtgtgtggctggtgtgtggatgtgtatatggtgtgtgggtgtgtgtggctggtgtatgtgggtgcatgtggctggcatgtgcatgcatgtagacgggcgtgtgttgctatccctcaagcatgcacctgaggcaggtccagccttggcccaggcgaggactgagtctccctgttgctcctggaaggtgaccaagcctgcagctctcgtgcccctgcatcagcttgaacggcctctccttcatgagctcgcagttgtcgcgtggccccaggcaaaggccgcccatttctggggccgcagcggtttgctgtgcaggtccagacctgtgcgcccctgcagcctctgcttcctaacaacctcagtgccccagaagcagtttcctgccaggggaagagcagctacgttctccccagggaccgccatccccttacccctcaatcacgccctgaccgtgctgagctcagtagccactttgggttaggagcccactggctgcagtggaggctgcacatggctggagatctgtggggctccaagtgcaggggtcccctcccccacctgaagttttaactccttgagaacctgccttcctagtgacaaaccctgttcagagagaatccaaacacgggggccttccatctcggctctcgtttccctcagtctggccagaggccccgcgtggaattcccttagaaaagaggtttctcggccctccttcgcggcctgcctctgcaaatgggtggccttgccgctgtggaaatcacgggccagactcctccaaactcagaggtttcctgggaagccgcggctggtgttcacggcacagcagcgtggggctgctgagcgaccccaggctcccccagtgttgaccagccaggcgtccacaggctgcagcctcgggcctgggctacagctgcttggccaagggcaagtggagacgctttccgaggtggcccccttggacccggaggaggctcacagcagaggctgggggagcccgcgcttgcccacatcccgggactcttccaggaagaagctgccttcacgccgcctgggcttggcattgacagtggcagatttggaaacgagagagggtgggagagctctgggtggcgtgagaggcagatgggacacccctttcctccaggggatccccttttctggccttcttggcacaaggccagctcaagaagaaggctggggggatcagccagggatcagtcttctgtgtcctcatggcgcacaacgtgagccccagtcagtccaggctggggacaggccggccctgggggcccttccactccacgcctgcagcaagtgcaccctcaggcagccggggctccccttgtcctgtttttgggacccagcgtgcaggtctcccctcagaggaatggctgctcacccacccatccatccgtggcgtcactgaggcctgccctgctgggcccagcctgtgtgtctgcagcctcggcctctgtggaaagcaggcctcaggtgggagccctcccaggaagcgggcacaagtagtgccccatggcagcgtgagctggctgcacatgatccaggcaggcagccgaggagcagccctcacccgcacacgtctcagtccccaggaaggttctaccacacacacacacacacacgcagatgcacactacacaccacacgcacagatacaggccacacaccacacataccacacagatacacgatacacataccacacaccacagagatacgcaccacacacacaatacacaccacatataccacaccacacatcacacagatacacaccatacaccacacacataccacacacacgataaacaccacacataccacacacacacccataatgcgccatacacaccacacataccacataccacacatagatacgcaccacacatcagacacacagataccacacaccacgcacatgatacataccacacatcacagatacacaccatacacagacattacacacagataccacacacacacaccacacatcacacagatacacccataacacactacacacacaccacacatcacacacagaccacacattataccacacacacagcatacacagatacacaccactcatcacacacacagatgcgtaccacacaccatacccttcacacagacataccccccacaccatgcacgcgcacacacacacgcacacagtctggtgccgcagcagccaggcaaggctgtgaggatgggatgaggatgccccacccctcgcctgcagtaaatgctggcttttattaccattcccttggtccatcattcattcattcattcgttcattccctccctcagtgagcgtttccagcagtgactgagcaccaggcgctggcctggggcctaacatgcaaaacgagaggcagagcgcacccttcctgggcagcagcaggggctggagggctggggccaggctcctcacatggcctccagtctctccgagggctggggccaggctcctcacacggcctccagtctccccgagggctggggccaggctcatcctcacgcggcctccggtctccccgagggcccaggtcaggctcctcacgcagcctccggtctccctgagggctggggccaggctcatcctcacgcggcctccggtctccccgagggcccaggccgggctcctcacgcagcctccagtctccccgagggctggggccaggctcctcctcacgcagcctccggtctccccgagggcccaggccgggctcctcacgtggcctccctaagggccggggccaggctcatcctcacgcggcctccagtctccccgagggccccggccaggctcatcctcacatggccttcagtctccccaagggctggggcccggctcctcacgtggcctctagtctccctcaaggcccaggccaggctcatccccccaaggacctgggccgggctcattctcctgtgacctccagtctccccacaagggccggggccctcaggctgcactgaaggcgctcggtgggtcctccctgcagcccccccggcgtgaggatgcaggcgcgggggccgggaaagcctggggccttgctctggaggccggagaagtaacccttttgttctgtttctctccctccccacctccccgctgcatgtttaggccagaatcacttcttggcccaaagaaaacccgggctcctggttcagtgaattcaagcgtgggaaactggtaaggtggcctctggcgtctttgcggttgtcactttaaacccgcccatctcgtatcttacagagtaaaatggcccgctggcccaaagagcagccttccacctggtatagtcagtacaagcgggggtccctggtaagtggccacctcggcccggccacctcggcactgcctgcttgcggcacggctggctcgcggctctgcatggcacccatcgctgccatgtgtgccacaccgctcttgccaaaccgctccacatcacgtgacagcaagactcagctaggtgtggagtcctctccccagcccccgccaccctgacaagagtgtgtttctgcctggagtaggcagatggttttccgtttctgtgtagggcgcgcagagctgggtgtgggccccagcctgagctgatcctctgcccacagacggtgcagccccaggcacctgagcactgaggtcagacgctccagaagcaggagcgctttcactgtgtctgatggcagggcagaggacacagatcccagaccacttaagccattcagagctccttctaggacctgcaccacggatcccctctccccagctgctcagggctgagggctgtctctctgcccaccgggctgcagattcccagttacactgcacaccactgtacgagtcacgttttcacttttggggatcgagtcttacagaatccatccctgaaaggaaacgacattggcctcccaggaaagaaccacataggaggttcttctggccggtgtagtgcccaagagccagtttggacacattgatgtgaggacagcggctgcttctgccgcgtggagtgcccctaggaaccccaccggagtttgatttgggccctctcctggaatgaagagcagagttctgtcttttctcccagcaagttaaaggaccaaggttccagaacacaagacgggttccgggtgtcatttatggcccagattctcctttccctcccttcttgggatccagtggccccactcccaggtggtcctcaaaggagggccttgctctcagaaggcagcccgtgggttctgcggcttgtagcctgaccacttgccatgggttgctgcaccctggcaccagccccagcctccctgggtggacacagagcactggccctgagccgcctttgccctgtctgcacctctgaagcccctcgtctcataacctgaaggcattcacagctgattattcatctctcgtgccctcattgttgttggtttgaaatcatataccagctcctttgcagacactccgagggtctgtgctcaccgtggctgtgtttctggaggcttcccgttttgtggtttgccgtggacttgcagtcctctcctcctttcctctcctgcttttccttttccccgcctcctctgtgctgtgttccaaaaagagctgctggcatacagaaggacctgaaacacccggggacagggagggcccgggaccagggctgcttggcccggagggacagagcgtaggggatgctgatgtgtgggatcaggcaaggaaggggccctgggggtgaagctgctgggggccgaggtggcagggtccattctgcagtcttgcgggtagttaccgcctgcgcttggcactgccctctccccgcaatgacagctctcagcctccaaaaagagcctctcacagcatcctccaaaatgggaaaagcagaaagagcctattttcctcgcttggaggaaatggctgtgaaacctcatttgcagccttcagcccgagtagcccatttccacctctcgtcctgttccacagagagttaatgaaggttggggtgaagggacgacccagggaacacatcagcttactttaggatctttccacggccttatttctagctctgtgaatatcatacgtggacaagaggtagatgggggcctctcaaagatacccagatttttcagccaggtgcaggggctcatgcttataatcccagcactttgggaggctcaggcgggcagattgcttgagcccaggagtttgagaccagcctgggcaacataccaagactccatctctattaaaaaacaaaatgcaaaaatgggctgggcaggttggctcacacctgtaatcccagcactttgggaggctgaggcggatggatcacctgaggtcaggagtttaagaccagcctggccaacgtggcaaaaccccatctctactaaaaatacaaaaattagctgggcatagtggtgtgcacctgtaattccagctactcgggaggctgaggcaggagaatctcttgaacccaggaggcagaggttgcagtgagctgagatcgcgccactgcactccatcctgggggacagggtgagactccgtctccaaaaaaaaagaaagaaaaaaccagaaatgggaattttatctgggcagggctacccacactgcaccatactgagagaatactgcagagaatccctcccaccaggagagcagggcctcactgtgggaccctggggttccaatgcagggcagcgtgccccatgccccgggcccccctgctgccccatgggcactgggggcttcaggtccttctgtgtccggtgctgcccaccgccgctccctgtggtgcacactcttcctcgagtcagtcacgttccctcccagaaggagcgccggacggcccagcctgtcggttggtattcacttttcctcctcaaggtttgcccgtaaggttctcgtggctgcgtctgaaagcgtggagttcgccgatagccctgggactgcagcgtgttccctcgcccctgggaaggcccaggccccaggccagctgctcactttgggctttttctagtggcatctgttgaaaaagtgggtcctgcagtgtgttcaccctcttcccactcccggtgcccaaacactcttggcaatactgaagtcagttcccttcctctgttcaatggggctctttcggagcaggccagaggcagggtccaaaacacaccaccacgaggcagcggttgcataggagtgggcagagcaggtctcaggtgctggctttagcctgcttcattccctgatgctgcaaacaggacaggctgccctgcccagccaggccttccctgcagagagggtccttcaaggtcctgcctaggccaggagagatgtgtgcttcatttcggggagctaagatgcatcgatgtcccctggaagtgtcaggtttttcagaaaccttgagttggcaacagagatgcaaaagtgagatgcatcatggctcaggatgccctgcacgggccttgcacctggtggagctgagcagcccagtcctggatacccagctagtgatgctggagaggccacctaagaagctgcacattgtcctctgatgccttccctggatttgtgcagagactgggagggctttcagggaggatcagtgtcatcagagtcccgggctgacctttggcacaggcagggcaggcagatggagccactcctgtctcaggaagcctgctcactgccctgaggagacgcttctgggaaggggaggagtggtctttcttgagtggccatgccagacatcatccgggacccctgtgcctccaggaggatccccggtcaccccagccatctgcacagccctgaccctccctcaggctcgcctcccctgagcacctcactacagctggcccgctcactccccgaggcctcgtgccccgtggctccagctgctcacagtctccctggccagggccttgtacatcctgggcacccagcagatggtcgtttgttcacataatcttgtgagcaccttcctttgctggtgttggagcatgatgatagggacagggggccagagctggagtggagggacatcgggagggctgggatacagatcagggtccctaagccagccctagaggctggaggtggggaggagccttccctaggagcagtggtctaggctgtgacccaaaggacagcagtgggggcacctcctgccaggtggggagtgtcccaggccgagggaggagccgtgcagtggctcaggggcagaaggaggacacctgctgtccagggctcagggagaagtgtggtgcagctgggagggggctctaagacctcctcctctcacccccagggaacctaatgcccctctctggccctgcacccctctactcaggggaaaccagggctcgcctgctgctccaggtgccccgacccagcgatcgggtgcagagctctgcgtttcaggaatgagaggcaggtcttcatgcaagccatatttttgagaatggttctctgttcactcaacacatacaaacctggcagacccagatcaccatctgggatggaggcacccaggtggcagaaggggagaagaactgtgggtggacgtgcagggagagcagctgcagctggcactgcagtgggtgctggcccaggagacactggctgccgttcaccatgcagcaaagctttatcaagcgcacactgggcagccatggggcgggtaccacggccagtaacgagcaagaaggatgccatcctgccctctctgaacttatagtctgctagggaagacagacactgtgacaaactaaggttggggagggcagccacagagtaggtgcaggagcatctattctgggtaggcttcctggaggaggcagcacaggtgccgagccctgaaggataagcataagccaagagaagtgggtggattatttaaggccctgaaggacatgaggcatggttccctttgttcctgggaacacgcaagagagcccatgtgcgctggcctcggccgggtctgtgggtacagtgcgtttccaggtagttcccccgagaagaccacagtgtgagtgaagcccagggcagtgcggacgtggggctttgttgctgtgtgtgtccccaccctgctgagccccaacacccctgtccccccagctctcctatgtggacgccgagggcaaccctgtgggtgtggtacagatgaccttcctgcggctgctgagcgcctctgcccaccagaacgtcacctaccactgctaccagtcagtggcctggcaggacgcagccacgggcagctacgacaaggccctccgcttcctgggctccaacgacgaggagatgtcctatgacaacaacccctacatccgcgccctggtggacggctgtgctgtgagtatcccgcgccgcgcccagcacccctgctcacgcctccgtggggctcgctcctcactcagcacgggtttacctgtccccaagatgcctgccagagggcagtgagggccccggaccagactctcgccccaggcagccccacagttgcagggagactaggaatcccaggcctatgcagctggagctccgggaacttgggagagttctgtgggttaggatgggaaatctgagacctggccggaaaagccaggggcgtgggtccctcgccccatccagggctgtggcgtggagtgaggaatggaggacccgttgtggttccagtttggagctgggagcctccctctccttggacagggctcttctgggagtggccagaactaagctgggcctgttcccgagagcacggccgtctggaaacactgcagacagttgccagctctccggacagcccggcccatgggccctctccatgtggggagagctgttctggtcccagacaagggaatggaggccggagcggcgggaggcttgctgagacctcacgggcagtcagggctggtattggcgctcatacccatgggccttcccacatgcacgcctttcccctccctactcagtgagctgggctcacctccgctaaggtccccttgagactgccagggccatcgcacaggtctgggatgtgcccgcgtgtcctggaggtgtttagggtgcagctgtgccccaagagcccaggcctgcgggagcctcagacatgtccccctcgtgtggccttttagaggctggaggtgggaatcgctgagaattccagcctgtgggtcttcctgtcactgacattggagcctgttctctccaccacttattcttgagagacctgcggaaagcagcccttagcgcctcgctcctttagtgtttgtagaaaggcacgcctgaggccgggtaaacgggaagcggtttactccgctcccagctctgcaggctgtccaggaatcgttgtgtggtgccagcatctgcgtccagtgatggccccaggctgcttccagtcttgggaaggtgaaggggccagtgtgtggaatgcacaggagagaggaagcgagggggtgccaggccctttttaacaatcagctctcatgggaactagtagagtgagaactcactcattaccccgagggcagcaccaagccccgtgacccagacgcctcccaccaggcccacctccaacactgggaccacatttcaacctgagatttggaagggatgaaggtccaagccatggcaccggcccaggccagctcctgaggggaacggggccggcgttagggccggccctgcagggtgccctcttctgagcaacacggatgggtcctcagtgtgaggcctgggcaggcaggaaagccagagggtggtgccgactgagagtgcaaggcctgtctgtagccctgggagcagagtggacctgggttccaatcccgcctccccctgcccagcatcgctgcggagcacctggccctcacccataggacgctcagctccttttctctgctgcccaagggctgcactgagggttaaagctgtgtctcccagggccatcccgcggccaggccgtgctcagcgggggccgccctcaccaggagtgctcacctctcctcccggctgctactgccttctgcgattggttggggtcagtacttcggatctgactgtggaatatgcagaactcatccctgtgtaaggttgatggatccagatccctggaaagaggcatttaaaaatgccagggaccttacccgtcctccccaaatgagtataacatagcacctgcctcacagggctttctggggagcatgtcaaaccatgcctttagagctcggaatcgtgtctgacccactgcaagccctggatgagcagccagttcctgtgaatatttttagataacatggaccacaaatgtaaggcagtaaacatggaggtgaagagaaatcaggaaccctgtaaaggcgaggcaggacctggagggacagcctcctgagtttggctttgagcttcctggcttccatggcaaaaagggaaactagctggcccagtgggtattgtctggtaaagggagaggaacagctttccagagaggggaatgttccctggaagacaatgctagaaagatggatcccacgaaggacccttggaggttaaagggcaggccagacccctgctccctaatctggctaagagaggcttctgctgcttttaagaccttcctggaagatccaacttcttccatcccagttcctcttgaagctcctgcccctactcattccatcagcaaagcccacttctgcgaggtcccagaagtcttcggcaatgctttctgactcagaacctgacttcctggctccacctgcatcctgggatagggtcaagctgggatcatttaaattccacaagcagagagggctcttgctcagcccagtgtctcccggtgatgagggtgtgctgttggcatctggggaagtgtggccattggtttgcaagacattccactttgccagtctcgggtgtgccaaacgcctccagaaacactccccacgtccgaatgcgaaccaccaatacaagtgttcccttctttctacatacgcaaaacctgaggcccagagagttacggcgactcgcccaaggtctccaggtgtgacagagctgaggctcctaattcccactgcagcattcttctcaccatagccccttcctggcatagctgcaccttgaatacctcagttgacagtgatctcactacctcctgagacagcccaggccatggctgcagagtctcaggatgaggaagctcttccgagaactgggctcaagtctacttgtactatccgcccatcgcctcctgggtctggtcccgtcagccatgcagagggaaccgggttcaagagcagtttcccagcccaagccttctgacatcaaggcccgacggctctctgatggtggacagcaggctgtttggcattctcggcctccacccactagatgccagtaggagccccctaccgagtgacggcaacccagaatgtctccagacacatctcccaggggcaaaatctcccccatggagaagcacccttctacacacagaactaaggtgtgaagggagcgcagagggttcacctgctgcaagggcaaagaggacctgctccttcctgtctcccatggaacccaaagaagctggcacttctggggtgagatcaggaccctcaaagccgagaaccaagtgcagctgccgtccagaccgcgccaccttctcaggcagtcagcagcgtgggtctggttagccgcccagtgctgcaagtgccaccccaaaaggagaccctggctcactctctcgcccccttccccatggcaggcgttcctgagttccacaactgtccttggaagtgtctctgcgtgcagaggagggattgggatcacggggatacccagactgcactctgggcagggagaggagaagcagccccctccccagggctgttctacttctggaaagcaaagattctgactttgaaaagatggagagagaatggcccaaaactgcctaaccccagatggcaggggcaggctctgcggccaagctggacaggtggtttgggtggaaaggtgggcagtggcagcagcgtggagctggggtgcggggcggccatgggggtggcatgcagggacgctggcccggactctcaggtgccctgctgaccccagtccctgacaagcccaaccacaatttgaaaagtcacaaccgtctcatttaattacggaggctgctgcaggaggccctgatgccccgaactcgggccagcggcaaaagccctgcctcagcccccggaggtctgcatgattcatattgtaataacggccgaagaaattggaattccaacgcgggcatcgtttggctggggcgcctgattgacggggccgctgagcgggcccagtggagaggcacaaatcacctgcaagagggcccaggcaccccgccgcataaatcctggtgtttgtgcagctttcggcgcctctggggggccgttctggcctgtaatggttatttatacccctggaataacggggtaacagagcggctcgcagcggcctactttaaatacgcccctctctaagcactctgataattggagcagaggggtcccataaatcccatgaaatcacccgacagctcagcaaatgctgcccgtccctctggggagagactggtgccatcgctgagaagggctgtgaccgacgccactgctgagatgaactgcttgcccagcctcccaggggtggatgagaaaggccgggcagcgccctgctggcttgctgacctgtcgccgagctcacttggctccccaggacagcgccaccttgcagtggcccagtgaagccaggcccaaccatctcactgcactccctgggtgggactgggccagggagcagaggccggaggagaggcaggcagggtggtctctggctcctcgccggtggggagggtgaggaggttggtaccctcagggttcacccctggagggtgtggatggccacctctcattgaatatcctgtgtccagccccgctgcccacctatccttcccagccaccgcagagctgcaactggcccctgccctccgttccacaggagagctgtggccacccccaggcgggcttgtgggacagcagcatcccagctgtgttctgcagggctgagctggccacagggtgccgtctgccccacactcggcattctgtggaactgtgtgttttgctgtcaagtccgggggtgccccatggcgaggtcctttaggacagcgtttctcaaaggccagtcatgaccacgcctatcagaattgtctgagacacccattttttaaaatgcagattccgagtcccaccccagccagacggagtcagcctctctgggcaggggtcagagctgtagggggttaacaagctccctgagaactcgcgttctctctgaagttccaatcccaacttgaaaatcatgccaggctgagccagctgcagtaacagaaaggtgttcctatcaaggcagggttgtgagaagggcagggtcaggggagaagtggacattaggaggtgaagtttgggactctcatggataatagcaggaacgcatgcagggaggtgagcttcattccttctcacagcgcctctgtgatgtgagcatgcccattttccagctgaggaaactgagtcacagaaagcgtatcggttatccattgcttgtaatcaactagccccccaaatttagcagcttaaaaccacagatgttcgttacgtcaccccatgtccgagggtcagaagcctgggagaggtgcagctggctggctctagctcagggtctgtcttaggtccattcgctgccacgacaaatctcgccagctgcgtggctcataagcaacagaaatttgtcgcccacagttctggaggctggaagtctgtgagcaggttgctggcaaggcaggctctggtgagctcccctctgggctgcagatagcagcttctcactacaccctcacagggtggagtctctcgggtgcctcttttataggggcactaataccactcatggggttccaccctcaggacctcctcaactcccatcgaacggccccacctcctaataccatctttgggaacgggaacattaagatcatagtcagggagaataaggcccttcaaggccacgccctccccataggtcagggagcagaataccgggagagctggagctgctgtctgctatccgaatctccggcctgggagtctgcgctgggccctctgcagggctgcatcctggggtcactgcctcccatccgggagggaaccctggctggcccctacttgtttatctgatcatttcttttggggatggggcagtggaaggagatccttcccaggcccagatccagctgcgactgtaaatccagtctgggtctgaggtagcaaaagccatctgcccaggatgcgtttgcaggctcctggtttgcgggaaaggtgcggcctccagggcccttgtcttgggggaagttgacgggacagcagggccagctcagcctcagttataaagaacactgggagttatatttgggtggctttggggagggaccaaagaatctcacacctgcgctgcctgtgttctgggagggaggcggcctctcctaggcttccatcccacatcccagcgcccagggttgtgctgttttgagcaagggatgggtgctgactcatcctgcaggccaggttcattgcactacccctgccctctgtgcctcagtttacctaagactcctctagaccagatggtgtggaaggtccccaccccttcccatacttgtggaggtgaagacccagcccaccgagtgcctaaggcagtgtgtggcaggtggtcgtaggggggtcttacttggctcaaggctctgccggtgccgcctcggactccttccttttcgaacctggagcccccgtttgattttccagtgtgccctgcttgttctgtagctggccctgggtcctggggaggctgcctggaagtgaatacctggggcatcacaaggagtctggactgggcacggtgggaaggctgatcagcttcaatcctgtgtgtgcctcagccacccctgaagccttgggagggtcctgtcgcctcgctgatgcccacaccaccccacctccgacctgtgcagggggactcttgggacatccaccggggttaaatgcatgctctgatcagccatatttcctccaacacttgcccgggcaagcgcagccctgggtaggagacaggacaccagcctgggttttggagccagacagattgtggggggtgattggtaaaccccaagacccccaactgttcttaaccaccggccatctgtctccctcttccccagaccaagaaaggctaccagaagacggttctggagatcgacacccccaaagtggagcaggtgcccatcgtggacatcatgttcaatgacttcggtgaagcgtcacagaaatttggatttgaagtggggccggcttgcttcatgggctaggagccgccgagcccgggctcccgagagcaacctcgtgacctcagcatgccattcgttcgtgagtgtcccgtgcacgtcctgaccctggacagtgaaggcttctccctcccctcccacctgacttcatctacgcctcggcaccacggggtgtgggaccccagcccggagagaacagagggaaggagccgcgcccccacctggagctgaatcacatgacctagctgcaccccagcgcctgggcccgccccacgctctgtccacacccacgcgccccgggagcggggccatgcctccagccccccagctcgcccgacccatcctgttcgtgaataggtctcaggggttgggggagggactgccagatttggacactatatttttttctaaattcaacttgaagatgtgtatttcccctgaccttcaaaaaatgttccaaggtaagcctcgtaaaggtcatcccaccatcaccaaagcctccgtttttaacaacctccaacacgatccatttagaggccaaatgtcattctgcaggtgccttcccgatggattaaaggtgcttatgtttttgtgagttttaagtaaatatttgtattgtattgttataaatgttaagtgtgcctggctttcaatcatgcacggaaacccagtctcagtcccacggacagaatgggcgaggcatggattctgggttgcagtaccgttctgattagaaataggaagtctccccacccccgccctggccaagaacgtgcaataaattggaagtttgccccggggcagcaagaatttatgctgccattgaaaagcaggtaccagtgccccttttcagacagtttttgattcgctctagactttttttttttttaatagggaaaaaatttgataattttcttttttctacatgcacttaagactaaaacacaggtttggattaattttatttgcttcctttttccgcttttcttcccgcagagcctgatgggagaatgtccagggcagggaaaccacattttttgtaggtgataactcaatgaaaattggtgcttattttttacacttctctcttgtggctctcttgtggtgctatctatctgttttaaggtctccttgaaggcgcactggggaccctggccatgcctcgttctccctgctttctttatcctgttattgcctccacagtctgttgccaaggactctaagatcaatgcacgtcactttcctttccactgggcaggatagccaagcacactccctcctgcgctctcccgccccggtgcgtccactcccgagggctgttatgaggactgggttgtgcctacttgatttgaaaacacacacaagcaataaaaagcctcttcctgcattgtctgtggtgtgaccatagcagattatatttggttcctgaatgtttgtggtgctaatttctgtgtttgttccaagccgttcagtcatgccatgcgctgcctcggtagatggagtaatgtacaatgaactccatgagtctctccagggctgcctgcagcacgtcttttccaagtagcctatttggattcccatctcaaatgtcctggatgcgagcgtcagcggctccagagctcggggcgggtgaggtcccctttggggaaccctttcctggccatcgaggtcggggggctgccgtctgtgggcaggaggacccgaggggcagccaggaaaggcgatctcttcactgtgaaaagttgcccgggtgcagcgccttttccttctaccatgggaaatgcaggctgggcccttggggtgagcctgcggggctctggtgctgtccccgacccccaccaccaccagaatgcagttccagcttaggaagccacaaacaagccacccaggaggaacaaaacaccgccagcgtggattttccaaatttccctggaaagtaagtctcgctcttgccaaagaaaagtctggcttggagagtctctggagcccaggatgccagcatgtgccaatgactgtcaccttcatctcttcaaaagaaaagccatagccgaggactgtcccgcgacccccgtggactgcgtctaggtcatgtgattctgttttcatttctcatcccatccaatttgtccttttctcctgtcattttcttcctctgtggtcccttcaaagttgttataatttgtactgaacttcaaaatgtgtcccgttctccccagaccactctagccacagtatattgcaataaaattacttcttatatttgcagaaattcttttggtgtaattttattttttcctctcaatatatataattggacaaacgctggcaaaaagaaaaaaatggtaagcaaaaaacccaagataaagtttcgaggacatcaggccttttgaaatacaatgtcaaatgacacattgtacggtttcaaaaaatccgctagacatgtcataagttttaactgtaatgcccaggaaaggatatcttaaaatattctaaacttgtgtaacaaaggaataattaactgtaatagtttttcaataaatcgagttgggtgtttccaccgtaaa

SEQ ID NO: 277 - DNA, 15340 bp, Homo sapiens
  source 1..15340: mol_type = genomic DNA; note = NC_000001.11:65420668-65436007 LEPROT [organism=Homo sapiens] [GeneID=54741] [chromosome=1]
aggctgcccgggccgtggcaggaagccggaagcagccgcggccccagttcgggagacatggcgggcgttaaaggtacatcgcggtccccggctcgcttgtcgtgtggtggggttgccacctccgttccggtcaagcctggggctgcgccttccgcgcgccgttggggaacggcctcaccacccttcccgcctctccggttcgggaggcgatcgaccgctcccttcgtcccttggggtgtgggtggagcggcgtttcgggggagccttggccctttttgcaaggccgctggccttcctgctctccagtggcggcaccagacccctccccagcctgagccctcggcgagagcggcgccctccacctctcctgagtttttaaacaaggtttccacttcttgacgccaccctaacgcctttcttctggttttctgcccctccgcagtttcctatttgccacaaaggaccctttgtctccagcgttcttagcattgggaaacttaatcctctttttcctaatgatttttccaactgggcagagttgaccgcgggcgggtgtcaatggaaagcacccagaaagacggtgtttctcgcagtcgtggagagtagattacgtgtaattttaatactgctttcttcggtgttttctctgtttatggacagagaagaaaccagtgtgtgtgtagtatgtgttttttgcatggggcagttggtaaaaacaccgcgtcccttatctgtatggcttcagagcaatgcgagacggaaaaggttttttgcaaggcttcctgtattttggtaggaaaacattccatttctaatctgtcgaatagagtagcatgacttgtttttatattggcttttatatcatccttgaaatttgcacccaaagatatccccagttaacatctgctataaacatgtagatagtatatatacgagtacgcctctgttcactatgaatttatccgagtatgtgagctgttagcagcagacattttatcgttatttctggctgacttttatacttaatatcagtttagtaaacatggtttacttggagagtgtcgactgtgttatatatccatttgaagccaatgccgaaaacagatgaaaagtagtgtctcagtactacacatgatcagaaactaccaaatcatgatcacgtttatgtgtgaatgtgttagaaaattgtgatgtagtgaaaaaaaaggaagtctgaaatggaaacggactaagggaaggaagcattttacagattgttcaacttttattgaggaactactgtatgccagagacttaggatacaaagataaatgagaagttattggtgggtgacagagctggaaataattatattactatgtcagtgtttatgttgggctcagatgcggtgggagaacagatggtgggttggattttgtcctccaaaaagatgtgttcaagctctaattccctggtacctgtgaatgtgatcttatttggaagtagtatctttgcagatataatcaaattaaaatgataactggtttaaggtgggccctaatccaatgactggtgtccttataagaagaggggaatttagacatagagacatacagggagaataccatgggaagacggagacagaaattggagtgatgcagctacaaagtcaggagcaccaaagattgttggcaaccatgctggcaaccactgagtgttaggaagaggcaaggaagggtgcttccctacagccttcagagggagtgtggtggcgctgctgacaccttgatttcagaagtccagcctccagaactgtcagaagataaatttctgttgttctcagccatccagtttgtggtactttgtaacggcagccctaggaagctgatgcaggtgggattgattcccctgctccagagaaaggactgttttcacagaagaggcgatgcttgaactgaatctgaagggatcaatgtggcttcccttggcaaggcatggagtgaaggtggagtatatcccaagtggggaggacagcacgtgacatggcgcagggcttatgaaacaacatgccttcttctcttcaggtacttaagctacattagtaagaccagaacttagtggtgagggttgaagctggctggacaggcagttaggagtgagtcaggcgatggtgagcctccgtgccagaacaacttgtaggctgtggaagcaaccgcaaagggatggcagcggtgatatatatagttgaaagatcactgtctgctgtgtagaggatggattggaagagtcacagaggcaggaataagaggttaagggcctgcaccagggctgtagcagagagtttaagaagtctgggagattgagtcaccttgacctactgattcattggaaggtggaatgcaatcatggtgtcagtcctctaagataggacctttaaagtgtagggatagtggtttggttttacacgtgttacacatgttgaatttgaggttcttgttggcggtcaaggcagagaagtccagactggaggtggaagtacaggcctagttctttaggacctactctgggctggagcatcagttgcggccgggcccttgtggtagtaggagctttgggttgaacataagttttcagcaggagtgcgtggagtgaaaagagagatggggttggatttttggtcaactccaactttaagagattcagaggatgtgattcctgaaaaaagaggaaaaaaaagaccaaaaagaatcaaacagaaagatggttgtgaacgttgagaaactggtatcagaacagaaggaagaggtctgcagtacctagctttgacaggcctcatggaggagggggtactgccgatggtcaggcacagaggagaggagcaaagcctgctgggaaaagatcatctgaatgaaatagtatgtggtatttgctttccatccacacatgggcattttccattaaagagtggaaatgtaaaaagatatgttaaaattgacagtgtttctttgtcccttaacatgtgtatactttcagatgttttttaaaaagcactttggcaccttcctattaaagagtctctctaaatcttctctcaagtaaaaggaagcaatcaaaaatgttcattggcttaattaattagtttaatactaattatgagtattatggacttttttcagaagaaaatttggataagatagtctcctatgcttttgatttctacctttatcaaagaacattgctaaaatgagtagatacctgagtcagtcagcatttatttggctacctccttttgccaagcactttacatagattatctcatttaattcccataagctcaataaggtggcaccattatttccattttacaggtgagaaatcaggttcagaggattagcttctacccaaagtcataagaccagatggtggcagagttaagatttgactcatgtttgtgactcagagctcaagattttgtaacaaccttgatactctgtttctcactcagcagcacaacaagggcaaatacgttcctactcccgcagagactagtgtccaatagatacagggaatacatattttattcagtgcacactagttgggaattgtttcctacaaagacatgaaaacaatcttcaaatacttgcagtactgtggtttggggaggcaaaatgatcaaaggtatatattacagggaggcagttctggatataatttaaagaaggagggctttcaacatttagaagctgttggaattaaatgacttgccttgggaggtagtgagttttccttcactggagttatgtggaccaactggctgccctctggtgacaaatacagagggaattcatccattggataggggttaggtactggaattacttgagacctttgtatactttatgatttcaaggtggcagacatgggtcattgtcttaatcagtttgggctactataagaaatatattttagactgggtggcttaaacaacaaacatttagtttccacagttctgaagactgggaagtccaaaattgtggtgcagtcagatctggtgtctggtgagagccagcttcctggtttgcaggcctgctttctgctctcacattggagaacagagggagagaaacacagagagagtgtgtgctctactttctctcttcttataagggcactcatcccatcgtggagaccccaccctcatgacctcatctgaacctaattatctcccaaaggtccacctcctgatagcatctcacggtgagagggatggagccgggaaggtttcaacatgtgaatttgaaagggacacacataatgcagtctgtaacgggtcaaatgtaacctcaataaaatgagtaaattgctacatttgcttgaatttgggacctttttttctttcttttttattttagtaaatgtttttattgataaatgattcacataccataaaattaacattcttaaagtgtaagatttcatggtttttagtatattcagaaggttatgcagccatcactactatctaattccagaaaatttactcatccgccaaagaaactctggacctattagaagtcactccccatttccccaaaccctctagtgcctgacaacctctactgtgggaactttaacttttggctttatttttcacagctctcgtggcattatccttcagtggggctattggactgacttttcttatgctgggatgtgccttagaggattatgggtaagttatcatttcaaaaagaactattcctctttctgtgtctttgtcactattagtatgggtgttagagagttcggtcaatttagcaccaagttctaaccagtgagttagtggagcccagtttatgaacacagtccctttgtgggtcaggtgtacttttgcagagggctctgttaaaaattgatgtattcattccataagcatttgtttaacacctactctggactagctggggacacacaaatgaagagagagtcctgtcctcaaagaggaggtaaagttctagttgtgagtgagagacaggcaaacggtctagtcagtaatctggcagctgcagtggagatgccagcacagtacgctggagctcggataaagtgcacctgagtttcagtgggacagtcagggaaggctgcatggcagaggttgtatctgagccaagactaggtggatgaataagagtttttcagggtgatgagtcaggggaggacattccaggcagagggaacattctacacattttttcattcaaccattgttggttgaatgcttcccatgtgccagctactgttatgggaactagggattaagacataagaaaacaaaggtcctgctctctcagagtttgtgtttcagtgggggagacggacagtaaacaacaaaagtatgcatactgtcagaggtagaaatggtacaaaagatgaagagcacagaagctgggaagacagtggtcagggagggcctctcagaggaggtaaaaagtgagaagaaatgtcaagaaaatcagcaagcaggccatacagatctctagggaaaaagcactttaggcaccaggaaagctgaatgctaaggcccggagacatgaaagtgtatatagccttttcaggaaaccacacatggtacattatggtacagcataaattgtagtggagtggcaaaagaagggttagtcaagagtgtaaaagtcagcacttagggctctatatgcctgccgtgtagaggaggttccattttatacatcagacaatagaacctgggaaaatatcttgagaatgggtttggaggagggggttatgttaaaatgtcattcttgccataacgtgagactagataggaaagagctgagactgcagtcagggagaatagtaggggactactatcataaatcaagcaaaattgagggctggggcagtaggaatggaaagaaaaggagagtgagttaggaaaccaaaccaaccaacaggttttgttcatcgatgtcaggattcaacaaggagggagagttcttagatgtctcccaggtgattggcttgaacaactagatagaagatgatgtgattaggccaggcaccatggctcacgcctgtaatcccagcactttgggaggctgaggcgggcagatcacgaggtcaagagatcgagaccatcctaggcaacatggtgaaaccccatctctactaaaaatacaaaaaattagctgggcgtggtggcacacgcctgtattcccagctacttaggaggctgaggcaggagaattgcttgaacacaggaggtggaggttgtagtgagccaagatcgtgccactgcactctagcctggcgacagagcaagactttgtctccaaaaaaaaaaaaaagatgatgatgatgtggttaagacctattgaagtgagttattatgacagtgatgaattcaaatccatcaccgcagtcctggccaactattacagaaattgtttaaacccaagagggatccagatataagcggtcacttatatttgtttagagccttcacagcaattactttattctagcttttggaatgtaatacggtattattatcctcatttctcgctgggaaaccaaagcccagggtagttaaagacttacccagattgaacagcagtaagtgacagagcccggccgtggtggctcatgcctataatcccagcactttgggaggcaacggtaggaggattgcttgaagccaggagtttgagaccagtctgggcaacaaagtgagaccccattctacaaaaaactaaaataagccaggcatggtgcctgtagcagggttgggaggctgaggtgggaagattggttgagcccaggggttggaggctgcagtgagctgtgatcacaccactgcagtccagcctgggcgacagagtgagactttgtctcttaaataaaaaagtagaaaaaaaattaaaatggcagacatggaaatggagctcatgttctgacgcccttgaccaaacgtttttccactattccacaaccaactgtaaatctaggagttttaattctctgtgatacactgtctttgtaaggtaagaaaatgactcattactgctactacaaataagtttgttttctatctttattttaattttttgttttttagagatgccacaacacccagctgattttttttagaagtttttgtagagaccgagtctctctgtgttgctcaggctggtcttgaactcctggcctcaagtcatcctcctgccttggcctcccaaagctgtatcttgatagtgaaccaggattatcatctatattggaagtcagcaaactgccacatataacctgctacctgtttttgtaataaaggttttattgaaatacagccatgctcatttgtttatgaattatctttggctgcttttgcattgctctgccaattatctttggcagagttgagtagttgagatagtctttatggcttgcagatcctcgttatttactctttggccctttatagaaaaagttggcccacccctggcctatgtatttattgaattgtatatatttaatatttacattttatatataaacaaggtttcttgtacattaatatttctcttagttggatatcggtggcttactatgaatgaaaacatagagtcagattgtttttcacaaaactgtcactgtattccaggaaaaattaagagttcttggctgtggatatgtaaggtgacatatctattccaaaccccttcccctctctgtgtctcctttctcactgttgaaagaagggctttgaagtagagaatgtctaagggctacttcccacaatattgtttggtgattcttgaaacatactatcatccctctagtttaaaatcaggggtccaaatccactgtttccatcctgagtcctcttgaaggacacattcccttcttgccttttggttgcctagatctgtggctggaatgggaggctttcattagtgtggcttcatcccaactcctgcttgtaggtgctgtctgggcgtatctgtgtgattacagtattgtggtgatatgaattattgtagtgtatatataaaaatgagcagagactttttttttcttaagaaatgaagcataagaaatgtctgatggagaaaaaaagattatttttgaagtactgatagagaaaatactgttggaaaccagatggcaattttttttttataattgcaaaatgttgaaatttgggaggaaaacagttttgttttgtttttgcattacactattaattgtgagctcttataatgaagatcaaagtacatctaagcttttcactagtgagcatatttattttcatgccttccgtacttaaaatttatttattattttattcatttaacaagtataaatggagtacatcattctaggccctggagataaatggcgtttgatcaagactaatctatcagatgggaataagtgttgtgcagaaagttcaaagagggtggtatgttcgagggtgacctggggtacattagaatagatgaccagggaaagttctgcttttagaaaggaatctgtcagtttagatcacatggtatgaaggagtcagccaatgagaagatcatggggaaggacattgcaagcagggggcacagctagcgcaaaggccccaggataacagctatgagctcaagagtgttcaagggacagaaaaaaggctggtgtggctacagattaagcaaatgaagggaaaagagtacaaaatgaatggaagaagtagataataccagaccataaaggctttgtaggctagggcaaggaatttagggtttattctaagctcttaaaaggtttcaagcatgcgtgcactcaaaagatctttaccgaactagcttttgcaagacactctactatgttctatagggaaggcagaaatgaccaagttaaaattctgtctttaaagaaattgtggctcagtggtacagaaaacagtaaagtttctagggtatatattatatagtggcttcttaacacaatataagctacctacatagtaattttaaaattatcactacttatctatccctggtagaaatcatcttatgttctaatattcacaattaattaattttttgacctaaacatttaaaatagcaatgattttgaaatagtagtatgtctttcatttaaaatgtaactgttacttttctttttggattttgcctgggtccaactgacagcgtttactggcccttattcgtcctgattttccacgccatctcccccatcccccatttcattgccaaaagagtcacctatgactcagatgcaaccagtagtgcctgtcgggaactggcatatttcttcactactggaattgttgtttctgcctttggatttcctgttattcttgctcgtgtggctgtggtaagttttattttctattgttttgcccaaccgttgctgagtttacttcagaggcctgtgtctgggacctccatttcatgctcattacttaggctttatactcaaggccgtgtgtttttagtttctctgttcctctactttagacctgcctaacagtagttcggccatgccttcagagtgctttctttatttctcttacaacttttagccagacgatatgatttcttactttttctactttaagctattctctggaattgttcttaaattcctgcctcttaaatcttacagtaatccacagatactatgctagcagtacttttctagttgcaagatgaagatatttcaaattcttctcctgcaaatgggatcatggactcaactctcaactcagtataataggtatatgttgagggacaactgtgtagcttccagaaaatgcagtgaataagttgacatcttcacttccaagacaaaaactttctttttgtcttcagagtacacattgtaggtataatttattcaattatttgctattcactgtctttcctactatttgattttattccctccaattacgttctattttaattttatgaaactcttatttgaggcattgaatatcagataagcgcaagtcttgttcattcaataaatatctttgcaacaactgctacttgtaaaacaccagaaataagaaataggtactgtctctgctcctgaggaacacagaaactagcttgctgggtaagtatactataagtgtactaagtgagacggttgaagcatgatcagaatgccataggggcaccaagaagagagaaattccgactggcatttgatatgggcctctaaggataaatagcatttgtattgaggtaggatggctgttgtatggaatgacattcaagtgtaagaatgcagtatatagaataaagaagaatccagtgtggtagagctaaaagaaagttgttgaggttaaggctggaagggttgtgaaacctgattagcaatggtcttgaaccccatgccagtttgatctttgtctagataatggggaaagattgaaggtttttgaatacaacaagattgtcatgactttatttttcttgtgctttagaccagcccttcttaagcgctgcagtaaatatttatattttttcctttcaatactgccatcatattttgtgaagaaactttcattgatgtttctcttgcttaaagtaaaacaaaaaatgcccactagagggtactctcacccccaaatgtgcttctgtaaaaccatctacaaaccatctactaagctggaaagcagttttcagttgtatgaagactattatttaaagtcttttcttgcctagaaaagaaacacacaaatttataactctacaatttttattttccatgaaagaagttgatgtgtgcagaactttcagtacccaatattgtaattgcactatttataatcttaccacttgagttttacttaaggcaatcattgtcaattaaaaacaagtagagaaatatgtctaattgggaacatgttaaggatgataccagacttaattaacaagcatcacagaagtaattagactcattactgaacagttcattgtctcctgttacattattaagccttttagcagctttgtgtaacatttcattggatgtttctaatgcagaaaataatagggattgcaaagagtacaatatgaaggaagtaaggatttaatccttcttttcttgtctttcagatcaaatggggagcctgcggccttgtgttggcaggcaatgcagtcattttccttacaattcaagggtttttccttatatttggaagaggagatgattttagctgggagcagtggtagcactttattctgattacagtgcattgaatttcttagaactcatactatctgtatacatgtgcacatgcggcattttactatgaaatttaatatgctgggttttttaatacctttatatatcatgttcactttaagaaagacttcataagtaggagatgagttttattctcagcaaatagacctgtcaaatttagattatgttactcaaattatgttacttgtttggctgttcatgtagtcacggtgctctcagaaaatatattaacgcagtcttgtaggcagctgccaccttatgcagtgcatcgaaaccttttgcttggggatgtgcttggagaggcagataacgctgaagcaggcctctcatgacccaggaaggccggggtggatccctctttgtgttgtagtccatgctattaaaagtgtggcccacagaccaagagcctcaacatttcctagagccttattagaaatgcagaatctgaagccccactctggacccaggacattttgatgagatccaaaggagttgtatgcacatgaaagtttgagaagcatcatcatagagaagtaaacatcacacccaacttccttatctttccagtggctaaaccacttaacctctctgggtgttacctgctcatttgtttaaaaaaaaaaaaaaagtctcacctgctttcatgctgaggacaagttcagatgttcaagcctataatatttaggcagttcctcaaatttatgaaaagtgttctcagaattgggagacagtcaaagggtacaaagcctcagttaggaggaataagtgtgatttttttttaaagatcacttgcacagcatgctaaatataggaataattgaatgtatatttcaatattgctaagagagtaaatttctaatgttctcataaaaaagttaaatatttgagatcatatgttaattagtgtaatcattccaccttatattcaaaaatcataaaaccgtattgtaccctataaaaatatacaataatttgtcaatatataatcaaaataaaaaacaaaacatactctctcccccaaaaaaacatctcagtggggaacagatgtatcttttcatctgaaagacaatgctgggggaagagctccactgagatgcgggcagggaggctgggctcgagccagcccctgcgttagcaggagggggagaacagataggtaactcttttacatttcctttatgatctggcacttctccccagctccttccctctgccccccacccctactcctcaacagttctggtttgccctgacttctctacggctctggcttcttcccgaagagatataggagccatgtaagcacgcagtgggtgaactgcttaatttcactacgtgttgatgtacttgtcttccgtcctgtaggtcttttctatataactttatgccacccttaaatgaatcattgggtatacctgtcatgttggatcctgtaatcacagttttccctgctcacctttttgtctaagatctattgagaaagggaaatatgggaaggagaaccatttgatcagaatacaaccaatagtctttaagcattgttaaagtatgaaactgaaatacattcaaaacacttaatccttgaggcttgtgatctgagtaattagcaggtatgatgctgggactggaaaatagaaagtaataactaaagggttaatgtgcaacgttattttttggccttgttcatgattttatgttttcagtgtcctgtgtacatatagaattgttaaagttgtcatttccaatatttatattagaaaaattatttagatactttataattttaaccggcatttttaataatgacacttgcatttattgtattgtaataaatttcacttttaactttaaaagtttaactttaaaatttttttgtgatgttgccttgcctgaaaagataacaaaaatgagagaatttcttgatgttttaaaatgggcagttttgagcaataatctgtcctaacagaacagtagcaataagttttaggataccatcttgaatgtctagttggtgtgcaatagcttttctttctaagatggcaataatgattcatttctactacattttgcaaaagtgtttttgttgcttatacacattttcaataaccaaggtagccttcatatgtagccttaaagcattacctcttgattgtatctttagattgatataaagtacttgcatatagagtatttgaagtgatagattattagatttgctctatgtctgaaaagagagctattctgcagtgcctaaatatcatttaaacagtaaatattaataggaaatattgctatatctgaatatataatacaaaagtttgatcatggtgacacaaatgttggacatttttttccttataaaaggctctttttttatatattgtacaatatatttggagattcagagcatagtgactatagtcgaaaactgagattgcacttccaaaattggccacaagtaaataatcttatgaagggattctttatcatgtttcaaacaagtgggttacaagcagactttgagacacttttccacagaaacaatactatgaattggtgattgagttcccaggccaagcctccctcaacaggttcaactctaatatacctaacctgtgatactgaaggtgcctgcctgagttttgggtctctgagacagggtagtgtgagtagtttggaggaaggacagtgcaactttccaccccttttcctaagaacaaggtctttctccttttaatttttccactcattttcacctcctaatgcccttgagatccaggtacactcctgggagttttgttcacctctcccaactgagaaccttcccactgggctccatcctccctcctgaggttcttcatattccagagtcacccacccttctcctcccattagtcagttctctaagtacagctgatgtcatgtggtgctgagaagaaagcagatcacacttcatcacagaaagaatgccttgtgattatcttctccacatctgaaattccttttgacacctgcattgggccgactgccattcccatgactgctgcacctgcgtttttagagaatgcctcataacccactgattctcattcacagagaatgggagaacggaatgaagaaagattccagcagcttatagaaggatagcaatattttgggacagggaaaatcctgtcatacctcatctcttcctcaggaggagttctgagctggtcctgcttttcatagttgtttcttttcttccacttaagaactcatagatttttcttactgtcctaaggaagtccttacctctgaggtatctcctcaatgaatactgttttcaaggctgaaatagttcattatgttaataaccttctttatgttctcagggaaatgcttaggtggtgtcacaaaatgtgccttttcttttctttttttttttttttttttgaggcagagtctcgctctgttgcccaggctggagtgcagtggtgcgatcttggctcactgcaagctccgcctcccgggttcacgccattctcctgcctcagcctcccaaggagctgggactacaggctcccgccaccacgcctggctaatttttttgtatttttagtaaagacgggtttcatcgtgttagccaggatggtctcgatctcctgacctcatgatccgcccgcctctgcctcccaaagtgctgggattacaggcctgagccactgtgcccagccaaaatgtgcctttgcaaagtttgcgaaatcagattttgtatcccaatagaaccaaaatatttatgaggatgctagcattttccaagcatagtaattagttcacaactgagaaatattatgtctgtagtagataaatattagttgtgcattttaatttaattctcctttttccattttgtctcatgaagtaccttattgcaaaaatcccactgagtaatagctcataaattataatctttcaaatagccatgctaccagcgtacaacagtgatacatgtaaccccaaatgtgatgtgagaggacgattactttgtaaataaaacttgttattgacattttaa

SEQ ID NO: 278 - DNA, 3322 bp, Homo sapiens
  source 1..3322: mol_type = genomic DNA; note = NC_000001.11:45012254-45015575 UROD [organism=Homo sapiens] [GeneID=7389] [chromosome=1]
agacagctgaccatggaagcgaatgggttggggtgagttctccagagcacgcggtgtggctagccgggcttctaatttgagtcttccaactcaggactctatccctctactcccctttccccaccctggagacctcccaacctgaactccgttagctgggatcctgaatcctaaaaccatggatttttgagatgttcatcccagggccttaattcaagggatgcctcaggatttccaaccaggatctctattctgggaccatcaactctgatccctctttatcccccagcctgggtatttctcagcccctgaaccagcccagtgacattcccgtttctgaggctcactagttcgaagacccccaaactatccttagtgggccttcattccctccccccagtccctctggttgcttcgagcttggaagagtagagactaagtggagggaagaggccccagggcgggcccttctggagtttgtgcaccacctgataggcagagaggaggcggaacgggcggaaagccagggtttgggagctggcctggaggaggtagatagcggtcctggactgaatcggccttatgaacccgcgctttccccagcctccagcgtagcatactgacacctacccccacccccacctgatcgccagacctcagggttttccggagctgaagaatgacacattcctgcgagcagcctggggagaggaaacagactacactcccgtttggtgcatgcgccaggcaggccgttacttaccaggtaagagtcagggtctggaaatctagataaaactccggagggagaaaagttttcgaggggcaggggagggctctggagggcctcaaggctgagccctgtcttccctctgtatgcagagtttagggaaacccgggctgcccaggactttttcagcacgtgtcgctctcctgaggcctgctgtgaactgactctgcaggtgaggggtccacaaaagagggaaagatttatgccttcagtctgccacctagcaacctgtctcctgtttcctacagccactgcgtcgcttccctctggatgctgccatcattttctccgacatccttgttgtaccccaggtacccactcaaacctgatcctagaatataatccaaggacgccttgaaaatccttctatcagtccagtcaaggtttacaataagcacttatcctaactggatcgagggaaaaactaaggttgaaagaaatggagtttggcagagttttattctccttttccttcctcctggaatgagctgaacagaacctttcctcctggattccattttgggaacccagatgttttctccccctccaggcactgggcatggaggtgaccatggtacctggcaaaggacccagcttcccagagccattaagagaagagcaggacctagaacgcctacgggatccagaagtggtagcctctgagctaggctatgtgttccaagccatcacccttacccgacaacgactggctggacgtgtgccgctgattggctttgctggtgccccagtaatgtgggacagggcagggactcggggcgcggggagatcactctggaaggtctggggtagacaaaaggaagggtcagtctggcttctgtgacaccatctttctatccttctctagtggaccctgatgacatacatggttgagggtggtggctcaagcaccatggctcaggccaagcgctggctctatcagagacctcaggctagtcaccagctgcttcgcatcctcactgatgctctggtcccatatctggtaggacaagtggtggctggtgcccaggtgagtcctgagagagagagaaataggctgggatttggtctgtaaggaccagaagcaagagtgtcctaaacctgagagggcaggggtcttaatgccagggatgaaagaaccttggcctccagtgatctagcggagcagccaagcccatcctgacactgacagtggggcttaatgctctaagtattcagacaccaaagttagtgctgggatctgaggaaagtaaatttttttttttttaattactgggtttttagggtcaggcagtatcagggattgaagtcatttggggaaaattgaggtggattttgtatgtgggggaaacttcctctttgtgtgttacatatttttcttcaccataccctaactaggcattgcagctgtttgagtcccatgcagggcatcttggcccacagctcttcaacaagtttgcactgccttacatccgtgatgtggccaagcaagtgaaggccaggttgcgggaggcaggcctggcaccagtgcccatggtgaggattgggatgggttgagtgaaggtggtcctgtggagctttcaggctaagtcctgcatggactggagtgaccactggagggcagcagaagtacagtcaagaaagattagtggttgtagcaaggccctctgtagcctgagatctgcttttttctagatcatctttgctaaggatgggcattttgccctggaggagctggcccaagctggctatgaggtggttgggcttgactggacagtggccccaaagaaagcccggtaagccatggaagggtgaggccttgaggttgaggtgggggtgttggctgggggagctgccatgtatgcagttaccagaacgtggcgctggctttgcttccagggagtgtgtggggaagacggtgacattgcagggcaacctggacccctgtgccttgtatgcatctgaggtaacagccagggcccctctgtgtgtctgttactgtgcactcctgtggctgtggctgtattattctgtgtgcacttgtttttaatgtctgtctgtccttttcttctactctgtacaacataagccctagaaagaccggactttttgttgctgttgttcatttgtgtttatgcttcatgcctgggtccatactagggatctgataaattttattgaatgactgaataacactgagtagaagcatgcctacatatgcgtttgtcactagtatatatagggaggacaaaggcttgctggtcctcctgtagccagtgccctgttggtcccccaggaggagatcgggcagttggtgaagcagatgctggatgactttggaccacatcgctacattgccaacctgggccatgggctttatcctgacatggacccagaacatgtgggcgcctttgtggatgctgtgcataaacactcacgtctgcttcgacagaactgagtgtatacctttaccctcaagtaccactaacacagatgattgatcgtttccaggacaataaaagtttcggagttgaa

SEQ ID NO: 279 - DNA, 28656 bp, Homo sapiens
  source 1..28656: mol_type = genomic DNA; note = NC_000019.10:c48513926-48485271 LMTK3 [organism=Homo sapiens] [GeneID=114783] [chromosome=19]
cactccccgccccccgattgcatcccctccaccctgcagcctaggccgtgcgccccctccctcccgcgatgaacctgcctcagtttctccaatgagacaccctgagggcagccccttcccctgagccccccgatgaggacggctgcgctctgcggggagtgtgcactgcccggccggtgtgcgccacggctgcgcgttttggtggaaagccctgggcccctgctgggggttggggttgggggctgggtcgcctgcgccgagtgttgctgaggctgcgtcttgggtgcgcagctccggcccagcctcacccaggggaacgcctcgcaggtgctcacggacgatggagaggtccgcgcccagggtgggagtccgcgcttccgggtgtgtctgcagctcggggcgctggagggtgggatgtgaccccgagacggcggcggcctggcacgtgatgtatgtgtgtccttgtctgatgtgtcggtgtccccgatggaccgggttccagtcccagctttgccactccccggcttgtgtgccttggggcaggtgactaccccgcgctgtgcctcagttgcctcatctgtacaatgggcatgattaaaaaatacctgtctcagagggcggttgtgaggattgagaggtaattctgtacgtgtaaaacgctgcggacgatacctggcacagactaaatactcataagaataaatacattaaataaactatgatcatgtatcttttgtatgaggcaagtgctgtggttgtgtaatgtctgcgtaaccgcacgggaaacgtgggtatttgcgacccgtgtgtctgtgcgcgtgtctgtgtctgtgttgtgggtgtgtgactctttgtatgtgttatgtgtgccagtgtgtgtttatgtatgtgatgtgtgactgtggtggggttctgtgtctttgtaaccttgtgtgaaaggtgtgtgtatttgtgatgtgtgtgtccatgtctgtttaggtatgtgatgtgtgcaactctgtgtgtctgtgtatttgatctgtgtgcctatgtctgtgcttatgtatgtgtgactgtgtatatgtgcatgttatatgtgtctgtatgtatcagtgtgtggtgtatttatgtgtatttttgcatgtgatttatgtagccctgtatgtatgagttgtgtgtgcccgcatgcatgtgtatgtagtgtgtctgtgtgtatccatgtgagtgaagcttgtgtccgtgtgagtgatgcatgttacgtgtccgtatacatgcatgtattatgtttctgtgtactcatgtatgtgatgtgcctgtctctgtgtagctgctgtgtccgtgtctatgttagttcatgtgatgtgtgtgtctgcgtgtgtctgtgcaattgctgtctgtgcatgtctgtgtgacgtgcatgtatgtgatacttgtgtctgtgggtattctttgttgcccatttgtctagggactgtctgcgtggctgtgactatgagtgtcagcatgtcacagtggtgtccgtggggatctttgtctgtggcgtgtgcgtctgtggatctggggctttactttgtccggggcatgtgtgggtctttgtgatgctttgacgttcctgcgtggccgggtgcatctgtgctggaagctggcctgcctgtgcgtttccagtgcggtccctgcgtctttgtgtgtgacgtgtacgtgtccccgtctgctgatggctgtccacctttgtatgtgatgcgcttgtctatgagggtccctgcgacgtgtgtcagctgtgtgtgggctgcgcgtgcctgacatctgcatcttagcgtgtagcacatgtgtccatgctggtggcatgtcacagcggtgtccgggccaggcacccgtgggccctgcccccccacccccgctgcaagtgtgtgccggtccctgtctgtccctccccctcccatttcctcccctccctcctggcagccaatgctacgggggagccagttgccatgacgacgctccatcctccctcctcccacccttcctgtgacaggctctctgctcccccaatcctggctgccctcgggggcggggccctctttctcgccccccccatcctaccctctcccccccaccccagcaaccccggctccccagcatctctcctctgtccgcctctccatcccttcatccgtctgtcccttcaaagagggggaggggggtacctgagccagcaagcagcccctccctccccctgtcctgcgtctcctgcccctctcctgggccgggaggaggccagggtcgcgcgggtccccatggctgggggctgagggcccgcccccccctcctccccagccgccaccacctccacctccctgccatcctcgacaagatgcctgcccccggcgccctcatcctccttgcggccgtctccgcctccggctgcctggcgtccccggcccaccccggtgagtctgtcgggccatcagtctgtccggtggcccccacccccgcggcggcctcgctgtctgcccaggggtctgtctgcgggtcctgccccgtcacctggtgcgcgtcttcccgcagcccagcagggcccggagcggcggggacggtgcctctgtcagcagggcctgtgggagggaggctgggggctgggtggggagggggctccgtttgggcaacatgtgtgtatgcgtgcacgcatgtgtttgtgctggtgtgtgcaggaagaaggggaaggacagggcctctgggagaattgggggcagaggacaggaatactatttctaagggggacacaacacgggaggctgtctctggcttctggagagacccagggcttgcggagttcccttctctgggtcttgggctggggatagagaacatcggtgtgcgccaagcgtccctaaaagagacagatctcaaccccacaaactggggggttccagcatggggcaagaatcttctcccagcctgcagctgagagctagtcctcctccccaacgaggggtaatgaggctgtccacgggagcgtattttaaattctgcaagctccagacttcactatcactcctctttccttcaaccctcattggaattcatccaagcctggggtgaggggatggggtgggatgaggtggcgggggtcccagtttgggacgagaagagagaccccacccccaatccaaccacttgggaaggccccaaactacaactcccacaatgccttgggccactctgcacctctgccaagggaccctggtcgcagagcatcacgggagttgtagtccaagacgtgccgggacgggagggggcatgattccggtatccagggacttgaagctgggaccccagcccagccctgtgcccacagatggattcgccctgggccgggctcctctggctcctccctacgctgtggtcctcatttcctgctccggcctgctggccttcatcttcctcctcctcacctgtctgtgctgcaaacggggcgatgtcggcttcaaggtgaggtgcatgaggggattcaacttggggaggaagactccagcaaggcctttaccccctacacaggtggttggtggggagaagggggcagtaaatccgagagcaccttccagcttgaagctatggcaagatctggagccttgggatggggaaatgggggatggaaattgggctgggactgggagacagttacaaaaatgaaggggagacaaacttaagagaaagacgatggcgtgtctctcagccctgcgttctcccacccctcttctcctctcctggccccaggaatttgagaaccctgaaggggaggactgctccggggagtacactccccctgcggaggagacctcctcctcacagtcgctgcctgatgtctacattctcccgctggctgaggtctccctgccaatgcctgccccgcagccttcacactcaggtactgccccacgccatgaccagcatcccatggtgtcccgggaaaggccagaagatgttgagtgtgttccttcaggggctggggcggttgagaccagcggcagccaatgggaaaggcataggtgggagcgctggaatcttggaagcagcctatggggaggcagacaaagatcatcttggtggaagccattgcttaatccaaaaccagatttggggatttttaaggggcaagcggtggtgagattaccatagagcacagtctcagaggcagccaatgggaggctgaaatcacatcataggagcttgggatgccaaaaggaaggactgattggatgctggagccttgtgagcagccaatgaggaagctgagattctgacatggaatgtgggtggcagccaatgaaaagagagtgatgtctgctctgtctcagtccccactgacctggggtgtgttggtagcactcaggaagggggagagactcaggggctttcccctcttgccctccccagacatgaccacccccctgggccttagccggcagcacctgagctacctgcaggagattgggagtggctggtttgggaaggtgagtgggctggggaggggaggcagggctccatggatcccgagctgtcctcctgttctgtgtccacacccctgctctcaccacttctcatctgtccctcgcctcctccccatgccccctcagcctcccatcccccctccgtccacctctcaccggctcccacccgccccatccccgacatctgtcagtcagcgcctccctcctcactccattgaccactccgccgcgccacccggctctccacgcgtccgtccgtctgtccatccttccatccgtccctgcgtccatcggattctgggcccgtgagtgtctcaccccatgtctggtgggggtcaagggtggtgggatgtggagggagaagctgggaaggagccgggggttgggagctgtgtggtggagtggagctggtcccaggggacggggctggggaaacggcactcgctgactcctgggtgccccttgaccaggtgatcctgggagagattttctccgactacacccccgcccaggtggtggtgaaggagctccgagccagcgcggggcccctggagcaacgcaagttcatctcggaagcacagccgtacaggtactgagggtttctcagtgggtgtgtgccttgttgaggtgacattcaggagtggaaggagtgctgtatggggtcacacctggaatctacctcttccggttgtgcagctctggcaggagaacttccctccctgaacctcaggttcttcctctggaccgagctaagggtgggaagtgagaggcaggatggtggaggaggcgggagcacagaagctgagctagaggcctgctcctctcccctctgaacctccggatcttcatctggaaagtgagtccaggaagccctagtgtcctcatgaagagggcagctgagaggatgtgagattcccatgtccaatgttgggtaccagctggtacttcccttccccaggccacagactaggtccctgagcaggtgcccgagcaggccactgtggagctccatccctgcccttcttggtctctactccactctcagtgcttctaggatggggtctaggtatccatttgccagataaattccttgtgaggtagtgagttccctgttttggaaagggtgtgttcgcagagaccccttatcagaacagttgtaaaggtgggctttaccctgagaaacacattgggttttggcactccctcactccaaaacctcccatggctccctactgcctacaggacacatctggtcctcctgacagcccacaggccctgcgcagtctgacactgtcccttccttccaatgtccccctcaccccagccacgctggcctcttcactgaccctccccacggaagccaattccctgccgcagcgcatcggaccttgctatatcctctctagaatatcactccttgctcatccccaggtgtggatggggccccttcccttcctcaggcctcagctcagagacatcttcccttactcctcccctccttccaaagagggtcctggggtgcttcaccccgtcatggcatgtgttttcttcataacccataccccaggttgtcactatatcatttgcttacttgcttattgcctgtctctccctaaacctgtgccagcaaacactggccacatatgcctattacatttaagctaagatgggcacggtggtatactcgtgtagtcccggcactttgggaggccaaggtgggaggatcacttgaggccagaaattggaggatggagtgagctatgactgcaccactgcactcccacctgggcaacagagcgagaccctgtctctattatataaataaataaataaaatgtaagctaattaaaatgcaatcaaattaaaaacacatttcctcagccaccctcatcatatctcaagtgctcaatagccacctgtggccagtggctcccctggtaggcagggctggtccagaagattcccaccttcgcaaagctctgttggacagtgcaggtctctactagcagcagctcagggtctgtctcgttacccgagcacaagtgctgctggctctcagtagacgtttgctgggcgagccacagacctgagatcaaatcccaatgttcccatcattaccagctgtgtgaccctaggcaagtcgcttcacctctgttccatctggatcaaatggggatcatcatcctgcctagcacgttgctgggaggatttgagagcagagcggccggccttggccagattcgtgggtgtgcagtgaatcctggcttccttctacaccagccaccccaagtctcccatgctgggaactccagccactgttgaagccccacacatggcaggagcttcatgaacactttgtcgggctcctgcctgtaatcctagcactttgggaggccaaggcgggcagactgcctgagctcaggacttggagaccagcctgggctaaaccctatctctacaaaaatacaaaaaaattggccaggcacggtggctcacaccagtaatcccagcactttgggagactgaggtgggcagatcatgaggtcaggagttcgagaccagcctggccaacatggtgaaaccccatctctactaaaaatgcaaacattagccaggtgtggtgggcaggcgcctgtaatcccagctactcaggaggctgaggcaggagaattgtttgaaccccagaggcagaggttgcagtgagccaagatcacaccactgtactccagcctgggagacagcgtgagaaaacaacaacaataacaacactttgttacacgattcttccaccaaacagaagcaagagaccctgttctcctgaggacacacagcataaacagcagagccgcggttacacacaggcaatagaaggctgggtactggcagtggccccacagcacacaagtggctctgcctcccgccaggccccagtaggaaaataactagtaagttactgtgcacctactcctggccagaccctgggctgcaagcctgaaatgttctcatcctcctgcagacctccaagccagtccttctctccacctgtgtttattgagcatctactactagtctaggcactgaggacacaggcaggaagacacaccaaattcttatcctaggagagctcaccccctagtggagaagacacacaatagataaataaatactttttttttttttttcaaggctcacttcagccttgagctcctgggctcaagtgatcctcctgcctcagcctcctgcatagccaccatgcctggctaacttttatttttatttatttatctttttttttttttcagatgaagtcttgctctgttgtcaggctggagtgcagtggcgcaatctcaactctctgcaacctctgcctcctgggttcaagcgattctcctgcctcagcctccagagtagctgcgattacaggcgcccaccaccacatctggctaatttttggtatttttagtagagacggggtttcaccatgttggccaggctggtctcgaactcctgacctcaggtgattcacccaccttggcctcccaaagtattcggattacagacttttttttttttttttttagacagagtttcaatcttgttgcccaggctggagtgcaatggcggggcctcagctcactgcaatctccgcctcccgggtgcaagcaattctcctgcctcagcctcccaagtagctgggattacaggcatgtgccaccaagcccagcttattttgtatttttagtaaagacagggtttcactatgttggccaggctggtctcgaactcctgacatcaggtgatccacccatctcggcctcccaaagtgcagggattacaggcatgagccactgcacccagactatatattttttttaattgtagagatggagtttcactatgctgctccagctggtctcaaacttctaggttcaagccatcctcctgcctcggcctcccagagtgctgagatttcaggtgagagccaccagaccaagccagaaatgcattttaaaaagagaaactgtcagctgggcgtggtggctcacacctgtaatctcagtactttgagaggcccaggcaggcggattacctgaggtcaggagttcaaggccagcctggccaacatggtgaaatcccgtctctaataaaaatataaaaattagccaggcatggtggcacatgcctgtaatcccagctactcaggaggatgaggcaggagaattgctggagcccgggagatggaggttgcagtgagccaagattgcaccactgcactccagcctgggcgacagagcaagactctgtctcataaaaaaaaaaaaaaaaaaaaaaaaaagagagagagagagagagagagaaactgtcagagaatgacaaataccatgagaaaatgaggcagtatgtgacagagacaggggccaccttggataggaccatcagggaggccgggttgacttggagaagtcagccatgcaaagcaccatgggaagtacattccaggcagaaggaacagcaggtacaaaggatgtaggacaggaagaagctcatggagagtgagcagccctggaaatacatttagaatgcagggtgaagcctgggcacggtggctcatgcctgtaatcccagcacttcgggaggccgaagtgggtggatcacttgaggtcaggagttcaagagcagcctggccaacatggtgaaacccattatctactaaaaatacaaaaattagccgagtgtggtagtgtgtacctataatcccaactactcggagttgaggcaggagaatcacttgaacccgggaggtggaggttgcagtgagccgagattgcaccactgtactccagactgggcgaaagagcaagactctgtcttaaaaaaaagaatgcagggtgaaaataaaatcaaataatatgttgccattaaaacagcagtaattgctaggatctcagcacataccagcttctctcagatctcatgtaattcctcagaggaagttgttatcgctgtcccatttttacagatgaggaaaactgaggcagggagcagcgaagtggcttgcctgagatgacacacctaggaaagtgggagtcagggttcaaacccccgagtctgactctttcccacagcgtgagggtaaaggggagggtatccaacctggcattgggggggcagcaaagcttcccggggagatgatgttgaggcagaggcccggaggggccaagagaactctgatgagaggagggcgttctgcagagagagaaccgtaggtgcaggcagggtgcggtggttcacgcctgtaatcccagcactttgggaggctgaggcgggcgtatcaccggaggtctggagtttgagaccagcctggccaacatggtgaaaccctgtctctactaaaaatacaaaaattagccaggcttggtgtcgggcatctgtaatcccagctactcgggaggctgaggcaggagaatcgcttgaacccgggaggtggaggttgcagtgagctgagatcactccattgcactccagcctgagtgataagaatgaaactccctctcaaagaggaaggaagggagggagggagggaggaaggaaggaaggaagggagggaggaagcaaggaaggaaaaaaaagagagagagagagagagagaaaactgtaggtgcaaaggcccgggcctaagcaagggcctgcaggtttgggaaaacccacatgggataaagctgactcttgggccagccggaggagcaggaggaatcaaagagccggcgctctatcctggggtgctggggatcgacagagggctgtgtgtggtgaaaagcaggtgaggcaaagggaaggggagagactagagccagggaggctgggaggaggctgtggggacgaggaggagaagactgagaagagtctggggcaggaatgaaggtggaggtgaggtgtaaggaggaaggagaggtaaaggggtccctggggacctgctcccccaggagcaggccagtgagggccatccagagatggggacctggggaaggagtggggtgtggtcgaggagagagactccgaggtgaggaaactgagatcaaaaaggtagagtgggccgggtgcggtggttcacgcctgtaatcccagcactttgggagcctgaggagggtggatcacttgaggtcaggagttcgagaccagcctggccaacatggtgaaaccccatctttactaaaaatacaaaaattagccaggcgtggtggcgcatgcctgtaatcctggctactcaggaggctgaggcaggactcccgcctgggcgacagagcgagactccgtctcaaaacaaacaaacaaacaaaaacaacaaaaaagggtggaggcagcagtttggttctgctgggggttggggcaggatgaagaggaaggggctgccttcccaactcagccacctcctcactccacaggagcctgcagcaccccaatgtcctccagtgcctgggtctgtgcgtggagacgctgccgtttctgctgattatggagttctgtcaactggtgagggtcttggggggttggggaagggcagagggggcagctggacaaggccggggccaagcctggtgcccctgggcttcgtcgtcatcatcatcatcatcgtagatgatgtgtggcatgcgctaacatttcatgagtgctgcctgtcctgggggctggcctgaacaagcaggcaagatgggctgtgttattacctgctgcaagcagcagaggaaactaaggctcagaggggctacccagtgacagcagaagccattccagcctccgggccgactagctggagacctgagcggctggtggtgctgaccttctttgcctccctcccagggggacctgaagcgttacctccgagcccagcggccccccgagggcctgtcccctgagctaccccctcgagacctgcggacgctgcagaggatgggcctggagatcgcccgcgggctggcgcacctgcattcccacaactacgtgcacaggtgggcgggccggggagccgcgggaggagctactaaggggaagggggaaggaggtgaggcctcaggggaggggctagagggggggcggacccatgactggctgacacaaaatagggacgaaccgaggagggtatggaggagaaggggccaggagaggaggcgggaccaggaggggaatgagaggaaccaagtgagagggaggcggggtcaggtgatgaggggaagggccaggagaggaaaaggggtcaggagaggaggaggaggaaccaggggagggggaggggtcaggggaggaggaggaagaaccaggataaggggaggagccaggagagggggaggaggagccaggagagggggaggaggagccaggggaggggaggggccaggagagaaggaggaggagccaggataggggagggtccaggagagaaggaggagccaggagagggaagaggagccaggggaggggggcaggggagggggaggagtcaggagaggaggagggtccaggagaggaacggaaggagccaggtgagggggaagcagggtcacgtgatgaggagaggtggctgggagaggagggggaggagtcaacagagaagcaggagaagccagaagggtcagatgaataagaggaggagccagtgcagaggaaaaggagaggagacttggaggaaccaggggtggggagaagacaagacagcaggggagagtgaaagcagtcagaggggagagacagatcagagggaaggggcagagtcagtgtggcggggcagggtcatgggaggggtggagtcagtgtgaaagggcggggtcagggcgtggctggagggctgcccctgcgctcacctcctcgcgttcttcccgcagcgacctggccctgcgcaactgcctgctgacctctgacctgaccgtgcgcatcggagactacgggctggcccacagcaactacaaggtagggcttccttccgtcgggatgggggctgtggggtgccctgacccgcctgacaccgccctggttccctcaggaggactactacctgaccccagagcgcctgtggatcccactgcgctgggcggcgcccgagctcctcggggagctccacgggaccttcatggtggtggaccagagccgcgagagcaacatctggtgaggaccacgggccgcgggggccgaggcaggccaggaaggtggaagggttactagatgccaccggttctacagatggggaaaatgaggcccgggtgggtcagggctgggctctgacctctctctgctctctgcaggtccctgggggtgaccctgtgggagctgtttgagtttggggcccagccctaccgccacctgtcagacgaggaggtcctcgccttcgtggtccgccagcagcatgtgaagctggcccggccgaggctcaagctgccttacgcggactactggtgagggctagcccacccggggctcctggcctgccgcaccccacccaggatggtcccagcatcccccctcgtttcccacatcacccacatcccgtttgccctccatacccctcaagagtgaagaggggctgtccccaccctttctgccagcatctgctacttgcagggggacacaggcaggggatggcagagctgtgatttgaacccacttcaccctaagaggtccctgcttcttacctgtctgattccagagctcacagcgcaaacagggacaccactaccctcaccagccgttcccatctgctgctgtgtcccctctgcctccaggtcccgtcagcctctctctatgggcatcttccccccacccctgcttctttgggtctcaatacccagctccccagcccagttacctcctctgaatctctaccgtctgctgtcccctcttctccctggatctctgccccactttttgggtctatgtttccctctctctctaggtctctgtccccctctctctgggtctctgtccctctctctctgggtctctgtccctctctctctttctttttttttggcagatttttgcttttgttgcccaggctggagtgcgatggcacgatcttggctcactgcaacctccgcctcccgggttcaagcggttctcctgcctcagcctcccaggtagctgggattacaggcaggtgccaccacgctaggctaattttttgtatttttagtagaaacggggtttcaccatgttagccaggctggtcttgaactcctgacctcaggtgatccaccggcctcagcctcccaaagtgctgggattacaggcgtgagccaccacgcctggatctctgtccctctctctctgggtctctgtccctctgtctctggatctctgtccctctgtctctgggtctctgtccccctctctctgggtctctgtccccctctctctgggtctctgttaccctctgggtctctgtccccctctctctggttgtctgtcccctccctgggtctctttcccctccctgggtctctgccctgctcactctgccccacctctccccaggtatgacattcttcagtcctgctggcggccacctgcccagcgcccttcagcctctgatctccaattgcagctcacctacttgctctccgagcggcctccccggcccccaccgccgccacccccaccccgagacggtcccttcccctggccctggccccctgcacacagtgcgccccgcccggggaccctctcctcaccgttccccctactggatggcttccctggagccgaccccgacgatgtgctcacggtcaccgagagtagccgcggcctcaacctcgagtgcctgtgggagaaggcccggcgtggggccggccggggtgggggggcacctgcctggcagccggcgtcggcccccccggccccccacgccaacccctccaaccctttctacgaggcgctgtccacgcccagcgtgctgcctgtcatcagcgcccgcagcccctccgtgagcagcgagtactacatccgcttggaggagcacggctcccctcctgagcccctcttccccaacgactgggaccccctggacccaggagtgcccgcccctcaggccccccaggccccctccgaggtcccccagctggtgtccgagacctgggcctcccccctcttccctgcgccccggcccttcccagcccagtcctcagcgtcaggcagcttcctgctgagcggctgggaccccgagggccggggcgccggggagaccctggcgggagaccctgccgaggtcttgggggagcgggggaccgccccgtgggtggaagaagaagaggaggaggaggagggcagctccccaggggaagacagcagcagccttggaggtggcccaagccgccggggtcccctaccctgtcccctgtgcagccgcgagggggcctgctcctgcctgccactggagcggggggacgccgtagcaggctggggaggccaccctgctcttggctgcccccacccccccgaggacgactcctcgctgcgggcagagcggggctccctggccgacttgcccatggccccccccgcctcggccccccccgagtttctggaccccctcatgggggcggcggcgccccagtaccccgggcgggggccacctcccgctcccccccccccgccgccacctcctcgggcccccgcggacccggccgcgtcccccgaccccccttcggccgtggccagtcccggttcaggcctctcgtcgccgggccccaagccgggggacagcggctacgagaccgagacccctttttccccagagggagccttcccaggtgggggggcggccgaggaggaaggggtccctcggccgcgggctccccccgagccacccgacccaggagcgccccggccacctccagacccgggtccgctcccactcccggggccccgggagaagccgaccttcgtggttcaagtgagcacggaacagctgctgatgtccctgcgggaggatgtgacaaggaacctcctgggggagaagggggcgacagcccgggagacaggacccaggaaggcggggagaggccccgggaacagagagaaagtcccgggcctgaacagggacccgacagtcctgggcaacgggaaacaagccccaagcctgagcctcccagtgaacggggtgacagtgctggagaacggggaccagagagccccaggcatcgaggagaaggcggcggagaatggggccctggggtcccccgagagagaagagaaagtgctggagaatggggagctgacacccccaaggagggaggagaaagcgctggagaatggggagctgaggtccccagaggccggggagaaggtgctggtgaatgggggcctgacacccccaaagagcgaggacaaggtgtcagagaatgggggcctgagattccccaggaacacggagaggccaccagagactgggccttggagagccccagggccctgggagaagacgcccgagagttggggtccagcccccacgatcggggagccagccccagagacctctctggagagagcccctgcacccagcgcagtggtctcctcccggaacggcggggagacagcccctggcccccttggcccagcccccaagaacgggacgctggaacccgggaccgagaggagagcccccgagactgggggggcgccgagagccccaggggctgggaggctggacctcgggagtgggggccgagccccagtgggcacggggacggcccccggcggcggccccggaagcggcgtggacgcaaaggccggatgggtagacaacacgaggccgcagccaccgccgccaccgctgccaccgccaccggaggcacagccgaggaggctggagccagcgcccccgagagccaggccggaggtggcccccgagggagagcccggggccccagacagcagggccggcggagacacggcactcagcggagacggggacccccccaagcccgagaggaagggccccgagatgccacgactattcttggacttgggaccccctcaggggaacagcgagcagatcaaaggtgaggaggctgcggggcacagtcagggctgaggtccggctgtttccgaggcgtgcggagggtgagtgtgggtaaacatgtcgggtcgggctggcagtgatgaatgcaggtcctgaagcctgcaccacctgggctcacatcgtggctcagccccctctctagctctttggccttgggcaaatgtccttgctgcacggtgcctcagtttacccatctgccaaaaacggatggcagggatagaacctacgtcatagggttgctgtgaaggttaaatgaattaggacatccaaggcacttaatcagagcaagggattcagtaagcacctgcttttattattgcaactcacttagaccaggggtctcaaactcatgcccacaggggccagacgacatagggaaacggatgaagcatgctagggaggcagagtggggcttcagaagaaaatgccctgtgtagaaggggcagccacttctcaggaatgtgcacctggtgttggcgaatctgctacttttcccttttaaactagagctctggtttttatttcttttgtttttatggttgcagccagttcaaaggaagcctgtctgtggatggctcaagggccccaggctgccagcgtgtgctgatttaaacttaataagctggctgggctctgtggctcatgcctgtgatcccagcactttgggaggctgaggcaggaggatcacttgaggtcaggagtttgagaccagcctggccaacatggcgaaaccccatctctactaaaaatacaaaagttagccaggcatgggccgggcatggtgggtggctcatgcctgtaatcccagcactttgggaggccgaggtgggcggatcacctgaggtcaggagttcaagaccagcctggacaacatggcaaaaccctgtctctattaaaaatacaaaaattagccaggctttatggtaggcgcctataatcccagctactcggaaggctgaggcaggagaatcgtttgaagccaggaggcggagtttgcaccgagccgagattgtgccactgcactccagcctgggcgataaagcgagactctgtctcagaaaaaaaaaaaaagaaaagaaaaagaaaaaaagaaaaaattagccagcgtggtggcatgcacctgtagtcctagctacttgggaggctgaggcacaagaatcacttgatcctgtgagtcagagattgcagtgagccgagatcacgtcactgcactccagcctgggtgacagagcaagactctgtctcaaacaaaacaaaacaaaacaaaacaaacagaaacaaacaaacaacaactttccagtaagctaaggcatctatccagtgtgccaggcctcctgtgttcgaggccctgagctgcccaaggctgggacccagggagcttcagatcttgccctgacaactccaccaccataggactagtgagctggaaggcacagatatgcctttctgaaaattaagttttggtaggaatgcaggaagtattttgccacagagaaaactctttaagataaatgaagggtaaaaataaatagcccttgtttagatgtggacataggaaatacagttccagcagaatctctgggaggcgcaacttctttaaatacgggtatgaaagttataagtggctgggtcctgttttatattggcaacctcacagccacacttgaggaaacagttatcatctccatagaggagcctgtggctcagtgggcaagggtcaggaagtgggctggacagaggacgtttcttcctcatagcctgtggtgttcgaacactgtcacttccttgagattgttgtagggagtttgtgaacagctgtatcaggaaacagcccaggctgcatgaaaatgttgggagatgagcagctaagatgcgtcagaggatctgggttggattaggattggggggtgaaaagaggcagagaatggcccgctttttcccaagtgaactactcatccttcaagaccccaaatttcccctttccaggaagccttccctaatttttaaaggttgtcaacctgaccttcatctgggtactcataactccagaaaaaccccctctaggctgggtgcggtggctcacacctgtaatcccagcactttgggaggccgaggtgggaggatcgcctgaggtcaggagttcgagaccagcctggccaacatggtgaaaccctgtctctactaaaaatacaaaaattagctgagcgtgggggcaggcacctgtaatcccagctactcgggaggctgaggcaggagaatcgcttgaactcaggaggcggaggttgcaatgcgccgagatcgtaccactgcactccagcctgggcgacgagagcaagacttcatttcaaaaaaaaaaacaaaaaaaacactccctctatgaagcatcgcccataaccccatcaccctgagatgtctggtcaacaaaagtgtgacttttgagcagatgtgaaggaaaggagggagtgaggcaggtggacatcggtgggagagtgttctagagagggcactgagatgtgcactggctcaccatgtttagagaatagcaaaaggtagtaaaacttgagtagagagaacgaggacctgagagggaccgtctgcattcatctttctccctgccccacctccaccctcctcttgcccctgccatcagctcagaaagggcagttcacttatgcagtaatggagggctaagtgacccttgttcatttgccagtgaggaaacagaggctcagagaggtggatctggccgggtgtggtggctcatgcctgtaatcccagcactttgggaggccaaagagggcagatcataaggtcaggagttcaagaccagcctggccagcatggtgaaaccccgtctctactaaaaatacaaaaaattagccgggcatggtggcacgtgcgcctgtagtcccagctattcggtgggaggaatggtggggtggcccatgtggctagatggaggtcaggccagaggaggtggggacagaggccagagaaatcaggtaggccagggcatgagggcctggtgggctgtgggaagttgcggcttaaagccgttggcactggggagctctggggaggttgagcactggagaggacctttcccaccctgcctggagaagccctggtgcagcccttccgttcacaaagtgggtgctgaggcccagattgtgcgggggtcttatctgaggccacacagctaggtgggagggcctgcctcagtttcaccgggacaggggctcaccaggtctctcccctcgcagccaggctctcccggctctcgctggcgctgccgccgctcacgctcacgccattcccggggccgggcccgcggcggcccccgtgggagggcgcggacgccggggcggctggcggggaggccggcggggcgggagcgccggggccggcggaggaggacggggaggacgaggacgaggacgaggaggaggacgaggaggcggcggcgccgggcgcggcggcggggccgcggggccccgggagggcgcgagcagccccggtgcccgtcgtggtgagcagcgccgacgcggacgcggcccgcccgctgcgggggctgctcaagtctccgcgcggggccgacgagccagaggacagcgagctggagaggaagcgcaagatggtctccttccacggggacgtgaccgtctacctcttcgaccaggtgcggaacccgagagggcgcggtttcggggtcgcggcctggagggagcaggagcctagagccgggaagggcctggcgggaggccgagcttagagttgggcggggcctggagggaggcggagctggagtggggcggggcctgaagggaggccgagctagggtggggcggggcctggagggaggccgagttagagtggggcgtggcctgaagggaggccgagctggagtgatgcggggcctggagggagggcaagctgaattggggtgggacctaaggggagccccaatctagagtggggcggggcctggggcggggccgagctagagtggggcggggcccagggagagggcgggctggggggcggagcccagggcggggcctggagggaggtcgagcctagaggtgcagggcctggggcggggcctagacgaaggctgagcttagggtggggcggggtctacagcagggtttgaaggcaggctgagcctagagcgggggcggggcctggaaggagaccgcgcctaggatcgggacagagtctggatccgggcctgagggaggccaagtctgtggcgcggcaagaggaggcctggagaaaatccaaggctggaatgggggcggagcctagggcggggcggatggagcagggcgcgggaagggcctgaggggtgaaggcggggtctggggagagactggtcagggaaatggggcgggactaggaagatgggaggaggctttgagtgtgagggcagggcctggcaatggggcagggccaggagtatgggccgagcctagagctggggcgggacctagggtgagggcagggcttgtgacgggggcgtggtctagagggcgaggagaggtctggagagagagtgtgggtctggaaggaaagagggggtactgggtagtcaagtatgggatcctggagaggctagggaggaagtgttgagaagaggcctggatggtgaaggggcctagtgagagtttgggcatggtttgttgactagagttctagtgtctgtaggctggttcgggttggagcagatcttacccactagggaagggccatggctaggctgcaggtgggcttcagagatggagcaggcagtcttaacgtattctggggtgaggtcagggatgagcgaacctaacgactgggacgggtctttagagagatgggttgaggaatgtgttaagagttaggcctgtcccgggtggctcacgcctgtaatcccagcactttgggaggccgaggcgggaggatcacttgaggtcaagagttcgagaccagcctagccaaaatggcgagacctcgtctcttaaaaagaaaaaaattatcttggtgtggtggtgcgcatctgtagtcccagctacttaggaggctcaggtgggaggatcgcttgagcccaggaggttgaggctgcattgagccatgatcacaacactgctctccagcctgggcgacagtgagactctgtctaaaacaaaaagaaaaacacaggatatggtgttgaagagaaaaagggagggcgagtggtgctgaggaactgggaccttgtctagatgaacctggggcgggcatactgggctgagattatgaaaggaatggaaacaaggccaagaactggggcctgggccactgaaatgttttcagaggggtgggacttggagggcgggagcaggtctacttctgagggagggctcaggggcagggtcacagcatccagcacggcatgcgctcaggatggggcaggggttgggagggccactggagcaggtcaagatctcagaggtgggtgggactgacgtggacggggtggggcttatggagatcgctttgggttaggggatccggtggaggcctcacgttaatgagccaggagagaatccctgcgttgggctacttagctgtgcgcggggctccgctgtcaggaaaggagcctctggccaggttgaggttaaggctggcccaaggcttcgaagccagattaggggctccagccacctctccagagcgtgcgagtcagtgattacaaattgggattcctagagccccagaaatattagccggttttgttgcttttgggggatgcggtaaatgggacgtgaaggtttgtcccctctggcttccccctaatctgccttcacaggagacgccaaccaacgagctgagcgtccaggccccccccgagggggacacggacccgtcaacgcctccagcgcccccgacacctccccaccccgccacccccggagatgggtttcccagcaacgacagcggctttggtgaggacgggccctatggggcgggagggggcgggagccatggggcggacggggcggggtctatggggtgggaggggcttggtcgggaggggcgggaccagagggcgggagtgccgcaggtgtctgcagcctgaccgcggtctttccttctgccgcaggaggcagtttcgagtgggcggaggatttccccctcctcccccctccaggccccccgctgtgcttctcccgcttctccgtctcgcctgcgctggagaccccggggccacccgcccgggcccccgacgcccggcccgcaggtaccatatcctcggccctgccccctcctctgcccatctctgtccccctatgttccactgccaacttcttgtgaccatctttcaatgtccctgcctctctcttcccagtctcttctctctcccctctcagtcaacagacaccccacccagctctggaaccagctcagaccaggcgacgtccatcagacggtcgtaggcaggcaggccggccgtccccaacccccgagcctcagttttaccttctgtggggattacccccacccccgactcttgcccatctttgtcccatctctgggctcagactccggcctggcacttgccggatcctgatcccacctccgtttggggaacacggtgctcaggggcagacaaggagagagaaacccagagtgctcaaagccggttggtgtgaaccagagcagggaggacacagctgggggttagagagcagtcacagcggcaccgctgctctcgcgtggaccctgcagtgcctcaccacagtttaacccatttaatgttcattgcgatcccatggggtggattctagcctcgtcctcatttttttttttttttttttttttttgagacggagtctcgctctgtcgcccaggctggagggagtggtggaatctacgctcagtgcaacctctgcctcctgggttcaaacgattctcgtgtctcagccgcccaagtagctgggttcacaggagtgcaccaccacgcccagctactttttttgtatttttactacagacagggtttcaccatgttggccaggctggtctccaactcctgacctggaatgatccacccacctcggcctcccaaagtgctgggattacaggcgtgagccaccgggcctggccagtctggtcccaattttacaaaagagaacactgaggcacggagagaagtgaggagctgggattcaaacccacagttgcgcggcctctgagtctgtgccctctccagtagtgaacattggtcaggtttctttcctggcgtttcacatgcgccatatcgctaatcctcgtggccaccttgggagaggggtcatgccgcccctagtttccaacttttagcgatgctaaggccactctgggagagcagggcacacgggcaggtcccagcgcaggactggaacgggactgggctctctgctgccctctgctgccgagccagggaacacccccaggacccagggcttgtgcccagctcggcaggacaggtggtgctccccggtatcagagctaaggtagaagacgccactggagggtttcactcctacttccccaatcttgcctgagtccagatattgtccctgccatttcttagctgtgtgacctggggcaagtcgctttccctctctgtgcttcagttccctcatctgtagagtgggaatgataacaggatctaactcatgagattgctgagggaattaaatggcttaatcctcccgagtatgcagcacagcgcctgtgcagcagcagtctctaaccattagctattattattatttagttagttagtatttttgagacggagttttgctcgtcgcccaagccgaagtgcaatggtgtgatctcggctcattgcaacctccacctcccgggttcaagcgattctcctgcctcagcctcctgagtagctggaattacaggcacccaccaccacacctggctaacttttgtatttttagtagagacggggtttcaccatgttggacaggctggtcttgaactccagacctcaggcgatctgcccgccttggcctcccagctgggattacaggcatgagccaccatgcccggccccattagctattattattattattagctattactgcacttaattaagtcaatgttttctgatcatcttctgcgtgcaggcgccatgctgggcacaggggattcaatgtggagcaagacgggtgagcctgcctggccctccccgcagacactgaccacacactgctatgacaaatgaagaactgcaaactcaggcttgcagagaaagcagatgacaagaggaaagggctttgttttccccttagaagtgtcatttaaggccaggcacagtggcttacgcctgtaagcccagcactttgggaggccaaggcaggcagatcacctgaggtcaggagttcaagaccagcctgaccaacatggagaaaccctgtctctactaaaagtacaaaattagttgggtatggtggcgcatgcctgtaatcccagctacttgggagggtgaggcaggagaatcgcttaaacctgggaggtggaggttgcggtgagccgagatcaagccattgcactccagcctgggcaacaagagcaaaactccatctcaaaaaaaaaaaaaaaaaagtgtaatttaactgggaactggaagggttggttgtcattaactaggtgaaggggaaggggatggcgtgctggcagaggggacagcttgcacacagggcctgaggcaggagagagcttggcccgctcaaggaacagaaggacactggtgtggcttcagggttacttagagtgcatggagggctgaggagagatggcagggggtgcactgaggagctgggactttgtcctgggggtgccagggagccacggacgactataagcaagggagggaagtcaatgttgggtgtaggaagactgctctggggtctcttgggggcagaagggcaagagtgggagctgggaggctggggaaaggctgaggagaggatagtgagccagggctgtgggaatggagaggttggacagggcagagagtcaagggcaggtgggacaggtctgggggctgactcttccttcacttggctgcatcctcaggcttcactctgaatgtcactttctcccttaggccatcatcgcagggcctctgtgaggacagggtgggggtgcattccagggtatggggacactgccaagtggtgagtcagggctgagctggcagggctggcaagcgagaatggcttcacctttaatcaccaggagaggagacggagggtgcaattgtgccaaaccccaaatcctttcgctcagttgacaaatattcctgcggcagcgtgggctgcgagctgctgagcctgtctggctcccaagaccatggtgtgggggcctgaggcgggtcctctcctctgccctgctcaatgtggctctgtccacttagcaaacatttactgggtaccaagagatgccacataccccaaagtctccatgaagcatgaaggtcatgcttcccattaaaagagcgaaactcaagctcagggactgggagtgagggcagtgacttgacccaggcctcccaggtacaaagtacagggtggagcatgagggagcctgatatgaggcccccaacgagaacctgcacctcctggaccttagctttctggtctgtacaatggatggggctttcattctgctcgcccagggaagtcagagctagagtcataggaaagtttggtcggagttcctggggagagctctttccacagggaaaaggtgtgctttgtgccagacgggatgctggggacacagcagtgaccgcagctcctgtcatcattgagcttacattttataggaacaagcagacaggaagcttttccacaaggacagggtaggccaggcatggtggctcacacctgtaattccagcactttgtgagaccaaggcgggcagatcatttgaggtcaggagttcgagaccagccggccaacatggtgaaaccccgtctgtatgaaaaatacaaaaattagccaggtgggctgggcgcgtggctcacacttgtaatcccagtactttgggaggccgaggcaggtggatcacaaggtcaggagttcgagaccagcttggccaatatggtgaaaccccatctctcctaaaaatacaaaaattagctgggtgtggtggcacacctctgtaatctcagctacttgggaggctgaggcaggagaattgcttgaacctgggaggtggaggttgcattgagccaagatcgtgccactgtactccagcctgggcgacagaataagactctgtcttaaaaaaaaaaaaaaaaaaaaatagccgggtgtggtggcaggcacctgcaatcccagctactcaggaagctgaagcaggagaattgcttgaatccaggaggcgaaggtttcagcaagtcaagattgcgccactgcatgccagcctgggcaacagagtgagactccatctcaaaacaaacaagcaaaacccccccaaaaaacaaacaaggacaggttcggccgggctcagtggctcacgcctgtaatcctagcactttgggaggctgaggtgggtggatcacgaggttgggagattgagaccatcctggctaacacagtaaaaacccgtctctactaaaactacaaaaaattagccgggcgtagtcgtgggcacctgtagtcccagctactcgggaagctgaggcaggagaatggcgtgaacccaggaggcagagtttgcagtgagctgagatcatgccactgcactccagtctgggcaacagagcaagactccatctcaaaacaaagcagcaacaacaacaacaaaaccaaggacagggtcatcccagagtgacaaatgcaaaccagtcagagggaaatgagtgagaaagatgagcgtgcaggggtgactgcttgattcagtatggttggggaaggactctgtggaggggacgttgcaggtggggcctgagtcacgtaggaagaatgttccaaaaggccgggcgcggtggctcacgcctgtaatcccagcactttgggaggccgaggcgggtggatcacgaggtcaggaggtcgagaccatcccggctaaaacggtgaaaccccgtctctactaaaaatacaaaaaattagccgggcgtagtggcgggcgcctgtagtcccagctacttgggaggctgaggcaggagaatggcgtgaacccgggaggcggagcttgcagtgagccgagatcgcgccactgcactccagcctgggcgacagagcgagactccgtctcaaaaaaaaaaaaaaaaaaaaaaaaaaaaaaggaagaatgttccaggcagcgggaacagcatgtgcaaagacccaggggtcggaccgtgctgggagcactggaggaacagcaggaggcccagtggctggagcagaggggagaagaggggtaggtgaggacagagagggaacagagcagatcttttgggccatggtgggtgagggctttgcttttccgctgagtgacctagaagccatgaggctgtccccctagtaatttcatttctctgtctcctctgtccatcctcaggccccgtggagaattgattccccgaagacccgaccccgctgcaccctcagaagaggggttgagaatggaatcctctgtggatgacggcgccactgccaccaccgcagacgccgcctctggggaggcccccgaggctgggccctccccctcccactcccctaccatgtgccaaacgggaggccccgggcccccgccccccagccccccagatggctcccctgacccccctgaccccctcggagccaaatgaggcaggaatccccccgcccctccatagagagccgcctttctcggaactgaactgaactcttttgggcctggagcccctcgacacagcggaggtccctcctcacccactcctggcccaagacaggggccgcaggcttcggggacccggaccccccatttcgcgtctcccctttccctccccagcccggcccctggaggggcctctggttcaaaccttcgcgtggcattttcacattatttaaaaaagacaaaaacaactttttggaggaa

SEQ ID NO: 280 - DNA, 83150 bp, Homo sapiens
  source 1..83150: mol_type = genomic DNA; note = NC_000006.12:86936919-87020068 HTR1E [organism=Homo sapiens] [GeneID=3354] [chromosome=6]
tgtaatctctctccttgaggcatcctgtggatgttgactgtaatctcccctggaggagggctaagaaatgcacctccagagggtctgtttgccattggaaccgcgtagagaaagcgtgcaaacccgtcaactgctcccgccgttcctctccctcctcaacccaggctcgctacagaagaagggagtagggtctgcccccttgttgtatctattttccccttctccgccagggctgtggccggcaaggggctcaggaggtgagtcccttgcccacacctccaaccccgctggcccggtttataacatggacagccctgccctctagtgtctgcaaccgggagccctaaggcgccatcagctccagaatttctcttttataacctaagcaagacctggagtacctcggagctgcgacctccagttcacaataccacctgcctcacacccgggctcatcttttcatcccacacccaccacccccctctccgttcacggtgtcccgggaggctgcgacctgcgtagatgatttagcagactgcccctgcccatgctcctgctcctgctcctcctcctcctcttccccgctctctccctctcgcctcctcttccagtccaggcgcccagactcggcgaagcgcagcgcctgccaccagcggtgcctcgggctgcccggcgcgccgcgctcccaggttctgtctcgccgcaccccggcgggcactggcgcgggcaaggacgctggcggggagaacgccctgggctcaacgtactccagaatcgaatgttgagagaagcagtgctctgatccagctcaggagaaaaaggagcgggttccgagtgagacttctggagccagctggacgtgccggtttgcccagtgcggcgcggctgcacgcaccgtccacaaggtgaggggcgcacaccttccgggacgaccttggcttcccttcttacccccacccactccaggtactccagctctggcttggggatgtttgccagctttgaggcgcaaaggcggcgggagttgggatgcggggtgtcggagggagactgagggtcgcccgggcaccgtgcctgcaccctggattatagtacagagagcatttcttgttcaaacaattcctcaaatgtgtgaacctgagaatcaacattgtgtataactgtggtttgagcatttcatcctgcttccttgcaaaaggattagaggcagcttaaagattaaataggtatggaacgggtgctggggggggccagggaaaacttgagtagaaatcacagggaggtggtgtgctccagggaccccggaagaactgtgtgatttcaaagccagctgattaaaaaacctttgattagaaaggactgcactgttgctccagccctcagaaaataatactgtgctcagtcctgataaacaaaatgcccaggtgtggaggtaatgaggcaggctcattttttttaaaatacaaaataaatcttggaagtaagagttaagatgagaagtttggtcttaagccatctccacccaatactgcaaggtgagaggctgaccccctacctaacgaaaaggaaaggaaattgagtctaaagggaagtgattccagctcctatcacaggatcatagtggttttgcatctatatgtatatttctgcctgtgcccagttttggaagaaaggaccttgtattcaacccaacgctgcttgtccttgagttagaaggataaggcagatggtgtcagcatcccaaggtgtttcttcctaacctttcttattgtccttccttgcctcctgcaccaaatctcttggggagggagcagcccaggaggaaataatagatcgtcaaatgggttgggggagcagtgttttttccaaaataatttaggctcattttatcattcttatgttttccctcaaagctctaagcagtacatcgtcctaagctgaatttaacattgctccagaatatatatttatcatagttgtacattcagacacaatatgcataaccttaaacagccaggatgcacttgtgaatcaggggcttcccttacttaatcctgcgcaagagaggcaaagcaggcacgtgggtctgattccctgtgcggtctccttcatgaggagcatatgtgaaatacctttgaaatacagagaagattgagacagcttttctctttctggtacagttgctttcctgctgaattaaatgagatgaccctgtcttcaacaaataaatgaatggaggcatttgaggcccatttaacaaatgcacaaaatatgcctgcctctgtttttcctcccttcagagctttagcctccagcccacggagttgtgatgatgaagcccacctcctaagtgggactcagctcagtttctgtatcatatttaaaacagagtatgttgcttatttctaaaattgcatagcacctcaccactaactattttgctgcatagaggtatttcatcactaagagagctatatagagaaactcactcaaatcctgattcatcattgttgatagaacttaactattgtgtcatcatcacctgacatgggctgcagaagctccaaggattgctatagatctcaattgagacttctagtaacagagctagaaaggagccttttaaagtgtagccatgactctggtcattaggtatatgcatgttcaaatattcccttacgtgcttgttttcgctttcataacaatttccagggatgaaaacttagcagattatttttataatgaagagtattcaaattaacaatgtgtatccaccagctaacaagttttaaattccacagaaatcagcatcacaagcatagtaaaatcaagttttcattctttcctcttctgccataatgacttcattcaaggcctagtcccagaccaagtgcatggaaacgatggctcatgtctctcaacatttgcccaagggaatggtgcctaccttgcaactcagcgtgatgtcacctttattagccattctggtgtctatacaaaatatttgctccccatttcttcttatcgatgcctggtcagcaacaatcatgtaaataagtttccattcttttgaggaagataacgaagtcagcgtttttcagaagtggtgcctaggaagagacaaaatccaggacacacctctagttcaggtaacactgcaatatatttcaatttcctgctgcgtgatggggttattattgaagagggaagtaaggtatatcattcacagcacattgtccccacctggctcaagcaccacccattccccaggtgggctcaatatgctacccccaccaccaccaagataccaaggctgcaaatgaaaagtagatctcagccaggcatgatgggtcacacctgtaattccaacactttaggaggccaaggcaggaggatcacatgagcccatgagttcgagaccagcctgagcaaaataatgagaactcatctctacaaaaaaatttaaaatgagccaagtatagtggtgtgtacctgtagtcccagctacttgggaggttgaagtgagaggatcgcttgagcccagaaagccaaagttgcagtgagccaagtttgtgccacggcactacagcctaggtgacagagcaaggccttgtctcaaaaaaagaaaagaaaagaaagaaaaagaaagtaggtctctttgcagaaagcctcaggccctgaacttttgtgtcatcttctcattactcaagtctaattccctacatctcacttttacacacagatcatttttttcatgtttgttttgattgcccaccctggaattctatttctgcactaccctttaaaagtgaaagatcaaatctaacgctctaatgtgggaaagcattccctctatttctacaagcttatttacacaaaaaaataagcttgagactgatcaaaagctgaatttctaccaaataggaacttactttttatgccgtaaattatcaaggccatctcaaggcagaggtgagtttagcatctcatgctttatgctcctttcttctgcacctaccagatttttattacatgtgaaattatatgaacataaaccccagggaaacattgaagatgagtgtgccgtcacaagtgacgaggggacagatgaacagggaagagaaatggggcagcagcactttagagtgacttacttctctcttgttttctcctccctgaatcattttctagaaccagtattgtggcccctaaaatttggggcttaggtcagtcaacttaccaaagttcatcttcctggtgatgaaaggactttcatcaaaatcccagctactttttattcgttcccacattttgtggattaagaaactgagaaccagaatttatagagatcactcaatcaattggcatattcccggatcacaacaaattgataaaattcttgagaaccctctttctaatacagattgactataattttgtctttcatttttagttctcttattttgtctcatgcactgtggattatctggtttactgcagtccttacctgaatagatgtcagtgttttgatcccattgttgtattcccctaaaacacgtcaaatgaaaaactggacactttaataggtttattgttagcactctctcatgctgatcaattctcaacacatgcagttgtaggattaggaagacaaaatcctttagaagaagctatgaaacctaatccttctgcatctggatcattttaaactacaagttgtaagaggaatgagcatctctggattctagttatcagtgcagaccagatggaaggtctttatgaaatctggtatgagaaggaaagcattttatagcaagaagaaaatattttgagaaatagctaccagcagcagcagctagcagttctaaaactctcagatcctcctaatgaccccattagggagggaggaagggagcaaggaaggaaggaatgaaggaaggaaagaagaaaggaaggaaggaaggaaggaagggaaggagggaaggagggaagtgttataaatattggtcagggaaaagttttattattaatgacagattaaataattagctactaggaaaattcaaggggatacataaaaatgccattagaaagaataagagaacccagtaaggtggctagctacaatagcttgcctggttagcgacaatataatcatagggatttatattacgcttgtacactgttgggcagaaaacatgcctgagaggtataaaagatgctgttagcatccaagaaaaatgggaaaggaaagcccacctcatctgaggaagatggaggaagaagaacctacagaaaaggattccacattccaaactcatccctctgaattcagtaatatttatccttatatgatttctgacagtgtagtttgtcattgtaattaattctttcctgtaagtaaacaagaattgtatacttacttaagtaccttacattttaaactttattacatagtcctaattttaatgttgaactctgccctagtcaaggaagtatttgttacctaacacaagaatttgatatacagtcatccataaacactatcctaccatatagttcatcataatttaacattcaaagaaagaagcatgatttcctcttttattatgctttcatttgagccattttaactttcttaccattctttccttctgaacctaattcaattccttacacaatgctctaaaaaatcaaggattaaatatgtaacttaatttataattagcaaatacatcatttacaagatgcattcatattggcaagcatattttatttcatagattgtaaactggtaaaacaatgtaatctcctcaccctctctgcaatacagtaagcctgtttctaagaccatcaaggttttactttatgtccgaggcattggagaaccagactgtactgaccccagggtttggtgacttacatataaatgaagcatcttaccaagaagggatgaaaaatgactttagaggaagcaaaagtctcaaagctcacaagacttgattactttcagcttggtgacagaggcaatgctcttgtgatgcagatggagtaatttctccagcacaaaagatgtccagccgggtcccattggctttgagataatctctcacattgcattaagtgtactgagtaccctttctcagacttatgtaccattagcatgcatttaattaacagttaatgattacatagtattgttactattaccacatagtcctgttatattaaaatacatgaaatttgtagctatgttttgcctgtttagtaaaatgagtctgaatctaagggtgagagggtctacacacagccaagaggatggggtattaacccaggcctgtgtgaagatatttgcatctcatggaatgctctccagagaacaaactgacctaccctgtgcatgtcagctaagctcccgccagcttcctcagggcttgctgaatgtacagtgagtgccacagtgccagcgtggcagtgaagcacaggcccaactctacggacctggggtcagaaggcctgggttaataccccattctcttggctgtatgagctgcatggtctgtcatcgttacaatggggacaataatacatgccctgtctacctcagcctcctttcagggaagtttctcaaaacagaatatgctattgtgattcattgtcacctgtgatgtcaaactgcaccttgtgttatactactagggggtaacacagcatggggctcaagcccaagctctcgagtccagaaagccaggttcatatcccagctctgccattcattaactgctttcacatctctaaacctcagtttcctcatttgttggggctcacataacagtactatgtcatagggctatttatgaggattaaatgtgtgtattcattattgctaaataataaattaccccaaaacctaatggcttaaagcaacagatttttattatctctatgatcatagttccatgggttgggaatctgggtatggcttagctaggtcctctggctcaggtctgtcactcacaggctgcaaagtttcagccgagactgcagacatctcaaggctcaactggggaaaggtaacgcttccaagctcgctcacgtggctgttgacaagcctcaggtcccagctggctgctggctggagacgttcttttgctaccacatggacctctctatagggctactaacaaaacagagtgcttcatgcagatgttgcagcttgctgtccttggagcaagggctaagattgaaagatagcaaaatagaagccaaggtctttttgtaacctgatatcagaagtgatatcccatggcttctgctgtgttcctcattagagacaagtcactagtttcagcctaattcaaggggaagggattacacagtgggaggaatacctacaggaaccaaatcattgagagccacctgagatactgcctgccacaatataagacatcagaagctgtttgataaagactcaattcagtatcacctcgtggttttatctcatagtaatgttctcagactgaaattagataatctgtcaaagaatttgtaaaatataaagctctatacaatatcaagattttattagttttattaatgctgagaatccagttccactttatagatagtgatataagaacagcaaatcaatgattaagagatgtgaattttacaccttgctgtgtgtgtgaccttggaaaagccatttatttgtttcataccttagttctctcatgaaagtgatgataataacagacttaccaggataaaatagataatagacagccatgcagcacattgacaatattttggtcacccacaaaccacatatatgacagtggtcccacaaattataatggagctgaaaaattcctacagcctagtgacatcatcgctattgcaatgttgttgtagcacaatgtatcgctcatgtgcttgtgatgaggctggtgtaagcaaacctgtgctgccagttgtataaaagtatagcacatacaattatgtatagtatataatacttgataataaacaactgttactggtttatacatttactgtactatactttttatcattattttggggtgtgttcctacttaattaaaaaaaaaaagtgaaaagaagtttaactgtaaaacagcctcaggcaggtccttcagaaggtatcccagaaaacagcattgttattacaggagatgacagctccatgcatgttattgccccgaaggaccttccaacggacaggatgtgtaaatagatacagtgatactgataatcctgagcctgtgtaggctaaggctaatgtgtctgtatcttagttttgtttgtttgtttgtttgtttgtttgagacagagtctcagtcgcccaggctggagtgcagcagcacaatctcacctcattgcaacctccgcctcccaggttcaagcaattctcccacctcagcttcctagtagctgggattacaggcactcaccaccatgcccagctaattttttgaatttttagtagagacgggatttcaccatattggccatgctggtcttgaacccccgacctcaaatgattcgcccgcctcagcctcccaaagtgctgggattacaggcgtgagtatcttagtttttaacaaaaaagtgtgaaaaggaaagaaaaaatttaaagttttaaaaatagaaaaaagtttataaaataatgttataaataatgagaatatttttgtatagctatacaatgtgttttaagctaagtgctattacaaaaagagtcaaaaaggtttttttaatttaaaagtttgggggttttttgttttgtttttgtttttgtttttgtttttttgagatgacgtttctttcttgcctcccagactggagtgcagtggcgtggtgatcccagttcactgcaacgtccgcctccccagtttcaagcaattctcctgcctcagcctcccaagtaactgggattacaggcatgtgccaccatgcccagctaaattttgtatttttagtagagatggggattcactatgttggccaggctggtctcaatctcctgacctcaggtggtttacctgcctcggcctcccaaagtgctggtattacaggcatgagccaccacacccggcctaattaaaaagtttataaagtaaaaaagttatagtaagataaggttaacttattattggagagagaaaaaatggtttttacaaattaggtatagcttaagtgtacagtgtttttaaagtctacagtagtgtacagtaatgtactaggccttcatattcgctcaacactgactcactgactcacccagagcagcttctaatcctgcaaactccattcatgataagttccctacacaagtatcccattttttatctttataccatattttcactgtaccctttctacgtttagatacacaaatactattgtgttacatttgcctacagtattcaatacagtaacatgctgtctggctttgtagcctagaagcaataggctatgccacatagcctaggtgtgcagtaggctacaccatctaggtttgtggaagtacacatcttgatgttcacacaatgatgaaatggcctaacaatgcatttctcagaatgtatgatgcatggctatatataaaattatgctgaaatctaaaaaaatgagatgatggtcataatgacaatgatgaagatgactatatgtttcagcttctactccatggtcctttgaggacaactgaagtaactagatatgatttttgtcagttgtgttttaagtgtatgtatcaaatccagctaccccaagttttacaataactttatatggtttaatcttatcttgctgaacacattagatatgctgccctgaaaagtggcttgcaaacagaatttttagaaactgaaccataattaaaatgcacagaggccgggcacggtggctcacacctgtaatcccagtactttgggaagccaagacaggcggatcacctgaggtcaggagtttgagaccagcctgaccaacatgaagaaaccctgtctctactaaaaatacaaaattagccatgcgtggtggcacatggctgtaatcccagctactcaggaagctgaggcaggagaatcgcttgaacccaggaggcggaggttgtggtgagccgagatcgcgccattgcactccagcctgggcaacaagagcgaaactctgtctcaaaaaaaaaatgcacagagaaggtttccatgtatctagtggaattgtacaatgcttatgtgatcttgtgatatcattaatattttgtaatataaataattatcctcattattttaattttctggcattgtagcaacacctgtataaatatttatagttacttaagaactcacaaaacaaccttttgaagtaggcaaataaaaccaactcttggttatctcaaagagttctttttgtttgattcttgtgttatctacatttcttctctcactgtaaattggcataaatttggcagatacaaaacaagtaaagttcaaactcctccactcaaccactttaagggattttttttcctgcttataagtatatcacatgttcattgtagaaaatttggaaatgcagaaaagtataaaaaatgtagttaaagttactcttattgccaccaccaagaggcagccactattgatactttgatgaatttctgccttagtgctttccctctctatagggagaaaagagtggtttctttttcaatgaaatcaggagtatgttatatacttttcttgtgttctgctttctctaattaacattattttttaaatgatatttccatttattgattcaacaacataaattagtaaatattgactatatccaaagtggaatttggatgaactgtaagaaatatagttaataattgaattcagattttttaaatcaattccaacaattgtgaagtagtttcttttcctttttttaaaaaattttactttaagtttggtgatacatacgcagaatgtgcaggtttgttacataggtgtacatgtgccacggtggttcactgcacctatcaacctgtcatctaggttttaagccctgcatgcgttaggtatttgtcctaatgctcaccctccctttaccctccaccccgcgacaggccccagtgtgtgatgttcccctccttgtgttcatgtgttctcattgttcaactcccacttatgagtgagaacacgtggtgtttggttttctgttcctgtgttagtttgccgagaatgatggcttccagcttcatccatgtccctgcaaaggacatgaactcattcttttttatggctgcaaacattatctatttaataagtttcacatgtaattattatttgaaaacatcatttctaataagtatataatattgttgtatggatatactatatcttatttaaccagtcattactattggacttttaggtggttgtcagtttttatactgtaaaattatagcatgaaaagaaaatttttacataagtctttgtcattcattattctagttatcttagtaaaagtagcaaaggagtccttgaagtcactagggggaaatgaggtttggtaatccaagtataaatatatacaccacagtcttctcttccctcttccctaccacttcctctcacctcccactggcagaaatttgcaggcttttaatgctggaaattgctgaagtaacaatctaattggggtggccatctgtcgtttttggcccatatcgttcaggtcacactgaatgcacccttggctccaagagtgacatgggacccaggcccatccaaacatcttgttctccagggcactgtgattggttcagggataggccgtgatccaagcagaccaattggaatcaatgaggctcagttgagaggtgttcaggtgccatcacctacattggatttggagatttaaggatacatgccaggaactgcagggacccaacataaggggagtgcctcctgaggataaaactttacatggaggaaggaagagcccagagatggagaaagattcttgggtatattatttaagtttctggatccacctgtgcctgatctacacttgacactgaagtttcatgagcaagtaaagtctccttctcacttatgccaatttaagaagatttctgtcatttgtcttttaaaaggtctttaataatccagagatttttaccctctcaattgatgaaaatgagttgtagttaagacagattctggaactgaatcctagttccatcactgacagtgtaacgagggaaggttatatgacctttccccagtcagcttccctacctataaaatgaaaataatgctaatacttatcacctcagagaggtttttgcagggttaagtaagttaatatgtgaaaaagtgcttaaaacagtatctggtatattttaattactacgtaagtgtgtccctgctgctgctgctgctgttgttattttgaaggcagaaagaaaatgcaggagagtaaatgacctatttcactcatgcagagatttagcagccaagctaaaattcaaatttaggtcttctcttttctctgcttgttgttctttctcaagagctaagcctatcgtcatctttatgatatatttgagtattaagctttcagaagtttccatccacataattgaacatttctatcaaaagttttgaggtagaccaggaggccagaaaatagatttaagttactagcaataaccagatgctactgtaggattataggttatcacaacttgtaactaaaaattatgatttttattataataagtttaattacatttatttaattttaattaaaattaaaatacattttattattataatttctactttaacaagtaactatacctttcactgtgttttatttagcacctttcacagtgttgttgtcttttttaatataccttcctattaaaccagttgctctttgcagaatgcttgaatcatttggctcttggttagtaggctcccgttacctaaccaagcactgagtgaacgtatttactggggaggcagctggtctctcccaaatgtaaatcagatttcatcatgtctggcttggagagaacgtggcatatggcaaatgaagacacagctgcatagtgaaattttccatcacaagttagtctaatacctgaatgcagagtgaataaaacattttctaaacaagaatattatgttcaaattcataatcattgttaaatattaagagtcaggttatttcccttgaattatacaaaatttcactattcttgaaaaagtacatgttatcttatatttaatgtcatactattcacatccaggctgcctttcaacttctattatttaaaaatattttcagatatctacattgcctgttattaaaatgcaaactgttctttgagtagagaacctttgtgtaaggccttacaaagttctgatagagatgaagtgcacggaaggaatgacagtgtggtgggaaggtccatggccttaggggaatgggtgggagcctaagctttggagcagttaggttggaattcagacaaagccctgccacttctaggctgcaaaggtattgaacaaggtacttaactaccctctgcctcagtttccttatctgtgataagaataatatcatgtaatgataatacaaacatcataggattgtcagaatcaaaatgagaaaatgtatgcaatattcttagcatagtacctgccacataataagcactcaaaaataataagacctgcttcatcactggctctaaagttgtgtccaattggtttcataaccctaagaaggctatcaaatcttcctgggcctcagttttgtcattagatgagtaaattggaccaaattctataaaaagtgcctttgggggttaaaatgctatgacaatgcccatacacattggggtaaaccaaaaatctataacaggggcaaacttgggaagattttttcaaatctgtttttctacactgaaattgagctgcatcccttctccaaaggtgatcatcttctctaataataaagcaaggtttgtctatttttaactttttattgatccagtgctcagatttttcagcaccatttggggaggagtgttcaatgcctcattgcagaaccttccttgtcatgatgattttgataatattattgacattctttcagattccatagtgagtctttgtcatgatcaaagggctcatgatgctgataacacaaacaagagtaaccagttcaagaattaatttggttaatgaggatcactaatacggataatttcttcctaactgttttggcgggatgcattatttggttgagtgtattatcttgtctacactgatcaagctagcttgaaactcttcttatcagcctttaactacgtactttaccaacacagcctttgaaatatttgttttcttttcatgaagagcttttaaattttttgcctagattccaaagtaagaaatcaatttaaatggcataactttcaaactagacttctgaaagactttatgcatcatcagtaaatctaaattgatatttttctttaaaagatgcaacttttctatttcctatgtaaataactgtgactctattgatttataaactccaagaacaattaccactagggaaaaagacaggataaaggagcatttgttgtcaagcagatataatattttgaactgatgataatgtttcccttacaaaacatgcttgtattaactgatatttatactcatttttgaaaactgaattacagatttatgaaggatatattcgaaacttaattcactaaaagaaaaaaatatatatgtctattgaaatatcccctaagaagcagaaaaatatttttgttctagtagtataaatgaataatgcaaataagaatgtcacctgaattttaagtaacacacagtatatttggaccccagattgacaattggcaacagtaccagaaaataaactagaagctagatgcagccaggccttggcaaatatatttttatactgttgttaagaaactcataataactgcttcctcactgatgtgaactttccttagttgacactctcttgattacaagtacacgatgcctactttaaattatccttaatcatgaagggaatttgttagaagatgccaggatatttggtgaaactcaagagctagagttagctactaggaaattatcaggaatctagaaccttatttttctcttcccttttttctctccaagactggctttgaatatttctacacacatgtggctaaatgtgggtgtcccatagctccttagtttcaatttcgagattcaaacaactcacagagaaaaccaacaagcatctctcactcacagttcaaattcctagaaaaaaagggagtttggcccagctatagttagctgtctatccctagcccatcaacaatggtgcaaacataggtgctgggaatctagtcttagcaggaggggaacagtatgcagaaaaagggggatctgtgttgtacagacaccccaaaaaagttgtcttttcttccttttggcttacacatacacacacacagacacacacacacacacacacacacccctaccattcttcccatttattaaaaggtctccctgccatatatgacttaaccatcttacactgaactacactctcattcacccccttcctaaaggggataatccaatcaatcatatctagcaactgaatcctaaaatgtcatcaatgggcccctcttctcaaagtgaatgatccccagaatagtccatcttttctgtagattaggcttcattttgttcagaaaaatagctttctctttttattctgcaacataatgattgaatggtaaaattagaaagttatcagtaaaaccacaaacattcccactcaaaaaatgattacaagaagcaaaaatcttcacagcaacatcatacattggttaccagaccagagaatatattgcatcctgcaagacaaggattgcaagaaaggtgaagagtaggataaataggttttatgggcttccattattgttgggatgggttccttcctaaatcaagtacttcactacaatataatgcaaataaagtgaacctctctgcatgctgccttgactgactcagccaaccagtttcatattctttacatagctttgttaactgtagctctctctattgatgcaatttctctcttagtcgagatccttttggttgtgagtaaaaacatacacagatacaaaaccacagactttaagttagcttaaggaaaaaatatgttgggaggagtttactggaagggttccaggatacattaattcataacaaatgaccccaaaacttaatggcataaaatggcactctttatttaagtcagttttggagattatctgggtagttttctctttatttaagtcaattttggagattgtctgggtagttttctctgctgagatttttcctgcctctgcatgagctggcaggtcagttacaagccagatgatctactgtgttctcacatttctaagggtcggcaggctgtcagctagtgcaaaggaatcagtggttagaagggactaggccatgtggctctcaacatccgggatgctacactaggcatcttcacagggttcctaaaagtacagtgaagaaagcagcaaagtccttgagactcaaactcaaaactcacatgattccatttctgtcacattctattagtcaaaataattcataaggtcagcccagactcaaggaacagaaaacagattgtattagtctgttctcacattgctataaagaactacctgagactgggtaatatataaagaaaagatgcttgattgactcacagttccatagtctgtacagaaagattggctggggagtcctcaggaaacttgcaattatagcagaagcaaaggggaaacaggcacatcttacatggctggagaaaaagcaagaaagtgaagggggaggtgctgcacacttaaacaaccagatctcgtgagaactcactcactaccatgagaacagcagagggaaatccacccccatgattcaattacctccaacaaagcccctcctccaacattgggaattacaattcaatatgagatttgggtggggacacaaatacaaaccatatcatagattcacctcttgatggcaggagctgtagtagggacatttttgcagtctacaacaagggatattatgaagaagtcaaagataatttgtatagccagacaccacaaggggctagaactgtgaactgtaaagctggcagagcctgagatatttccatttttattcaggctgtctgtctgcctctcatcatatggcctcttactctgcttctctcactaagacatcttactttattcaattactttattcaacttactttattcaaggtatgtatataagaccctagaggcctgccccacaaatccccagtgtgcatgtcttcagttcaagtgatctgctcagacagctgaatagtatctcttagcaccaatttcaattcccaaaacagaggatttgattgtcccagatttggggcagtgattcatcccaattcatccactatttctggatggggagccacagaatagatacgtggttactgtgaggcccctctgcagaagagagcggtgtgggacccttctcagaggatgagagactcaggagatgctttctatcacagaatgtaatggcaaagcccgtatgccctgaaaaattcaactctccaaatgaagtcagtattctgttaccaagtcagtgccaggaaaatgcaagaaaaattgaaaacaagcttgtcattttcttctatttttttctgagtctgaagtgcccgtagatactcttaattcttctagaaagcttgaaagcaatatttaatggaagtcaaatttggtctgcagcagatttctttctcatttgattttctccttcttatcttggaaacaacctctaatgagagaaatattccagagcaccatctcaagatgtatctgggaaaagaacccattgtaccccagagcaaatcgaccctctgctccctgacaatatgcttggttttcaacagcttccctgatcccagttcttatgactttaccacacttttctacacttcccagaggttcagcaaggcttccgtctccctgccggtcttgtcagggcaatctcttcactggcaccatggcttattttctacagaaccattgaaagcagacatggttcccatgcagattatcttcccatttgcacttaccaatcatgtgaactcaggcaggtccacctccctgtcagcttgtctcctgcaaaatttagacttcatgtattttctgtcactgctattctgtatgtttgttatcagatcaaatgagacgcctgcatgcggtagcaccttaaaaacgttagaatgctctgtacatgtagagaaatggaacttctctcacagatacttgatagtgagataaagtggcacgggtcatttcatgtccagtgtcatcatacagatgtaaaatcccaccttggaaatgtaggtgaccacatgtagaattttacctctgcctgctcatgagaccctgtgcaaaggactcagctaagtcatgctcaggcttctgatccacagaagctgtgagataataaatttatgttgtttaaagctgctaaatttgtggtaatttgttacacagcaatagacaactaatacagtgttcaatctcaaatgtaaaataacattttacataacagaatgctatgtgtaggcttgagtgagtgagagagagtgtgtgtgtgtgtatgtatgtgtgttccaaaggaaacgtattttaaaatgaaatacattttaacatatggttttcaaaaagctgagaaactgatgataaatttacacttgttgctgcaacatctcaatattgtaaaccaaaaataaaattctaagacccccccaaccaattgactgaaaccccctctcagtcaagggcattccaaagtaaacctgaaaaactagttcaggccatgatgggaatgggggattagacacacctcattatacccttctctctttggaattggggcacaatggaccagcattaacactacaacagagatctcaagactgaccaaagagattctttgtggcaataaggtatatcacaaaatcatagatagcaggccctaaaagaaatagaaagtattttaccctgaaatatatttctttgatgtattttaaaatggccctgcaaagctgtctcttgtgggagaaatctacattctataaagaatcctcttccctttccaggtctttttctgatcccagaaagactaactaaaagtctggaacctttaaaagtctgataagaaatatttaccatctaatctctctgaagcctgctacttggaggattcatctgcataataagaaccctggtctccacaaccccttatcttcattcagacattcctttctatattgattccagttctttagataataacttaacactttcaaccaattgccaatcagaaaatctttaaatccacctataactggaagctgccctgccaccatcactgctttgagttgttctgcctttctggaccaaaccaatgtacaccttatatgtatcaattgatgtctgcttgtaacttctgaccccctaaaatgtataagaccaagctgtaacccaaccatctgcgtacatgttctccgaccctcctgaagctgtgtcattggcatgcccttattcttgacaaaataaacttctaaattgattgagaaaaaaaatttaaaaaaataaaaacctgattttcttggtcagagctgggctactacttgcttgccatatgatcttgcacacattatttatggagttttttatgtttcactttctgttttttaaataagaacaactccactaacttcagagtcttatgagaataaaatgataaaaggtatgtgaatatgcttagcatactatttggccatgctagaagactataaggttaggttttgtttatttgtttgtttgctcctttcttggtgttcactgggttcaatggctaagttctattacatgttaaccttgtcgtttagtatagaaaacaatgtgagatttagcatgattattgaaacagcaaatcttcagaaatccaacaaacctatggcactcaaacagcttagtaaaacctacccaacaaaatttaagaagtcttggaagcagatggtttggggcatctaggctccagcccaggggcatttttgctggcatttgtgagacttttcaaaaacaataagcagtcaacattgttcaaggctcattttttccctgccttctgaggtgactacttgagcaacatctttcagataattctaatctaagaagaattttttattttaaccttttaaaaaggcaataaaataagacatctattttttctccaaatagctttgtacgataacctctatttattaggacatttgaaagtttcttaccatatattctagccaaggccatcttttttttatgaaacattgttagaattaaatcccagaatttcagatgagctttcccttacactgtcatatttcaccttacctcttaacttttaagggactgtccatgaatacctgagccccaacatctcagtcacttggcactggagaaaaatcatagtgccacccacctatcttctgaatcaatgtatctgaatgtttaatattttccatttgttttacaatttcttacaaaataaattattttcccattgaggaaaagaaagatttttatgcatttgcatgaaaaggtttcaaagatattgttaaatggaaaaaaagggcacagtaaagtaaaaaatagcttgcatatcgagatctcatgtgcatggaaatgcatgggcaaaagcctacaggagcacagtggtggatgctggtaacctatggaaggtgagtggagtgtgagcagagagggggcctgtcacctttagtcatatatacttccataatagtaaaattttttaaactcaggctatatccccacactatttaatttttaaaattgtttttaactgggcgtgggcaggaggcatgcattccttgaccaatagaggcatttttttttttttttttttgagacagagtctcgctctgtcgcccaggctggagtgcaatggtgcgatctcggctcactgccagctccgcctcctgggttgacaccattctcctgcctcagcctcccaagtaactgggactacaggtgcccgccaccatgcccagctaattttttgtatttttagtagagacgaggtttcactgtgttagccaggatggtctcgatatcctgacctcgtgatctgcccaccttggcctcaatagaggcatttttaatttacgagcccatgggagaagcccatgtgcctatactcaaatgccagctcctcacaatgaccccaaacattctgtctaaagtgccctctcatcttccagtctgttcctgtttctgttttttccctcatgatacttgctacgatccaaaattaataagtatctgttggcctctgttttctcccagctagaatacaggcattatgagggcaggagtctcatcaatcttgttcagttttcatctccagtgtctagaggagaatcgagcattgagtagatgctcaacaaatatttgaataaatataagaatgaatgagacaaatgcccttgtgccattattgtctgctataaaactctgaaggagcaggggctgcaagcaaaaatggcagtgggcccaagttttacatctgcttccaaagtactatttcttatttgttagagaagacatttgtttcaagagatctaagagaaaatttgcctggtggaagatcctagcagccccagactctgaacaggaagtgtctaccaaccagatattggcccagctcccacacagcataagacaatgtattaatcagggctctccagagaaacagaaccaattgcacgtgtgtgtgtgtgtgtgtgtgtgtgtgtgtgtgtgtgtgtgtgtgtacagaaagagagagattgatgttaagaaattggctcacacagttgtggagcctggcaagttcaaaatctgcagggtaggcaggtaggctggagacccagggcagagctgatattgcaactcaagtctgaagacggtctagaggcagaattccctcttccttggggaaactcagtcttttttctcttgaggccttcaactgattggatgaggcctaccacattgtggaggataatctgctttacctgaagtccactttgaatttaagtgttaatctcatcttaaaaaaagaaaaaaagaagaagaaaaaacactcagctgagcactgtgactcacacctgtaactgcagcactctgggaggccaaggcaggtggatcacctgagctcagagttcgagaccagcctgggcaacatgatgaaaccctgtctctacaaaaaaaaatgcaaacgttagccaggcgccatggcacctgtatgtaatccccagctattcaggaggcagaggcatgagaaatgcttgaacccagatggtcaaggctacagtgagtggagatcctgccactgcactccagcgactagtgttttgactaatctgggtaccattgcctagccaggttgaaacacaaaattcatcatcatgggcaggatgacggaacctcagctggagccttagctgtgtaggtaacacagagagtatcctgtggtgaaaaaattagaaacagacattgtgtgagaaagaaggggcaagttttgtgtaacatcctgacaaattttgaatctctgttaatcctcttttatgcaagtatcagaagatcacttcatgttcagccataggagccctttcctcatagccccatatcagccaagcgcatatagataaagctgcaggcaaagataaggcgtctctgaatccccagctgtgtctgtagggacactcttccttagtgccactatattcctcatactagtaaggaagtcagccaattctactcaatgtacaagtaagtacattgaaatgcagactatctaaataagcaaactgaagaggcacactgggaaagttatccagataattcaggataaaattcagcaggtgtcttggtctgttttgtgctgctttaacagaatagtgaagactggatgatttataaagaatagaaatgtatgtcccacagttctagaagctgggtaaccaagatcaaggtgccagcatgtagtgactagtgagggccttcttgctgcaccatcccaaggcaaaaagtggaaggacagaagggggatgaatgctgtgtcctcacttggcggaagtgcagaaaagagcaaacccactcccataaccctttttatactgacattaatccattcataaaggcagacccctcctgacctaaacacctctccaaggccctaccacccaacactgttgcattggggattaaatttccaacatatgaattttggggacacattcaaaccaggcaagtttgaaaagcttatatttggggtttacattattccacctggtgaacttcaccagttagactccatttatgacacagctcaggtgaatgttctgttatcccggttgttcaatcaagatccattgagctgtagtgggtgggggaagtgaatcaggagcaaacacttcaggaaagtgaggttaaatgaaagaaaggctgagctaggcacggagaacctgaattctagattttaacacctctcttgatcatttgggacaagtcacgtaaccctaagcctcagtttcctctctgattctcctttagccctatagtttcatgggatgtctaatctcagacactctgctggccatgtggcctcagatccctctcctaatgcctaatatgtgttagcacccttgtgctttcaaatatctgctactactgctagttttatttctaccacttaaagaatggaaaacccatatttaaaaaaaattgatttcccccacaatagtgtgtctgaatacagattctgaattgctttacacatatactgtatgtttatctaattataagtagaaaataatattgtgccagtgataaaaatgaagctaggaactatcaagagagcctggtcctatttccaaataccattatatgctttagtattttggtttcaaatcagcttccaatatttggggagtcagtttttcttttttgatattttttctgctcaactgtttcagaaaatctcttgttgctatggaagtcaaatgggatttttcatctgttttaaaatcatctcctcatgcctttacaattaaaagtcatagctaattataatgcttacctactgaatgtggatcccatattaaacaaaagaaaatatatgttcataatgtcaggttcgtaagaaaaagaatttttttaatttaattattttaccagactttaagtctttcccattcttacacatcccatttgaatgacactaaaatgtataaaatcaattatatgagtttaatttgcccaagcttggtataaaattttattattcccttcctgagtatccggctattctaattaattttctcctccttatcagcggatttaatgattcacttccatgcccctcttttgccaagtgcgtcagcgtgtattgttagccagaggtgtctccatggctgttaagaagctctgactcggtgaagaaacagaagcagtgtgctgagcaggagaagagggatgaggtcatgcctttgagcaccgactataacctttatgttgctcttggtttttgtaatgcacacatatgcacatgcaaatatacatgtgcacacaaaaatgcatgcctagctatatgaattctcatgtcagaaatgagtggcgagtgaagatcagaacagatttcacatttttaacctagtctaaattcagctcctttgcagaacttcatctgagtaatcccttttaaatctgagccctccagttactccagattttcttagcacttagttagttacgtgcatgcctctgctgtcatagcaaagtcacaggctgacatccacagcagggaagataagtaacaaatgcatgaacttgtggcacaagatcaagcactgggtgtacagctcatgactggcattgaggaacatggtaaaaaaggaagggaaataaagcaagtaagatttttgtttgaacattaaggagaattttttggttaggtacagtggaacagtttataaaatgtggtagtatgatccccaatcctggagcacataaagaagaaaataaaaaaacattttcctggagttgcttgggtcagaaatgtcagagatgcagtgcaaatcatcttatcagctatttgagaatggtcagatgtagacatgaagagattaacataattattcattctataaatacagtcatacaccacataataatgttttggtcaacaacagaccacatatacaatggtggtcccataagatggagctggaaaattcctattacctagtgccatcctaacatcatggcacaatgcattactcatgtgtttgtggtgatttggtgtaaacctactgggctgccagtcatatgaaagcatatcacaggctgggtgctgtggctcacacctgtagtcccaacactttgggaggctgaggtgggcagatcacttgaggccaggagtctgagaccaacctgcccaacatggtgaaatcctgtccctactaaaaatacaaaagttagccgggtgtagtggtgcatgcctatagtcccagcttctcaggaggctgaggtgggagaatcacttgaacctggaaggcagagattgcagtgaaccaagattgtgccactgcactccagcctgggtgacagagcgagaccctgtctccaaaaataagataaaaaataaaataaaaataaaagcataccacatacaattatgtatagtacataatacgtgatctctgttactggtttatgtatttactacactatacttttattgttattttagtgtgctccttctactcattaaaaaaatgttaactgacaaacagcgttaggcaggtccttcgagaggtattccagaagaaggcattactattataggagatgacagcaccatgcatgttactgccccaaagaccttcctgtgggacaagatgtggaggtagaagacagtgatattgatcattctgaccttgtgtagtccaaggctaatgtgtatatttttgtcttaatttttaacagaaaaatttaaaaaataaacaaaaaaatttacataggaaaaagcttataaaataaggatataaaaaaagaaaatatttttgtacagctgtacaatgtacaccactgcacctggctaacttttgtatttttagtagggacaggatttcaccatgttggtgtttttttatcaagaagttaaaaaaatttaaatacttataaagtaaaaatgttacaatgagctaagtttaatttataattgaagaaaagaaaatattgtttataaatttaatgtagccttagtgtacagtgtttagaaagtctacagtagtgtacagtaatgttctaggccttcatactcatccaccactcactcgctgactcacccagagtaactttcagtcccacaagctccattcatggtaaatgccctatacagatgtaccatttttttatcttgcatactgtatttttactgtacttttttatgtttaaatacacaaatatcattgtgttacaattgcctacattatttggtacagtaacatgctatacaggtttgtagcgtaggagcaataggctatatcacatggtctaggtatgtagtaggctataccatctagatctgtaagtacactgtgatgttcacacagggacaaaattgcctaacgacacatttcttagaatatgtccctgatgttaagcaatgcaggactatacttattaagcacctattatatgcccaactctctgttaggccctggagacacaataaacagactctattttcaaagcccccatggtcttaggggtaggacaaacagacaagcaaaaattactctacagttcaggacatcattctagaaaaccctagaagagaagttgcactgggtgctatggagaagaagagaggcaccttccctggagcaacggtatgctagggaagtcttcctgacaatatccagtcttctagtttgaaaaacaaaatcatcatgtgaccgtgaagaaagctcatatagccatttgcatgactgaaaaaatatgcgttggaatcgtatctgggggcatggggcagattgcattactaacacataagacaaatcaggaatatttacaattatccttaaaaatcctacatattgctcataaagtactaagtgcatgaatatgtgcatagttttatgttgtggctatatttagtaagtaatatatatgcctaaatatgccatccatgcaataaatgtaagaatcacactctgtggcaagatgctctcagtgtgagacacaaggaaaatgtgatagcaggtgatatactcatttagtgatatagcagaactgtctgcagtacttaaattctttctctctttctctgcctttatattttctttcaagcatgggtggttacatttgtctaagttaaacctctctttataacagtaaagttgtaaactttgtctaagctgtaaacttctccttacaacagaaataagttacagtttgaacaaagtttttgaaaattttttaaatcatcttaaaataatgatccacagtactgaagaactcaatgaaagagtaattacaaattgctaatgtttattaattcttaaggttccttatattttaatgccttgcaataatgaattatttaaatcataggaattataacttgcacataaaattatagtcaataattttaaattaataaatgaaacaacatagtactagtaaaagaaagaaaaaggaacatatttagagatatattcttcaaatttattgaacttcattcacccacagattttgttgttcgagctgttgcttcagaaccaaatctgctcaatgaatatcaccttctgcctcatttccctcatctttataggtcaaattccctatcactgcctccactccatgccatatgtgggcttccagaccaaatctgacttgagggactcagcatcccggggctttccacctccttcactgaagccacctgaggggctcctccgtccatcctgggcatgctcactgctcctctgacagagcaagccattgacttgaagcagttctcagagtctcaccgtctctgcaggagtgttcctacctgataatgaggctctcactcctggcatggaatctatcccactcccccgactttctatgagttccagttcagaggttctcaatgattctcaactgagaacactagaacttcttagtacagtggttctcaaatttggtttcacgttttattcatctgggaagttctgtatttttttttaataccggtgcctagccatcacccacataaattctgatttaatcgttctggaataggtttgagtcatcaagagtttgtagaaatttcccaggtggttctaatgtgcagtcagggctgaagaccactatctttgcaggcttcttgcaggcctcaccttcccagtcaatgccaagagccaaaccagtccatccaggggtctacatacacacacacagacacacaccaaacttgctataagtaaatagctcaaggaatgatagcaaatatatggtcttccttattctaagtgaagtaactcaggaatgtaaaaccaaacactgtacgtcctcactcataagtggaagctaagctataaggatgcaaaggcataagaatgatacaatggactctggggactcgggggaaagggtaggagggggctgagggataaaagaatgcaaattggttatagtgtatacttctcaggtgatggatgcatcaaaatgtcagaaatcactactaaagaacttattcatataaccaaacaccacctgttccccaaaaacctatggaaataaaaaagaaataggaattctctaacacccacaaaaaaaaatagatggtcttcccctatatctaagttgttctagttgatccagtctttcttggagggtggtataaaatgaaaggatgggtggtttcaaatttttcagactccgaaaaaaaaatgaatacaggatctgggtgggaaataatattactaagaagagggaagaaggaaaacagctgaaaataaagtcaggttaagtgattgagtccaaggtaaaatgttataacataagaagaaagagaaaagtaagaaggaaataattgagatattttaggaaagttaatgttatttaaatgaacagacttacaaataaggaaactctccatccagttattagcatcatccaatgactgaggcactgtggataatgcaaagtatacaggtcctgagccaaagtggacagatggaatctcatctctacctctttccagctctggaatcttgggcaattgtgggagactttccaagattcccacagcaagatcttttctcacacattatcttcttacaatatgagattgaatctcctcctgttttgaggtaggatctgtccttcccatcccttgagtctaggaggtaagtacaggggtgtgtaagacggtgtgggagctgagaaggaacttgctgacatgtgtttgttggggactgattcagaaaagaggtgatgctcagtctgagtatggaatgctgagatggagtttgccaggcagagaaaaggtatttcaagtaaggataaccaacatatctgaaggcttgaagatacaaatgtgcgttttcattacaccagggcttctgaaactcagctgcatggacatattcttaaaagatttaaagaatttttattattttaaagggttaatattttattcaagtttattgaacagatataattcttcataaccagagacaatacaaggcacataaaatgcacatattttctagagaaacacagagcttctgaattgaaggggacctcgggatcttttatctcagcccccatgtacccatgtgccatggctgagtgatatagtataataagcagaaagactgtgaaaccagacacatagctaaagagcaagtgcaattaaaggttaaaattagattattattccttttgatgcccttcccccatggcatatcacaaaacataaaagcaaaggcaagggaaaaaaacagcaactgggaagactataccctctagccaacctatcacaattataatgtggtatttgaaagaagaaaagacatttcaaaagggcaccattattaatgccaccaagaagggattggaaagttgcagtttaaatcattgattttgtgccagttctcttgtttatataaatatcaattctcactgtgaattattgcacctttatttagttaggaatacatttttaaaatgccttgctaaaaggtgtgattcaatggagagaaagtattatcaagtagtgcaatgatccataaatagctattattattattatttaacattcgttaaacacccacagtgagctaagcactgtaccaaactttgggaggatgtgtttcttactctgacgaggacagattaaatatgcgaaagagaggaaagcttaggatcagggaaatttatttttctactccaacatttccatgtcaaatttccacttgtcaaattaacaaaattcaagatattataatagtattaataatagttatttcttgtgttcagtgttttttacattacgaagtgttttataaacctatctcattatataacttggcatatagtctctggaagatgtgagaataagagaggtaattttatttcaagagaagcatcagctgatttgttggagcatgaaagggcagtcatactgaaggagaggggagagtttttttggataggtagtatatgcaaaaaagaattgttcctctcacctggctttcagctatcagtttccctccctgaaagcagtcactgtaatcatgtttttgcatatcaatcgagataataaatgagtttactaacatacagtttacacatgtggtatcacactatgttcactgttctgcaccctattttctcttacattttggagattatttcatgctacattattatttttaatggttgcatcctattccatatataagtgtaccacaatttatttaactggtctgttattaaagcatatttatagaaattttgtcacaatttttgtttctgaaaaattctgctattacaaacaataattaaataagtagctttgtagaaacacctctgcaagtatatatgtaagataatttcctataagtggaattgctgagccaaagtgtatgtgccttggtaatttggtagttgctgctaaattccctctggaaaatgtatactggctgcaattcctagcagcaatgtatgagtgcctgtttccccacactgtcaccaacacaatgtgttatcaaaatttgagatatttcataatctgatgagtgaatagcagaatctcatggtagtttcatttgcattccttctaagtataagattgcttaagcattagttcatagtttaacaaaaacattagtggttccttttctgtgaactctatttatattttcagttcttttataggtgggtgttcttttttgaattggtttttggcaactcctttaatattgatgaaattagtccttaatacataatctgaattgcaaatatttttcctagtgtggcattcgttttcattaatggtatttttacgttacagagttatctagttttaataacttagtgtattaatcaatcttttgtggcctctaagttttgtttcatgttcataaacatctctattaacacaagattattttttaaaaagaaacttcctagttttcacttatgattttttatgtaaattgttaatacctttggtatttattttattatgaggtagggatctaactttatttttttaatagatgactattaagtggtcccaactctattcatgaataattcaactttcttccatgagtttgaaatacttctgtcatatactaaattcccttgtaggggaagtgctttgtaaatgccatcattattcagtttagaaacgcagacattcccctaggttaattcactagagttgatggttgataataacctactgaatccaagcagatgtgtggggcaagaaacacagaaacagcaatatgcaggaagcaggaggggtgcctagttggaattaagagagcaaataggaacagaggaaaaataagattaaaatgtcagagaaaaagtagggacaactccaaaacaaatactttcatgatataaaaggtaatgagaggacacctactccaactgccctcctgataaagttcaagctgcatcacatgaactccaggacttttctggtctggtctctacctacctctctagcccagcgtagatttctcactaattatctttcaggtttcagcttgaacattattttccgccatgtacttccaagacttggcaaagaatgaatcaagtgttccttttttggtccctgcagcattctgtgcattgtattgtctggtctctttcacctctgttgtggacatttttcttcactcccagcttttagtcatctctgtcagttaccaagtttctctctggatgacttcttctcttacactaagcccacgtgcttctgatggcactgacttgaccccatccctgaggtcccacacgtgacctaggcaaagctgcttgatacgagtcactctccacaccccagccacaccccagtgagtggttcagggattggcatgtgcccaaggagagctaatgtgacacagtggaacttggcctggggagcctgaatgaaaactcaaaccagaagtcatcttacaacaacgggggtctacagagtggaccaaaaatgaagtagaaccaagaaatggagggacagggaaagccatctgaagccctggatcaaactggaaaccaatatcatccctggattatttcattactaataaattccttggttttcttcacattgttttaagctcaattttctgtcacttctagaaaacgactgcaacttcttaacagctcctgaaggttgtttcttaagggaagaaactgtgtcttaatgctattgtattcccagggctccattcctggagcacagcaacattcaataaatatacagggaagaaaaaggaataaataatacgacaaagttcttttaaatcctaaagtaacaactgcttccaggtatggatattctacttatggaagatcactgagttgactgatggcagaatctggattcaaatctaggctgacccgggcccaaatccttggtttgctcacctgtaaaatggcaacgctttgtggtttgatattaaaatggtgatgataccctcttttattgccggaaccaaggagtgtgccaaagagaagaaggttcctgctttgccaaaaaccctcaagaaaaagcaaagaagttttgcagagctgaagatcaagcacctgagaaagaagtttgcccaaaaggtgcttgtaaaggcaaggagaaagcttatctgtgaaaaactgaagcactttcacaagaaatatacacagatggacagaatggagattcgaatggccagaatggcaagaaaagctggcaacctctatatacctgcagaatccaaactggcatttgtcatcaggatcagaagttccaatggtgtgcacacaaaggtgttctgaaaggtattattgcagcttcttcacctttgtcggatcttcagtggaacctttgtgaagctcaacaagccttcagttaacatactgaggcttgtagagccacatattgcatcagggtacccaaacctgaagtcagtaaatgagctaatctacaacagtggttatggcaaagtcaataaattaatcgccttgacagataacactttgctcaatctcttggcaaatatggcatcatctgcttggaggatctgattcatgagatctatactgttggaaaacacttcaaagaagcaaataacttcctgtggccctccaaattatcctctccatgaggaggaatgaagaaaagaccactcattttgtagaaggtggagatgctggcaacagagaagaccagatcaacaggcctattatgggaatgaactaaggtgtctaccatgattatttttataatctaatccattagtaaacagtaactgttttcaaattgaaaaaagtaaaatgataataatataacagcacatatcaaatacttattctctgttagaactgattatttcacaccttttctcctgtagcctcactgttcttcagaaactttatggattataaaaaccatgaactctctaaactctaaaagaaaggcatcatggatatgagcaattactctgatttccgcaaataaaattgtttcatttagcttccaattgcctctgctaatgagagaacgtaaaattgtggataatcaaaagtcattgatatgtgtttggagaccttgttgtatgatgagttcagcagtaaattttccttgctaatttcattttgcctccagtggcaaaaaaaaaaaaaaatgagtttggattgtctgagcatatgttaactgggtgatgaaaaagataattattgtgctggacatgaacagaaatcattttattttttaattttattttattttagattcagaggggatgtgcaggttttgacatgggaatattgcatgatgctgagatttagactctagagattccatcgcccaagtagcgaacacaggtagtcttttggaatccccagtgtctattacttccatctttgtatccatgtatacccaatgtttagctcccacttataagtaagaacatacagtatctggttttctagaaaccatttttaaatgtccttaaaatttacttagtgtaatctacaaggcagataacccacaagcagataattgaggggtgaatgtcaactgaatataagaaaatgtttgttctattgcattattatgattttaaacagagcattataattttttattttgcaataattaaaagcaatcttacctactttagttggtgggattttcattaagtgtaaaattttatatcacttgaatattctcatgtttcaattgccatcttaaaatagcacaaataatggctgaaacattattcattctattcataagttaatgctgcttaaattctgtcagtaaaatgtattaaaaattctttatgcattttttcatcccttacattcttagctatgcaggggttaaaggtcatgcagaatacttcaaggtattgtttgggtattttcaggggaaaaaaaaggttacctaaactgagtgaagtaaccaacttttacaaggctcttctcatctcattacaactggtggttgtacacattgaaatattgttgtatggggcagttttccaagttgtatgaaaagccttgaaatatttagcattttactctattacaatttgagaaattatattaaaaaataaagaaacaaaacgatatatgtcattgcagcactatttattacaggtggaaaaattctaaatttctaataataatggcatatctgtgactttaaaaataatatttcaaagattatttcatagccaaacaagctaattataatataattgtttttaagtcttaaaaaaggcagggaattatcccagatatctgtatgagtgtgtatgcgagttgggggaactctggaagaaaatctgccagtgattactggggttatgccatatagatgatttttacttctcattttcaacctgccaaatcataatgagtttctgtaataaatctgtataacttttatcagaacaaattctgttttcataactagatcctagttcccagagcaggcagattaggtaaacagccctctttacaagatggtttctaaaaagaggcttgaacacagaagcacgttctaccactgctgtttctagttagctagttctttattacagttgtatttcacagcttagtctataatatagaaattctctagcaaggttggatacctccttactatttagtaggaggatttactttcctggggggtaaaaactgtatcttcattctaccctccaccttctccttttaaatccttggcttttaactccactgtaggttctatgctccttgtctggaagctggaagacctattaggaggctgttgcaatagtctgagcaagaaataatgagccagaacaaaggcagtggctgtgtgtgtgtgtgtgtgtgtgtgtgtgtgtgtctgtgtgtgtgtctgtgtgtgtagctgagtgggaaattcagtaagtctgaggctgacagggaacgcaggagaggggatctctccccactgctgtgctgattacagctataccccgctccataaccttgcagccaccaactctcataaaatctaccaatcagacctaaaagagatagagcactgtaaccacaaatgtcctggccatcagcatagagactttccaaaagacccgccccaaatacatatgttctgtagggtcttagctcaccctaacttaacatttgcttcattttaatagtaaaaatcacagcccaggaaggagatttaagatactaatgagacataggacatataaagaagcatgacaagagaccgcacaggtgcagccaacagaccactgcaaacatgcaataatgttacctggaagagagcttagaaagaatacaagttcaagctaacccactttcaggcagccaacagcagatctctttctgctgtagtttccctttctgctccaggtgaaagccgcaataaactgccttgctgaagcccatcttagactctccatcagtttctattttctgagggtagagaaccgactggccagtcacaagtccacacggcccatgtgtattctctgcctagaataagtctccttcacctctggttgaccagatccttctatccttcaagttcccattcaaacatctccttctccacaaaacccttctatacccacagctggaagtaattttccctcctttgatttttatgtttttacctttttcatgtatgtatatatttttttattttgaaacaatcaaaattgcaatacagagaacttttttaaaccacttgagagtaaattgccagcctaatgctccatcacagctgaatacttttgtgtgtatttcctgcaagaaatgagacattctttacataactacagtacaaacttcaaaatcagaaaattaatattgaaatattaatgccatctgttcctcagtccagtaatgttctttatagcaaaagaatcctgttcagaatcaagtgttgcatttaattatcatctctttaatctcattcaatctggaatggggtctcagtcttaaatttcatgaccttgacaatttagaaaatacagactaacagagtactcatcaatttgggttttctagtgtctcctcatgactagatccagtttatgcaccttcagtagaaatatcacagaagtgatgatttgttcttattaaatggtgcatgattgcaatttgttctattattagttatgctcactttgattgcttgattaagatgatttcttccagtcttctcaactttgaagttattcttttcccctgggtaattaatgatattttgtagagatatattttgaaacttttaacttattcattcacttatcttttgtcagtatggactcactgtttattttattctataagctctaatccattactatcattatttatttttaacctgaaattgacaagatttggccagcagaaaccccttcaaagtggttcctgtgtactttgatacatcctcaccattctttgagcatttctttgctttatgttacaagatgttccaagatcattcgcattttctcttcccccaacctggactcatccatagttctacaaggactcctggttccctgaagaatggtatttagaaaccaaggtctgagtcctaggagtttttattgcatttggggtggtactgctccgaagactgctcagtgcacaaaacttaaaatcatgggaatgtatggaagtgcacacatgtataaatccacacgtttacatcaatagttattatctacctgtagatactgaaaatcatgagttcacactcaaaggttccaactccattgagtttattccagctttctccctttccatatatgcaattcctatttccaatagtgaaaaacctggctcccattatccttaacatagttacttacttaaacacttccatatatgtctcccatctttggaactatcaacttctcacataaatatcctccttattccactcaggtcatgattgcacatggacatcctctcctgtatgttcagtctctgaaacccatgttcaagtcactctcccctaccgctccatctatatattctcctaagcctgtgcattccctgaaaattccatgccaggccacccaccccctgtgatatccttgtcaccctgcttgggctctgttacccactttggactatcctatatgtgtaccctcctcactctaccaggatgcccgtacatggacatcctctcactctgattacaaataataaaattttttagttaaagaaaaaagagatactggtaggatttttagtctaggaacatcctaataccttaaggtccttggccaaaccttaatttattagcatacgtgaaacacactcatggaaaagtgattcctttccttcttttctgcctgtgagaccagaccagtcatcaatataatcattgtttaagggaaaaagtgtattagtttttttattaaatctcaccttctctctttctctctctctctctctctgagacacacacacacacacacacacacacacactctctctctctctcccattcctttaccatgaaagcttatttcactgttgctcaatcctctgtggatcaaaatcggcaaaggatactaaaagtactaatatttttcatggaaaacaccgcctattgtattctgttgctggaaagattcttccacaagactgatgacagaaacaaaggaaatacaaggaagaggttatggaaaacaggagggagagggatgagtaaataagaaaaagaaaaggtgggaatgaggaaagtagcaagaagggaaatggaaagaggtgatctgggagagaaaaaccacaggtgggatgctaaatgggagaaatgtgaaaagaaagtagtgggagtggcattcaggagagtctgacttagccaccaaatcccatggcaaagagtgccaactttattatcagccccaaagcagtgctactgtcaaaataaaaaataaagttacctactccaaaatcactgacatgtctaagcaagtaatggagaaactgttggttcatacactttttgagaaccaaacttctgaatttttgtctacatacttgtttcctgacatctttaaagaattgctgtttggagcatcagttttggacaccacacatcaacatctccaagatggtgaaagagttcttggttgaccaaaactttgttgaagaaaaatattgatatgtgtataaatggaacgcctgcactattagcatcacatctgattttgctgcttttataaagaaagaaactacacatttcatcacgtcaatgtgtctgactcaatcccctaccaacgatccagaaaaatgtcttgtctaatgctaggatcttgtcaaatccaggttatgaaatcattgcctttttatcactttgaattcaaaaacatactttaatatgaagttattctcttcgtattcttcattatagacctaagtttgctggatttccaaaaagtagtttttgaaacacaataaaacttaagggaaaattttgctccttttacagaaaaagaatatcacttcttagaacaatttttttaagatgctctattaactacctttattgtgacactttttaatactgtatgaaaacctcggtatggtgccaatttctttttttccctcttaacttttattataggtgtggggtatacatctgcaggtttgttacatgggtatgttacactcagggagtaagcttagtacccaacaggtagtttttcagcccatgcccccttccccctctccctcctctggtagttcacagtgtctgttgttcccacgtttgtgtccgtgggtactcagtgtttagcttccacttataagtgagaacatatggatttggttttatgttcctgcattaatttgcttaggattatggcccccagctccatccatgttgctacaaaggatattatttcattctttttatggttgcatagtattccctgtatatgtaacacattttctttacccaatccacaattgatgggcacctaaggatgattccatgtctttgttattgtgaatagtgaggaaatgaacatatgagtgcatgcatctttttggtatagtgatctattttcctttggttttatacctaataatgggattgctgggtctaatggtagctctaagttctctgagaaatctccaaactgccttccacagtggctgaactaatttacattcccaccaacagtgtgtaagcgttcccttttctccacagcctcaccagcatatgttgttttttgactttttaatataatagccattctgaatgaatggctgaaatggtgtctcagaatggtgagatggtatcatattgtgattatcatttcgatttgcatttctctgatgattagtgatgtggagcatttttccctatgtttgttggctgcttgtatcactccctttaagaagtgtctgttaatatcctttgcccattttttaatggggttatttgttttttgcttcttgatttgcttaaattcctttatcagatgcgtaatttacaaatattttttcccattctgtaggttgactgtttactctgttgatagtgtcttttactcacagaacaatttgatgaagatttattccatgattagtttaattagcagatcttttttgctgaagtaaatcattctatatgcttcctacagatgttattatagatactactgaaaatatcagtagggcacattagttactttcccaacattcatttcactttattccttcctaatgaaatcctgattttagtttgtacattatttcccccactcaccaaatgactgaggaaaacaaatctcattgccaaattgtccctccttagttgaaaccagtcagcacatgacactgttctggctactgttatataggtagaggagaaattacatggcctgcatcggtccaatcatagttaggggaagaactctcttttacaatgttaagaacatacgttacatcagattctcctggtaggtgacttgtaaccataggagaaccagtctgaattccaggctgtctaatggagcagaaatatggaaagcatttatgtcttgataacattatggatcactgagtcaccaccctgaccaaagctgactctacttctggactctctgttatgtgagataataaatttctttactgtataatttgtcattgacttgggcttttgtacttgcagccagaaatatcctaattgatcaaatcaagtccaacctcctgtctgaaaactgaaattgcaagcagacatgcatgccaactttgaggtgctggtgaaagtgtttctgcaggttaggccttcacagcttccctgcagaaagaaatctgaaaacactgaatagttcccatgcaggtttcttctgctcagataattttaaagcttaaacatgacctcataatcctttccttcctggcatagagagaattggtaatgccagctttgcaaggtaacctcattgatttgaagaaaaaggaaatgatgctacacaaattaaacccaagagagtcttggagaattctgatgttctttgacagcaatgtacctttgagtcacgggttttagtaccagctgccatcaaaataaaaatgtcaaaatcaattgagtgtccaagataattttcacattgctatgtcagtctctttttcaagtttaacatcagatggcttaatttgtacagagttaatgtttactcttaggattttattttgatttttttgcacagtttagattcatcttgattatttcctgaaaatcaccactaaatttacatggcttttcccatgaagaaaatattctttgaacaaaatcaacttccagttcaataggagaaaccataatcatatgcaaatttgttatgtatgtgtatatacttttctgaaaaggggaattatattttcatctgattcacaaaggagtccatgactcaaaaactatttctgaaggccaaatagtaactatagatggtcagagaaattaccgtgaaagaggaaaagagaagaaatgaaataagacgtattttttaagttttggcctggttgagaggacagatataaggtgactgcctcttggatatggcaaagtggtggtatatatatttgagtctattacagtatagttggaaaacataacaagtaaataagaagtccctggagactttaagacatgtaatgacaatatattgctgtgtgggtacaaattaggtgcatgcctggatcaatcaaagtacttgtaggaaacttaagacacaatccaaaaaaaaggtaattgaagagattttaatgaaagtactatttacaaaagagtaaaagatgggattaagggaagccacagggatggtgaaagagcctaggattgacaacaggagaagccattaccgcttctatgccgaagctagcctattgagagtcatggtggtagaaggatgcctgacaggagctatgatcataggtggaaggttacagaaacggtccacctgcagcaccacaggaaaggagccccggaaataaataccccattctcactctctccccataatctgaccgcctgccaaagcctctcactgaccaaatccaaacaagagctgagggggtggaagctggattatcttagctgacaagatcagtcctttagaatcaaaacagggtcggccaggcgcggtggctcacgcctgtaatcccagcactttgggaggccgaggcgggcggatcatgaggtcatgagatggagaccatcctggctaacagggtgaaaccctgtctctactaaaaatagaaaaaaatagccgggcatggtggcgggcgcctgtagtcccagctactcgggaggctgaggcaggagaatggtgtgaacccgggaggcggagcttgcagtgagccaagatcgagccactgcactccagcctgggcaacagagcgagactctgtctcaaaaaaaaaaaaaagaaaaaaagagaagaatcaaaacagggtcatggatgaagagggacgtgacaaggcaaacaggcaccacccaactcagacacggcccatataacagtacaggagggactctcaataagaaatagagatatttagttccacagtagctctgatacacatttttggcaaagatgtgtatttcagaatcctttccgtttagttaatgctagtttttagtcatcatactctatgttgacaactttacggatataaacaaatacttattttataatcattaagtttctgatagtaaagctaatttttcccctcaggcaaaaatattcttctagtttcatagctttggcagtactttattcctcttaaagagtaaagtgtttatgtaaactggaaacaattgttttgattccatctccaaattatactaattcctatgagattcacagttcccttttgagttgttatgaacctaaactgtgtccaggagtatgtgtgggtgggtgtgtataatgtactgaactgatcaattgacagtccgtgtgtacatgcacctggaaggccaccactagctcatcatgtctgtgtcttttcagggatggactgcataggttgtctggtgcagtggaaagagttctgaagacactggtcatgatctgtcttttcactaagcagctgtaggtcttttggcaagtccctcacccctccaactactcttcaaaggagtaatgggttgaggcaacagaggctcagatatccaccgactttaagttctgtggttcccatgcctgtgcctgatcagcatagctaatgggaacatccactttgctgcttactgactgctctggtttgaaaagagctttgttttaaacttatctagagtgctaactactctactttaaattaaatattagataaggaaagcaacagatgacattaaaatacaacaaatcctcagtgactttctgtgggtctaagagttacagcctcacatgaaccttaggatttccgtgaattgcataaattatgcttaccatttcgcaggtaaatatttacatgtccaagtaatgactccacaaagctgtgagaaaggaagaagataattcatgccctagaatagatctgtacattgtaattcaggtccactggagaaactctatttactatcatcttcaatgtcctggaatggaggaaggagctatggagccactgctgaggccaaggtattccatgccagctgtcacatgggtatttgtacaacattcttgcatcatacaaataaataattagctacgtatttaatacctactgcacactgtgtattacatatattgtttaattctcataactgtcctttgatattatctccaatttactggtctcaaagaaatcaagtaaattaaccaaagacactacctaggaagggaaagagtcaggatttcaacctaagattctaaagctgatgcctctatccttgttaccctagtgtctccagcaactctggccagacatattcactatctctcaaacacttccattggtttttcacagaaaatgaagctgttcacttaactttgatttctcccttgagtgatgtatctgaacccttagccctccacatgtgcctctagcaatatctactattccctggagaataagaaccaggtgggctgggcctggcctcaattgccagtattctccagctccatagcagggcaagcaacacatccatgtgacctgtctttacgcactagaacttctatctcttgtctttcttctaaattatagaccatattttcctgtaggcatctacctcctcttcccttccaccataattacccaattatctaaacaccctactccctacttcaactgtctctagagaacattcaccttctaaatgtgctttagataattttatacctttactgggctttgagaatttttttaaggggaggcactgccctaacccactctccttttgtcttaggttgggtttcttggaaatagattctaagatggagaattgtgtgcagaattttggttgtgatgtgctctcaggcgatacacctgcaaggaagtgacagaagaatgcctgaggaggagtgagaatccaggaatgggtcagccctgaagaggggtctggggcaggcactgtggtgtgcactgtacctgctcagattggtgggcctgacttgtgtcttcagcttaaattacctattcctcttccagacaaaagatctttaaggtcctaaacaccagtctggaatctgactatgcaaaaatgaaaagatcctgagctccctctccagaggaactaagtgaaacaaagaacgattataaagtaggaaagttctaaaaatagtaagatgagactgggtaatttgaatgaaagccagtcaagtctatgtggaatatagcatcttactgattcattatcagcccatataatttaattacattctacttaccatgcaattttcacatcctaaaccatccagcgtgaagtctatgttatctgattaaagaaagaggaaagggagagaagggagtgagagaaaaagagagctcctgaagccatgcaaaagaggagcttccttaaggatggcagaatgcattgcaaattcagaaacatatttaacatataaaagaaataatgtaaatttatctcttgttttctataaataagccaggtttgattatcttaagctattaatacaaatattcttctctttgtctttcttaacttgagccatttacaatttgtaacacagagaatcatttttcagatctaacttaacatgtaactcttcattgtttcaactgaaattagcaaatcccagaaagaaaattcttccctaagaaatcatttcttcaaagtgattatttaagagttgctaagttagaaacatacatatcactatcactatcttctgatcatggtatcactatcttctgatcaaaatttaaagatattcatttgaagaacatttatacctcaagttctaggaaaaggaggttttagtgactgaaagatgttgaggaaaatgtgaagctcttaattaaaattattgagtcacgtgaatatactgaataaaatggtggttcccagaagctgggacaagtaatgagaaaggggaaatgacgaggggttggttaatgggtacaaaaatacagttagtagaaataacttctagagcttgataccacaatagggtgactatagttaataatttttattgtacgtttcaaaatagctagaagagaagatttggaatgtttccaacacaaagaaattataaatgttgaaggtgatggatatcccaatcacccagatttgatcattatacatcatatgcatgtatcaaaacatcacatgtaccccataaatatgtacaacttattcagatctttttttctatttataactgattgaataaacctattcattttactaaacaattagttttcaaaaataaccaatatataaaactgaagaaagtcaaagaccatatcctgaattacaaaaataatattttaaaatatatatactcctagaattatttgactttcacttaactaatactctttgtgatcaatccccctgattaaattcaaatttatgttaacctatatttacatttatttttggaggtactctagaaaagttttccaaactgcatcctagttgctgtggcctttggtttgatggctttcacttttgagttcaaacctcatttcccaaatacattctacaactaggcatatttatttagaactcaaaaggccaccatcttcagacttaagaaacaaaagcagcagtggtttcattatatttcatatatttcattatattttacctgtgtgtaaaatataatactgtcttcttgggcgaaaggtcatataattctactctcatgtggatgttttccacaaaatgaatacatagatttaaactgatcaatccacattctttcaattgacctctcttaaaaaccaaagcacagccatttgagcttcagtgcttagagcaactctttctggcctgtgtaaggaatttacccatgacttgggttttaatactgtactctaaccagcagcaagagagagccaccaacaagaaaaaacagggatgctgattttaagaacttaattacaagaatttatcagttagaataaccctaagtactgtaacaaataaaccctgaaatgtcagaggcttgacagagcagaaggttatttcttactcagataatggcccaactctggaactcctaattgggaggtagcttttctctacatggtgatttgggaaacagactccttgcctcttgtggtcccacagggtctcataatcttctgcattttgccagtggaagaagaaagcatggagaaacatcctgtttcttaaaaactgtggcccagaggtaacacacatcacttttgctcacatttcattgatgtgaaataatcataaaatcaaactaagatgcaaggtggtgggagggggagtgtgtagaaaatatacttaaacctaaactatgggacaaggagcacaagttttggtctacaactattcatcacaaccacaaacaccatcaagcaagaatttatcaacacctattttattctggatgctgtggtaataatcaaagacagcataggccaagtgacaataaagaactataatgtattcacgctgtcattcagcaaatgcttactaaacatctaccggctggcacttgctgggccgtaaactaaggaaatgaagatggtgctctcaatcccatataggagacaggcctgagcagtgctgggttacctcaaagcaaatcaagtatatttttaggattccaatgtaggagcgccaaaactagagacagaaaaaaaaagaaagtttttgaaacaatttgatccctgatgtgtccttaaatagcattaaaatgttcatcaaaataaaggtaagaactttgtaggatttctttatacttatgattaacattttttaattatgtgtatagggaacatcaaaatatttttataatatcctagccctttaaggtatcaacttggtccagatatttaattaagtgtaaggaatgtcccaaaagacctcacaaatgggatggaatttgagtgccttagaaaaaaaagcaaggctcagataagcagaagatatgagggaaggtgttccaaatcaaaggaactaggatagcgctagtcagcagagacagcatcaggacaaccactatggctgtgaaagataaattaactgggtgatgggtcctcttaacagcccagcttcactcagatctgccttccctgttgaatgtgagcacctcaagggcaaggaccatggccatcctttagccccaattaccagtatctacccaggtttggagaactgaataaaattcaatgtgtgcatcaacttgcttcttttaaatgctgcaggatacattgcaacaaggtgaaatttttaaagcatatcttgactctggaaaccatatgttgtcaggtcaagatgggaggcatgcagtgctcttatctgtctcatatttgaatgcttctgacttttatcacagattaaatttactggaattcatttatttctatacatttctccttctgtcatcccctcttactttgtgtagtaaatatgagatatttttctccacagactcttcacctcagaaaactgtcattatctattctgtcagtcctaaacatctggagaattggcaaaactattagttcaaaatttatgatggcattcttcacattttacagaacaaattctggtaatgtttactatttccaatatctggaggactgttatttactatatatgctttttttcacaggagaaaagtttatatcactaccttgctatgcttcttagaaacatttttaaagtattatatagggtcacaattctatcagtgtttttgtaagagcttgaattcatactcatggtgtttgaaagaatttgtttttctctaggcagagctaagattgaaattagatttcacgaagatgacagttttcaagacatttgaaggcagtctttttaaattctaggaaaataaaatatcttagttctgacattcagatatcaatgtaggctagttgctagtgagtgagcactaatcagtcgtaactttcttctgctgaatctgaacaccacctccaaatactcagcccagcactccatcagtaagcacccatgagttgaagtttatatgaggtgagactattcgcatttcccattatatctgaagtacctcacttgtagcagttaagaaaaataaatataatcctataatatttacagagatattagtaccctatcaaattctgcttagtgctactaatccccatagaccctttcaacactttgttaagaaatagtgaaatttgattaaccctattctagaagggattgtagttaatgagagcttagcaactaagaaagttcacggggggtaagaagaaacatagcaaagtccccttggcctctttcataaccatactattgaggaaggaaaaagaaaaggaggcaaaaattgacaaagtaaatattggaaacttggaagtcagaaaatatgtttatacaaagggaaagcaaaacacatttactgttgaggcaagacaaccaaatacaaagtaaataaacacatatagaacaaatatggcaaatatatagaatgcatgctccccaacccctttccacagccatggcaaataccaattatcaattcacagcaattctcatgctgagcccatgtgcaatcttagcccaacacagtgtcagtataatcactgaaacatgagatgagataaggcttagttgtcattcccagtcttgcatctgttgctaaagctttcttaggttttttactatactgtatataaaaagctagggctctccaaggcacacaagtcttaaaacttgccacaagttagcagtgaggcagataagctgatctcatccaacctcccttcaatagcaaaggaaaaagaaaactaacttatatttctctaatgctccgtaatgtataaggagctttatcagcactacccaacagaattttgagcaataatagaaacatatatatatatatatgttcaatccaatatggcagccactaatcacatgtgcctattgagcatttgaaaattagcactagtataactgaggaactgatttttactataattaagtttaactggccatgtgtcttagtcattttgtgctgctacaacaaaatagcaagatgggtaatttataaagaacagaaatttattttctcatagttctggagcctgagaattccaaaatcaagacattagcaggtttggttgtctggtgagagctacatcctccacagggtaagaatacagtgtcctcacatggcagaaggcagagaggcaagctcaccaaatgtgtgaaaccttttataagggtcttaatctcattcatgaaggaggagccttcacggccctatcacctcttaaaggctccaccttttagtactaacacattggcaacacctgactttcggagaggacatagttaaaccatagcactatatatggctgctatattgaatagcacaggtatccatattatctaatttgatcttcacaataactttgtcaagtaggtcatctccattaaaaagagaaggtaaagagacacagaaatattgacttgccaacattacaaagctagagagtgaccaaatgtatacttgaatctcattctttcagaatctaagttatcagacccttctttggtaccacatcaaacttgaggtaggtatggatcaaaagaggaccatgccctgaaactagtggttctatgcagcccactatgagtttaccacgggaagtacactgcaaagaactaactctgaaaatctgagattttaccctatttgtaagctaacaaattagcatgccaatttcatgaaagccagcagaacacagaagactcctggatcagagtaaaaggactttattactcacagtaatagcagtagacagggtatgaacattttcttacagcaacttcccaagcccgaattcccacagaatgatggatgcagagggccggatgactcttgtgcatgcagtgggttgcattacagtttgcaaacttaccttagaaaacctaaatcatttatagtaggcagaaagcatgcctactccttattccaaagcggagtattatctttatcataataaacagtaagcatgactccctttctctatatctatcctccaaggatgctgtctatacaagcatccttgaaatgataacctgaaatgaaggaagtcccaaaacatgcataaatgtgagaaaccacacaccacttcttctcctgtttggtgaaaaactattttctcctgttttgtcaccaaagagtagaaaataagccaagaaaagagaaagatgactaaatatcaacataagagccaagttgaggtgtaagtgtgtatgtttgatagaaagactacgtgttcaaagttaaaaccaggaattaatgttaagccaggaaattaaagtgaaagtaaatttgggaaataatagtgccatataagtgtgatgaatcactgacatttttattgggcattaacaacacgtttttaaatataatttcccccaaactagaggctacttctttcttggaactgaatgataaatacatgcacataccccttacccaaggcagccatctgttctaagggatcctccaggttactgtccctaccccgacaccacactgcctcccagatgtccttctccctgaagccagccccagatcttctctccccaagcagctctcctttttgcctgtcttcctgagtaccggtccccaaatcaccaaattctaccttgaacatattgaatgaaagtgtgcagtgccttatgccctgatgagaagtggtcttggaagatgttttctgcaccaacttaagaagctatcacaaaatcatgataaaaaaaatgatgagctatttatactttgcagacataggtggttgttggaagaaaagagtgccttaggaatcaaataactggtattggaggattcctgtgactttgtaaaattcaattaaatatccaggggaaaataatagacaacattgtcacctgaggatacattattggtccttgttgaaaaagcagtagtttctaaccagttccttcctaacctatttgccattaatttctggaagttacaaactgtaataacaattaccataacactgactgtagcataaaaaccataggatgttagccccaaaagatggtcagaaataatgaggtgctaattttacagatagggaaacagagacctgaagcaaggagtgtctttttcagagtcacacaaccaatcattaatgtatctaagacacatttgcaggaggattctgttcttcactcctccatttttatacaacatactatctcttgcttttcaacctacagtaagttgagccaaaaaaaaaagatacctacaaatctccttcttgaacatgccctttgaggtggctggaacagtatcaagtggtctgagatagcaatgcactaggtggaagcttagatagatggcactaagtggaagcctagtaggaaacctcagccctgcaggcagcttccatgtgtattcccttgggtctgccacaaaagcatgttgcactacaaaagattcaaaaggcaaatgtgtgcacagcacaggagggagcccagttcttctctgaggagtttcctacttcagtggtgttattaagctgggtcaaaagaaagtcatttcatttttttaaaatatgctaatacaacctcaagcaccagctagcttaaatgataggcatttcataaagttcatttttattattctcagctgaaaagtaaataacaccctacaggtgtccttcatataaaaatgatgtatttgccttcaatggagactctgtattgactaaaaccttatctgtatttcacaagacagatcatttttccccatcacctttcaaagaggtgttgttgccagtctatacaggacaaacgaaaacagtctaataaaagaaatggttcagcaggaactaactgaaagagttcccagtgaccaaaactggaacaacttgagcaataaaataaataacctagtattggattataacccaaagaataaaataaatagccatgagttcatacttatataaataaacataaataggcatcaatagtgtatttataaaataatttccccagaactaaaggctactgcccccttgggactgaatcataaatatatgcacagtaaatatcaatataaataaatgactgaacaaataaagtaggggagaagagataaatcttcctttcagaattccatataatgtatgttcatattctccctctccaaaaggcagagcttaattcctcagttttggaggtagactagacttagtgattcacttcttaaaaaatagagcagggaaagggaaaaatagtaactttatagtggagaatcatggcaaatgctaccttaaccaaatgatgacagttaacaccaccagtaatgtcaagtgaatatcatgttctctaatatgatctaatgagaagggcttgacttctgagatactcttcaccaaaacttataaccccagtctaaacatgagggaaaacatcagataaactgagatcagggggacatttttttctacagaatacctggccagtattccttaagacagtcagtcatgagaaacaagcaaagattagaaagtcacagaccagaagagactggggagataagaaaaattaaatacaatgtggtgtcctgaattggaacagaaagaagacattaatgcaaaaactattaaatccaaataaaatctgaagtttagttaatagtaacgagccaatgtctttttcttaattttgaaaaatgtaccatggtaatacaagaagttaacaatgggtaaaactgaatgaggggtatatatgaactctctgtactttctttacagctcttctataaatataaatttctaccaaaataaaaagtttatttcttaaaatagatggtgcaaatgtatcttattgcatgctcttccctggagcatggtagagttttatagtgaatgcattgccaaatccaaggaagacagaagacttgagaaaactaaatactttcagcagccaggggtggagtggtgacaacaagctgtagaataaaaggaaaagtgatgtttgttcagtgaagaacaaactaagtcttatttgtgtagtggtctcagaagcagaatatgttctaaacaaagagttaaggaaggtaaaagctcaaaccaacaagtaaaccagatttcacagaaacacaaatgtgtagcggctgtccaataatgattatgtttaatagtagaatagactccagttgcaaacatatgttttatacaaactcttcaaattggagacatttctctaaattttccttgtaaattgtgcaggatattacatctgactttcatattatcatctcaaaagtggtgaaaccattttgccaatcacttgcatcacctttctgccaccctgccttctaaattacttccttttcccactcaggccatcctctactttcaattccaaaggtttcagttcctacccaaactgtccccctctacccatcccacttacaacccttagtctcattagaaaaatctcaaccacccgcttgcctttaacacctttttctggatttgccttctaaacaataatcccttcgaaatgactttgtgaatgaatgcaactgatttaaagggtaaagagaaatgtatctgctttctacaaaagctttatgtagatagggaaaattacttgtataacttgccctttttctcctcatctttctatagaaacatagagttgtgtttccaaaaattccaaggaaggcctgggcatagcttgtaatacatgtggtatggaggttattaaaaacagtttttcaattcaagttctcaagcctactatgaatgtttaccaaagaacgacgtgaactggactgacaaatgcattatactttggtcaatatatattaggttcacattttgttttatcaccttgatggctgaagaataaatttaaaagggatggactaaacattcaaagacgcaaacacgagtaaatacttcagagttcaatatgtagataacaaatccatcagcatataaacatgttcagcaaacaacagactgaacaaatgtttattgagtatctcttaggtgtcaggaaatgtgcaagcactttggcaaatgctgtcccatttaattctctctataaatgtgtaaggtaggtataattatcctcatttttcaaattgtaaaaccaagcttccaaagattaagtaacttacccaaggagaattgatgtgttacttaagtaatattagttccaaaatatcagtggcttaacacaataaaatattgaaatgtttctcactcatatcaccattcaatgcaagtcagtggtgggtgtggctaagaatattctatcccactcgtccattcagggacccaaaatactttcatcccatgtctctgccctcccctaggtccccagagacctctccatccaatagctagatggagattaagagcacattaaaggtttttttgtgcaagacctggaagtagcacataccacttatgctcaaagttcattctccaaaagaagaaccagaaaaggaacagccaagcaagaagaaaactttcagacaatgggtaaaactgggtgacagtatataagaactctctgtactatctttacacttttctataaatataaaattttaccaaaataaaaagtttatttaaaaaaaaaaagatggtataaatgtatctcattgcaagctcctgcctggagaatggtggggttttataaccaatgcattgtgaaatccaaggaggacagttaaagaaaccttgggaaaactaaatgccttcagcagccaggtgtggagtggtgacaacaggctgcagaatgagaggaaaaacgatgtttgctcttcacagagcaagtgaactattattcgtgtaggagtctgagaagcagaatatgttctaaattttactaactgtagccactatatttctaccaagcactacccaaaaaaaaaaaaaaagtgactctatctcctcccctgccagaaaaggccaaatttgctttccttctaccactgcatggcagcaatcatccagcactcctcttctctccctggagcaacgtcagaggaagactgctacaacagaagattcaaagaagatccagagtctcataatataatacccaaaatgtccaggttgtaataaaaagtcagtcatcatatcaaagaccaggaaaatttaacttaaatgagaaaaaaaaaatctgcagacgaaaaggatttttgaagcccatagcaaaaacatctcagtgaagaattatgagcacacttgaaacaaataaaataacagaaaatcttgtcaaagaaatagaagacataaagaagaaccaagttgacattttacaatggaaaaaaatacaataactgaaattaaagagctcagtttatggactcaagagcagcatggaaaacagaggaaaagatcggtgaacttaaagatagaaaaatggaaattacctaatctaatgacagaaataaaataaacagaagaaaatcaacagagtattggggacttgtgagatgtaacagaagatctaacatccatgtcagtggagtctcataagggagaaagaagacggggctgaaaaagtattttttaaaataatggctaaaaatgtcccattttggcaaaagatagagaaaaagattcaaagagttgagcaaaccacaaatataataagtcaaaaaaatcacaccagacatatcgcagttaaatttctgaaaattaaagacaaacaaaaaatcttgcagctgtgaaagagaaatgacaccatacctatcaggagaaaaaaaaattgaatgacaaggtttttcagcagaaaccatggagaccagaaaatcctggcacaacatttttcaagtgctcacagaaaagaactgtcaacccagaattctacatgcaaagaaaatatccttcactaatgaaggattcaatacagtcttaggtgaagggaaactaagggaatttgcctgaagatctacactaaaagaatagctaaagaaagttctctagacagaaatgataaggagaaatcttagaccatcaggaaaaaaggaaaaaaacagaaagagtgaaaatatgaatcaatgaaatatgctttcattttcctcttgttttctaaattatgtttgatagttaaagcaaaattgtaacagtctgatgtggttctcagtggatgtagaggaaatatttaagataattttattataaatggaaagagggtaaaattatataaaggaagtaaggtttctatactgcacttgaactggaaactggtaacaccaacagatgggataagttgtgtatatatcatataatatctagagcaactactaaaagagctctacaaagaggtaaatccaaaaacactaaaagtaaattatgatgaattccctttaaaatgtccccaagtaacccacaggagctgagagaaataaacagaaaaacataaacagtgaaaacaaatgaaaaccaaaaaataaaatggcatacttaaggattaacatatcaataattacattgaattttaaaaggtctacataccgacccggagccgtggctcacacctataatcccagcactttgggaggccgaggcaggaggatcacttgagctcaagactttgagaccagtctgggcaacatagcaagacctcatctctataatataataaataaataaataaataaataaataaataaaggtctacatacgaatgaaagacaaagattggaagagtggattaagagaacatgacccggccagacacagtggctcaagcctgtaatcccagcactttgggaggtcgaggtgggcggatcacctgaggtcaggagttcaagaccagcctggccaatatggtgaaaccccatctttactaaaaatacaaaaattagccaggcgtggtgacaggcacctgtaatcccagctactcggaaggctgaggcagaagaaacgcttgaacctgggaggcggaggttgcagtgagccaagatcacaccactgcactccagcctgggtgacagagtgagactccatctcaaaaaaaaaaaaaaaaaaaaaagaaaaaaaaaaaaaaaagaaaacatgacccaactatatgctgtctgcaaaaaactctaaatgtaactaggtaggttgaaagtaaaagagtagaaaaagatatgccatgaaaagattaatcaaaggcagtaggagtgtctatattaatatcagataaaatggacttcagagtaaagaaaattaccacagaaagagaatgacattacataatgataaaaagctcactccaccaagaagacatagcaattctaaatgttcataaacaaaatagcacctgcaaaatacgtgaagcaaaatttaacagaactgcaaagagaaactggcaaatccacaactagaactggagacttccataccccactcaaaaactgacagaacaaaatgacagaaaatcaaaaggagtataaaggaaaccaaaaataccatcaaccaacaagatctaatcaatatttataaaacacttcaaacaacagcagaataatcattcttttcaaggccccatgataaaccttatcttggaccataaaatagacctcagaaaactcaaaagaactaaattaacacaaagtatgtcctctgaccacaatggaacccaactagaaatcaacaacagaagtataacaggaaaatctctaaacagaaactaaacaacacacttctaaataattaatatgccaaagaagcaactcaggagaaatctttaaatactttaaatttttatagagaaaatcaatgaaaggttgtttttctttaaaagatcaataaaattgacaaaccttataactgacatagaaaaataaaagattgttattttgttatcaaattattgatatcagtaatatcagtaaaatgttatcaaattattggtatcagtaatgaatcagggaatatcattacaggcctgcaaatatgaaagagataagagaatactaaggacaattctgtacatgtaaatataacaacttaaatgaaattgatcaatacctcaaaaagcgtgaactattacaattcacccaaacagtttaaataggcctataactactaagaaaattgtattaataatcttaaaactcctgaaaaagtaatctccaggcctagattgtttctctagagaattctatcaaaagattaaagaattaacaccagttacacaatctcttgcagaaaatagaaaaggaacactttccaactcattttatgaagccggtataccaagcaaaggcagtaaaaaaaaagttagagatcaatatcttccatgaatatagacattcaagtccttaacaaaatattatcaaaagaattcagcaatatataaaaagaattatacagcacaaacaagcgagatttattctagaaatgcaaggctgtataatccaccagattaacaagctatagaagaaaaatcacatgatgatatcaatcaacacagaaaaattatttgacaaattttaacattcattcattataaaaaagattcacataaaagtagtagtagaggaatacttccttaacttgataaagaacattgacatgaaacctaaagttaacatgattcttaatagagaataactaaatgctttctctctaagatagggaataagataaaaatgtctgctcttactactaatattcaacatagtactggtagatctaaccgctaaaataagacgagaataaaaaagagaagacatacatatgagaaagaagaaataaaaatgttcatatttcaaatgacataatcatttatgaagaaaatttcaaataatctacaaaaaaactcatatctaataagttagttcagcaaggtagcataatacaagatcaatacccaaaataaaagatatttttatatcctaaaaatatatatgtgaaaaccgaaatttcaaacacaatgccatttgcaattattctaaaataaaataaaatacttaggtgtaaatctaacataacatatgcaggacttgtatgctaaaaattacaaaatgctaatgaaatgaatcaaaaaaggcttggacaaatagaaaataagttaaaagatggtagacttaaaccaaagcataccaataattacactaagtgtaaataatgtaaacatcccaattaacaagcagaggatgtcagactggataaaaatgcgagattcaattacaggctatctataagaaacctacttaatataaagatataaataggttagaaataaaaggattaaaaaaggcatgtcatgcaaacattaatcaaaagaaagttggaatggctatattaatattatacaaactaaacatcagaacagagaatattatcagggataaatggagatttacataatgttataagaactattcatcaaaaaaaatcttaaatgtgtatgtatatatctaatgacagaacttcaaaatacatgactcaaaaattgacagaactaaagggagaaattgacatacccacaattatagttggagattttaacacaatttcctcaataattgacagaacaagctgacaaaacactgatagatgtatataagatttgaacaaaactatcaagcaaattatcttatagaacattgtgtggaacaatcacagaatacacattattttgaaacataagcataatatcaccaagatagactacaagctgagccataaaataagtctcagcaaacttcaaaagattaaaatcatgcagaatatattctatgagcctgagtacaatagaactaaaaataagttttgaaagaatctataaaatctctaaaaattttaagttaataaatgccctcctaaatattgtgtaagtcaaataaggaatcatgaaattagaaaacatttcttactaacaacgaaaatacaacatactgaaatttgtaggatatagctaaaataacgcttagagcaaatggataattctaggtgcttatattgttactgacaaaatgttttaaactaattatcttagcttttacattaagagaccaggaaaagggtggtgaattaaaccaaagtaagtaaaaggaaggaaataataaatataaagactgaaaggaataaaataataggtaataatagaagaaattaagtcattcgaaagctggttctttaaaaagatcaataaaattgaaaaattattacttagactgatcaagaaaaaagaggaaaaaactgaaattaccaagattaagaatgaaagaaggaatattactatagatagtataggctaaaaggatatgaaaggaatattgttttgggggggttgtttttttgttttgttttcacttatttgtttattttcaaacagagtctcgccctgtcacccaggcgggagtgcagtagcgtgatctcagctcactacaacctctgcctcttgggttcaaacgattctcatacctcagcctcccgagtagctgggattacaggaacaggcaacaacgccaggctaattttttttatttttaagtagaaacggggattcgccatgttagtcagtctagtctccaattcctggcttcaagtgatctgcccacctcggcctcccaaagtgctggtattacaggcatgagccaccatgccgggccagttttggggtttttttgttttgtttttcaaaaataggttttaagatataccaaataaactatacagatatcctctaacaatacaaaaaaattaaaaatgaggttaaagtatatagcaaaagccaaatatgacaatacacatgaataatttataaaacaaggcttttaatcctaaataactaaaatggggagacctcactgagggctaacatacataaaatgaggactaatagcaaggaacaatcctaaacattttcccatgtgactgactaagccacaaaaagcaccttagaaaaactattagagtaatttttttctactcagttaccaccatcttttccttttcaccttttccctgattttctctaccaatggtttttctttggtttgatcagttgaacccaaaagatttggaacctaaaatgagtatcaactcttattggaatagcgcttgggaaatgcaatcctagaaaaggcaaatttttacctgaggtagcttgagaaagttcagcatccattctcagtgtgagagcatctcccatgttaatcactaggttaatagctgtgcttggctagattacatgaccctgcatgatactggagtgctccctggtgaggtgctactatctacacaaacacctgcccattaagccttcaataaatacaaagcaccattttaaaccatttcactagaataaatttttaaaatatatcatttcttctggcctaacttgcttcttcagatgggctggggtgctgctcatgacacggaagacataacagctaatgtgtggctatttcaagctctttagacttcagcacttcccacttatcaagcctcagtacttttttgcagcaataatggtattttccattaacattccctctgtcatgggaccaacacccccagtaacaggaatgatgtaactggcttttttcctgactccttaaaattccacatctccaaccaacttgagtttgccagttatgggaccttgacctctcttttttcccagatcaatgactgctgaaaaaggggtcaattcagctagaagataaaacaattgtaatataaaattatttttaaaaagaacttccaaaacctagagtaataaatcaatattcaagtacaagaagacgattaaacaccaagcaggtttaacccaaataagaccacctcaaaacatttaataatcaaactcccaaaggataaagatttttgaaaggactctaaaagcaggaagagaaaagaaacaacaaacaatggagctccaatatctccagcagcagacttttcagtggaaaccttagaggccaggagagagtggcatgacatatgtaaaatgctgaaagaaaataacttttatcctaaaatagtatatctagcaaaaatatccttcaaacatgaaagagaaataaagactttctcagacaaacaatagctgagggatttcatcaacaccagacctgtcctgcaagaaatgcaaaggaagttcttcaatctgaaagggggacattaatgagcaataataaatcatctgaatgtacaaaatgcactggaaatagtacacaaacaaacacaatattataaccctataattgtggtgtgtaaactattcatatcttgagtagaaagattaagagataatctatcagaaataataactacaacaactttgcaaaacagacagttaataagctatgaatagaaacaacaaaaagtttaaaagtagggggataaagctaacgtgtagcatttttattagttttctctttgcttattagtttattatttatgaaattagtctgttttaagttatcatcagcttaaaataatgggctgtaagggattatttgccagcctcatggtaaccaaaaatcaaaaaatatataacaaagacacaaaaaagaaaacacataaaattaaaacataccacctgaggaaatcacgtttgccaaaaggaagacagaaagaaaagaaggaaggaaaagaagaccagaaagcaacccaaaacaaatcaaaaaatggcaagagtaagtccttacttacggatagtaacactaaatgtaaatggactaaactctctactcaaaagacatagagtaggtgaacggatttaaaaaacaagacccaacaatctggtgcctacaagaaacacactttgttactgaaacaccagggcttctgtctaggtcctgctgcttgccacagagaaagtcaatcactgagaccatgagtattgccaaggaagaagattttaattgggtgctgcagccaaggagatgagagctcagtctcaaatccatctctctgactgactgaaactaggggtttatatagcaaggaagaaatgtaacaatgtgtaagaaagcaagaattagagaggggcaaggaagcaatcatgacaaatgaagcatctggcatcttattgtctggatgtagtgatctggtgagtttcagttctttaatactttttgtgagaggcctgaaggtcatttcctgaggaaggaactcagacaaaaataaatacaagtttcaagctttaagaccagaaggatcaatttttatgtctatcaaaaaagaactatctatgagactattgggtcagtttcaacttcatctataaggatgcatacacactgacaataaagggatggaaaaagatattcaatgccaatggaaaccaaaaaagatgaggagtcactatagttatatcagacaaaatagatttcaaaacagaaactataagaagagacaaagaaggtcattatataatgattaaaggggtcaattcagcaagaggatataacaattgtaaatatatatgcacccaacactggagtgtgttcggaatttattccttccggtaggttcttggtctccctgacttcaggaatgaagccatggaccttcacagtgagtgttacagttcttaaagatggtgtgtccggagtttgttacttcagatgttcagatgtgtctggagtttcttacttctggtgggttcgtggtcttgctgacttcaggagcgaagccatggacttggtggcgagtgttacagctcttaatggtggtgtggacccaaagagtgagcaacagcaagatttattgtgaagagcaaaagaacaaagtgtccacagtatggaaggggacccgaggaggttgccactgctggctcgggtggccagcttttattcccttatttgtccgcacccacatcctgctgactggtacattttacagagtgctgattggtccattttacagggtgctgattggtgtgtttacaatcctttagctagacacatagtgctgactggtgcatttttacagagtgctgatagtgctaattggtgtgtttacaatcctttagctagacacagagtgctgatcggtgcatttttacagagtgctgattggtgtgtttacaatcctttagctagacacagagtgctgattggtgggtttataatcctctagctaggcagaaaagttctccaagtacccacctgacccagaagcccagctggcttcacctctcaggagcacacagatatataaaacaaatattattacagctaaggagagagatagacctcaatacagtaatagctggagacttcaacaccccactttcagcattggacagatcatccagacagaaaatcaacaaagaaacatcagatttaatctgcactatagaccaaatggacctaatagatatttacagcacatttcctccaatggctgcagaatacgtattcttctcttcagcacatggatcattctcaaggatagaccatatgttagacaacaaaaaagccttaaaacattcaaaaaaattgaaatgatatcaaatatcttctctggctaaaatggaataaaaccacaaatcaataacaaaaggaattctaaagaccatacaaacacatggaaattaaacatgtttctgaatgaccagtgggccaatgaagggcctaagaaggaaattgaggccaggcacagtggctcaagcctgtaattctagcactttgggaggccaaggctggtggatcacctgaggtcaggagttcaagaccagactggccaacatggcaaaaccccatctctacttaaaaataaaaaaattagctggccatggtagcatgcacctgtagccccagctacttgagaggctaaggcaggagaattgcttgaacctgggatgcagaggttgcagtgagctgagactgcgccattgcactccagcctgggcaacagagagagactccatctcaaaaaaaaaaaaagaaaaaagaaagaaattgaaaagtttcttgaacaaatgaaaatagaaacacaacatatcaaaacctgtgggatacagcaaaaggttacaggaataagtgcctacaagaaaaaagtagaaaaacctcaaataaacaacctaataatatgtcttatacaactagaaaagcaaaagcaaaccaaactcaaaattattaggaaaaaaaggaaataataaagatcagagcagaaataagtgaaattgaaacaaaaaatacaaaaaaacaaagaaacaaacagttggttttttaaaaagattaacaaaatagacaaactattagtcaaactaagaaaagggagagaagatccaaataacatcagagatgaaaaaggagacattacaactgatgtcagagaaattcaaaagatcgttagaggctactgtgtgcaattatatgccaataaactggaaaacctagaagaaattgataaatccctaaccacatacaacctaccaagattgaaccaagcataaatccaaaacctgatcagactaataacaagtaatgagataaaacctgtaataaaaattctcccagcaaaggaaaatccaggatgtgatgacttcactgctcgattttaccaaacatttaaagaagaactaataccaattctagttaaactataccaaaatatagaggaggaggaaatacttccacatttattctgtgaagccagtattaccccccagacaaagatatcaaaaatagaagactacagaccaatatccctaatgaacattgatggaaaagtcctcagcaaaatactagcaagccacattcaagaacacaataaagattactcatcatgactaagtgggatttatccctgggatgctagaatggctcaacattatgcaaatcaatgaatagggtacattatgtcaacagaataaaggacaaaaaccatatggtcacttcagttgatgctgaaaagcacttgataaaattcaacatcccttcatgattgataaccctaaaaaaaatgggtatagaagtacatacctcaacacaataaaagccacatgacagacccacagctagtatcataatgagtggggaaaaactgaaagtctttcctctaagatcttgaacccaacaaggatacccactttcaccaatgttatttaacatagtgctggaagtcctagctagagcaatcagacaaaagaaagaaagaaagggcactcaaatcagaaaagaagtcacattatccttgtttatagataatatgatcttatatttggaataacctgaatactgcaccaaaaaactattagaactgatacacaaatacaatcaagtcaaggatacaaaatcaacaaataaaaatcagtagcatttctatatgccatcagtgaacaatcagaaaaagacattaagaaagtaattctattaacaattgctacaaataaaataaaatacctaggaataaacttaaccaaagaaataaaagatctctacagtgaaaactataaaacatgatgcaagacattgaagaggacacaaaaaagtgaaaagatattccatgtttatggattggaagaataaatattgttaaaatatccatactacacaaagcaatctatggctataaggcaatccctatcaaaataccaatgacattgtgcacagaaatggaaaaaataatcttaaaatttacatggaaccacaaaagacctagagtagtcaaagccattctgagcaataagaacaaaactggacgaataacattacttgatttcaagttatattacagaactatagtaaccaaaacagcatggtgctggcataaaaacagacacatagaccaatgaaacaaaatagaaaacccagaaataaatccgtacgtctaccatgaacttatttttgacaaaagtgctgagaacatacatgaggaaagaacaatatcttcaataaatgctgccgggagaactggcagcattccatatgcagaagaatgaaatagacccctatgtatcaccatatacaaaagtcaaatgaaagtggattaaagacttaaatctaagacctcaaactatgaaactacaacaagaaaacattggggaaactctccaagacattagtctggacaaagatttcttgagaaatactccacaagcacaggcaaccaaaagtgaacaaattggatcttgtcacattaaaaagcttcttcacagcaaaggaaacaatcaacaaagtgaagagataacccacagaatgggtgaaaatatttgcaaactactcatctgacaatagaataataaccagaatatataaggagctcaaacaactctattggaaaaaaatctaataatctgattttaaaacaggcaaaagatttgaatacacatttctcaaaagaagacataaaaatggtatatgaaaaggtcttcaatatcactgatcatcagataagtgcaaatcaaaactacaatgagatatcatcttacccaagttaaaatggcatttatccaaaagataggcaataacaaatgctggtgaagaattggagaaaatggaatccttgtacactgttggtgggaatgtaagttagtacaaccactatggagaacagtttggaggttcctcagaaaactgaaaatagaactattatatgattcagcaatccctctgctaagtatatactcaaaggaaagaaaatcaatatattgaagagacatctgcactcccatgtttattgcagcacaattatagctaagatttggaagcaacctaagtgttcatcaacaaatgaattgataaggaaaatgtggtagcaaagagataccatctcacaccagtcagaacagtgattattaaaaagtcaagaaacaacagatgctggcgaggatgtggagaaataggaatgcttttacactgttagtgggaatgtaaattactttaacattgtggaatatggtgtggcaattcctcaaagatcgagaagcagaaataccatttgacccagcaatcccattactgggtatatacccaaagcaatctaaattatcctattataaagatacatgcatgtgtatgttcactgcagcactattcacaacagcaaaaacatgaaatcaacccaaatccccatcaatgatacactggtaaagaaaacgtggtacatataaccatggaatactatgcagccataaaaaaggaatgagatcatgtcctttgcagggacatggatggagctggaagccattatcctcagcaaatgaacccaggaacagaaaaccaaacaccacatgctctcacttataagtggtagctgaacaatagaacacatggacacagggagagtaacaacacacactggggcctgcggggggagtggaaggaggcaggaagagcattagaaaaaaatagctaatgcttgcggagcttaataactaggtgatggcttgataggtgcagcaaatcaccatggcacacgtttacctatgtaacaaacctgcacatcctgcacatgtaccctggaacttaaaataaaaataaaaattaaaagaaaatgtagtgcatatgtacaatcaagtactgttcaaccataaaaaagaatgagatcctgtcattttcaacaacatgaatggaactggagatcattatgttaagtgaaataagccaggcacaggaagacaaacttcacacagtctcacttatttgtaggagctaaaatttaaaacaatgaattcatggaggtagagagtagaatgatggctaccagaggctgggaagggtagttgcagggggtggagagaatggggatggttaatgggtacaaaagtatagttagatagaaaaaataagatattgcatttgatatcacaacagggtgactatagtcaacaataatttattctaaattttaaaataacagagtacaattggactttttgtaacacaaagaaagaataaatgctgaggtattaaatactccattaccttgatgtgatgattacttgttgtatgcctgtatcaaaatatctcatataccccctaaatatatgcatctactatgtacccacaaaaaatttaaaatttttaaaaattaaactcttctggctgggcatggtggctcacacttgttatcccagcactgtgggaggccgaggtggtggatcacttgagctcaagagttcaaaaccagcctgggcaacacggtgaaaccctgtctctataataaatacaaaaattagccaaaggggtggcacatgtctgtggtcccagctgctcaaaaggctgaggcagaaggatcgcttgacactggaaggcggaggttgcagtgagccaagatcatgccactacactccagcctgtgtgaaagagtgagattctgtctcaaaaaaaaaattaaactcttctacttgtcaaaaagcaacattaaaaaatacaaaggcaaaccacagaatggaagaaatgttcacaaaacattgtgacaacaaaagacttgtatccagagtatataaacatctcctaaaactctatgcactgttttgagattataaaatggtaatgttttcttgttattatgaatataataaccttgtaataatcacatgtcatattccaatcacaatttaaataaataaaaaaagaaaaagagaataaagaatcccacgctgcagtatctcctctacatcctcccactgcttctactgaagatctaattgggaaacagagtatccacccttccttttccctggagaggcaaagaaaagtattttcaaagactgagaaagtaaatttaacaaacagaaagataaaattactaatatgagggcaagttgacattcctgaaataataaaaaaaagaagaaattggtacatggtacatattgaagacttctttaaataattggaagtaatttgggcaaaatgagaacaatcaaagaagagacgaaagaatatttatggtgaattaacaattattgaaaaccaatagattagctaaattggtgaaattaaaaatgaactgagcatgccatgtacatcaatgtccaaaagcagccattctctgtggggaaaggtgagtgttggctcttcctagagacaagaggtccttcataattaggttcacaggcactaattttagagtataaaatgcagcttgctgattaacacatgaaacagaattccaggctgaattattatttacatttaaaagcacctttttaaacctcttaaattaaaataaatgtatagtttattaaaatattataagatgatcacccctgcaaaccactacccagatcaagaagtataacttgacaaaacacagaagctgtgtctcaatcacaatcgtgtctcctcctctaaaaataaccactctccttatgtttaagcttccttgaaagttacatcactcaaatatatacccctgataatgatagttttggtttgcttgtttttatttttatgtgtcttttgagtcccttttagtctatacgccacacttctttttattttttttttttaatttatttttttattgataattcttgggtgtttctcacagagggggatttggcagggtcatgggacaatagtggagggaaggtcagcagataaacaagtgaacaaaggtctctggttttcctaggcagaggaccctgcggccttccgcagtgtttgtgtccctgattacttgagattagggattggtgatgactcttaacgagcatgctgccttcaagcatctgtttaacaaagcacatcttgcaccgcccttaatccgtttaaccctgagtggacacagcacatgtttcagagagcacagggttgggggcaaggtcacagatcaacaggatcccacggcagaggaatttttcttagtgcagaacaaaatgaaaagtctcccatgtctacttctctccacacagacacggcaaccatccgatttctcaatcttttccccacctttcccgcctttctattccacaaagccgccattgtcatcctggcccgttctcaatgagctgttgggcacacctcccagacggggtggtggccgggcagaggggctcctcacttcccagtaggggcggccgggcagaggcgcccctcacctcccggacggggcggctggccgggcggggggccgaccccccaacctccctcccggacagggcggctggccgggcagaggggctcctcacttcccagtaggggcggctggccgggcaggggggctgacctcccccacctccctcccggacggggcggctggccgggcggggggactgacccccccccacctccctcccggacggggcggctggccgggcggggggccgacctccccacctccctcccggacggggcggctggccgggcagaggggctcctcacttcccagtaggggcggccgggcagaggcgcccctcacctcccagacggggtggctggccgggcggagggctgacccccccacctccctcccggacggggtggctggccaggcggggggctgacccccccacctccctcccggacggggtggctggccgggctgaggggctcctcacttcccagtaggggcggccgggcagaggcgcccctcacctcccggacggggcggctggccgggcggggggccgacccccccacctccctcccggatggggtggctggccgggctgaggggctcctcacttctcagtaggggcggccgggcagaggtgcccctcacctcccggacggggcggctggccgggcgggggggctgaccccccccacctccctcccggacggggcggctggccgggcggggggctgacccccccatctccctcccggacggggtggctggccgggctgaggggctcctcacttcccagtaggggcgaccgggcagagacgctcctcacctcccagacggggtctcggccgggcagaggcgctcctcacatcccagatggggcggcggggcagaggcgctccccacatctcagacgatgggcggccgggcagagacgctcctcacttcctagatgtgatggcggctgggaagaggcgctcctcacttcctagatgggatggcggccgggcggagacgctcctcactttccagactgggcagccaggcagaggggctcctcacatcccagacgatgggcggccaggcagagacactcctcacttcccagacggggtggcggccgggcagaggctgcaatctcggcactttgggaggccaaggcaggcggctgctccttgccctcgggccccgcggggcccgtccgctcctccagccgctgcctcccgggcggcgctcgccggcctatacgccacacttcttatcgccctccttgtctgcaatttatttaagaaactgggtgatttaacccgtgaatttttttacagtttggattccaatgattgcataatcaaaaggtagtttaacatgtttcttgattctctgtggtttctttaaagtagttattggtctaagatgcttaaacttttaatacattgactttagacagcttcaactccatttgcaatagctactatgtgacctctgaatttttggtaggcaagaggtaaagcaattgcagcccagaacatcatgtggagccaggaaatgctgctaggagagagggtggctaagctgacagagttgagggcagttttcctggatcagtttagaggccatgtgcaaaacagaaaccttgcagcaggagggaatgacttatcaaagggaagtggtatctggaagtgtctaggaatggacagaagtcagtacttaacacaggttgactgggaaaatgctgggaagtaaatagagaaaggcaagtataccctgggttccttcaaagcagttcaggaaaatattctctaaatgatggtggttacatgcaacgtaaatgagttgatcaggaatgctccaggtccaccagcatgttaaacttttaatggttgagacgttatataatattttctggtaattcaaagtcttagcaaaactttgtggtaaggatatttgtcccatatttcagataactctaagaatgctaggaaaggggaatatgtcaacaagaaatgttacatgtatggctggatgctattttctattttttccctttccttcagtcaagcatgtggcctggtttatgcttccttacctcacagatatttcagaaagcggaagtatcagacagtaatccctatttatgttctcaaaagccaagcccataggagatttattaataaaagatttgtaaataagtaaaaaaggaaaagagagcttttaataggtggctgaaagggttagaaaaaaaaatgaaggaagaaaggaatttctccaatggtctacatacctttcccgcgcaaaatggaggaacagaaaagatcctgggggtctaagacttgggccagaagttctggaagtgccttgaagagtctataatattttaaaaagggatacatgcatggtgtggctagggacttaggggctaggcatggggttcccaaccttaggacatttcctaagcgtgttacggaagcagtctggggatctgaaagaactgtaggagtgggggacagtaaatatcttaccagggactttctctgtgcatgcaacatctgaaacccctctccccaaccaaacctcaatgccttggccctaaataatcctccagagacttgggggtgtggttggggttagagaaagtctcaagcatgagaagtgagaagcttagaagcagcaattaggttgacacatgttctcacttataaccgggagctaaatattgaataacacatgaacacaaagaagggagcaatagataccagagcctacatgagggtagagggtgagtggagggtgagatttgaaaaactaccttttgggtactatgcttattacctaggtggtgaaataagctgtacaccaaaccctgcaacacacagtttacccatgaaacaaatctgcacttgtaccctcaaaacctaaaataaaagttggaaagaaaaaaaagaaagaacaaaattaagttgacttatttttaataggcttttattacacatcagagtttgtgggatgaaatctgtctccattacccaatgcaaaaatcactgggaaaattagtataacaaatgaccgcaaacacttacatagtacttactatgtattaggcgttgttctcagcttctacgtgtattaacacatttgatcttcacactacttactttagagaaagatgtcattattcctgatttaaagaggaggaaattgaagcaggctaacgttaaagaacatgcttaggattacactgcagctgacaagtggcagggtcagcattcagagtccatgtgggtagtcaccactccaagctttctctccaaaaccgctgactcaggcacactttttaggttaaagtaaatcaggacttatgaagtgaaatgtcagttttctaatggaggaaccagatccaaaatataaaaccctctttaagataatttttaagatgagcaggtgccagctgactcctccttcttgataatgcttaggtgctttggaaactcttcctggatgagaaagagattcttgtccctcttcatctgctgcaaaggacaaagccccagaagaataatatgccaaagtcggccttaacatctatcatccctataacctcatctccctggtgctctgaccttcactgggatggtataaagcagaggctctagagtatccctggaaatgaggagcagcgtacactaaccagtttggtttagagtaattctctcctatttgtaatttttatgaaaaacaatttaaatatggccttggactcatgatattttttatgtcacaataaagtggaaatttaaagttacaaatccccaaaaaggtcctccatcaactcctcataggatgtatccatttttagctctgattattgcagttaactttccaaagtgctgggattacaggtgtgagccaccacgccagcatatttactgtgaaagtttaaaatctgatttgaaagctgcttattataagcaatataattttttctttaacggccccagaatgtttaatgttacataatatgaatatatattttcaaatgtaaaaaaaagcctttttatatataaacatgtataaaagaataaatataaataagaaattaattggggtggcaaagtacatttaaaattttgtgatgtttttgtcaaaaacgatttgaacaaatttataggaaaaaaacaaacaaccccatcaaaaagtgggcgaaggatatgaacagccacttctcaaaagaaaacatttatgcaaccaacaaacatatgaaaaaaagctcatcatcactgtcattagagaaatgcaaatcaaaaccacaatgagataccatttcacgccagttagaatggtgatcattaaaaagccatcattctgagcaaactatcgcaaggacagaaaaccagacaccacatgttctcactcataggtgggaattgaacaatgagaacacctggacacagggcagggaacaccacacacccgggcctgtcgtggggtcgggggacgggggagtgatagcattaggagaaatacctaatgtaaatgacgagttaaaggatgcagcaaaccaacacggcacatgtatacatatgtaacaaacctgcatgttgtgcacctgtaccctagaacttaaagtataataataataataataataataataataataataataaggcaggaagcaacagatgctggaaaggatgtgaagaaataggaatgcttttacactgttggtgggagtgtaaattagatcaaccattgtggaagacagtatggcgattcctcaaggttccagaaccagaaataacatttgactcagcaatcctattactgggtatatacccaaaggattttaaattattctactctaaagacacatggacatgtatgtttattgcagcactattcacaatagcaaagacttggaaccaacccaaatgcccatcagtgatagactggataaagaaaatgtggcacatatacatcatggaatactatgcagccataaaaaaggatgagttcatgtcctttgcagggacatggatgagttggaaaccatattctcaacaaactaacacaggaacagaaaaccaaacaccacatgctctcactcacgagtgggagttgaacaatgagaacacatgggcacagggccgggaacatgacacaccagggcctgttggggggtggagggctaggggagggatggcattaggagaagtacctaatgtagatgattggttgttgggtgcagcaaaccaccatggcacatgtatacctatgtagcaaacctgcaagttctgcacatgtatcccagaacttaaagtataatttaaaaaaaaacagtttgaaaacttccctgaagtaaaaaaagtatcctttgaggaacaatgtaacgatgagctcaagttccacaggaaagagaaaattaaaatttataaagaatttataaatatcaaactattttcatgttttccaggaaaagtgtggctttctcattcattaaccaatagcataatattttccaggaaccttcactcagaagaaatgctgtggcccttccctttaccaacagaaaatggaacacaagagaccacatagctgaacaaattatagcctccttacaagtgagaaaccttcgaggctacatagttttcagccaaaggaaaataaccaacagcttctccacagtgtagactgaaacaagggaaacatgaacatcacaaactgtaccacagaggccagcatggctataagacccaagaccatcactgagaagatgctcatttgcatgactctggtggtcatcaccaccctcaccacgttgctgaacttggctgtgatcatggctattggcaccaccaagaagctccaccagcctgccaactacctaatctgttctctggccgtgacggacctcctggtggcagtgctcgtcatgcccctgagcatcatctacattgtcatggatcgctggaagcttgggtacttcctctgtgaggtgtggctgagtgtggacatgacctgctgcacctgctccatcctccacctctgtgtcattgccctggacaggtactgggccatcaccaatgctattgaatacgccaggaagaggacggccaagagggccgcgctgatgatccttaccgtctggaccatctccattttcatctccatgccccctctgttctggagaagccaccgccgcctaagccctccccctagtcagtgcaccatccagcacgaccatgttatctacaccatttactccacgctgggtgcgttttatatccccttgactttgatactgattctctattaccggatttaccacgcggccaagagcctttaccagaaaaggggatcaagtcggcacttaagcaacagaagcacagatagccagaattcttttgcaagttgtaaacttacacagactttctgtgtgtctgacttctccacctcagaccctaccacagagtttgaaaagttccatgcctccatcaggatcccccccttcgacaatgatctagatcacccaggagaacgtcagcagatctctagcaccagggaacggaaggcagcacgcatcctggggctgattctgggtgcattcattttatcctggctgccatttttcatcaaagagttgattgtgggtctgagcatctacaccgtgtcctcggaagtggccgactttctgacgtggctcggttatgtgaattctctgatcaaccctctgctctatacgagttttaatgaagactttaagctggcttttaaaaagctcattagatgccgagagcatacttagactgtaaaaagctaaaaggcacgactttttccagagcctcatgagtggatgggggtaaggggtgcaacttattaattcttgaacatacttggttcaggagagtttgtaagtatgtgtggtcttgtttccttgtttgtttgtttgttttgttctgttttgtttgaggattgttatttggcgtgctgttttctacctctggtcttatctgtgatacataatttcaaataaacattatcatacaaaaacagaaattttgtagaagtaataataagatgaaatactaaataccttttatgggttttttttttttagccatttcagttaccctgcaattaaagaatgccaaaaatatctttatttgcagaatttcttattacttataaattaaatacctgataatgccctccatggcattaaatctgagattatggctctatctgcgtacatattccagtgggaattgcatgactacataaagaattaaaagaaagtgatgtgctgtcatctactgcttgcagacctgagctaaagtcgtttgctgtagcactgtgactacatagcctattcatttcaggtaaaaatagtacagctggcttgtcctttttagttcatgattaaataaacttcctctttttctaaaatggaaatacctggaataaatgcactggcacttttctatgtcttttactatgaatataaaacataaagcaaataacaagtcatctaaatctactttggtcagtgtgttgcaatattacctgacagacacattgggcctcctccaattctaaaatctatcccagctaagccacccatatacactttcactgtagcaggacaaaggtaggagtacatgtcaaatttgggaaactttttaagaagcttaatgaggtgcagtgatcaaatgacagaatatattatctgaagaacttcattggagactattactcattaaattaccagttgcagccgggcgtggtggctcacgcctgtaatcccagcacttcgggaggccaaggcaggtgcatcacctgaggtcaggagttcgagaccaagctggccaacatggtgaagccccatttctgctaaaagggcaaaaattagccaggcatggtggcacgtgcctgtaatcccagctactcaggaggctgaggcaggaaaatgacttgaacctgggaggcagaggttgcactgagaagagatcatgccactgcactccagcctaggcaacagaatgagaccctgtctcaaaaaaaaaaaaaaaattaccagttgtgctcttggggaaaaaaagtaaaagttgaaaaactgtgtttacaccaaaggccactcatcaggatatgagaatgaaattgcgtctcccagaatccctgtggcttctgtgccagactgtaccctggggccaggaggctgcaggtgggacctgaagccctgggtgtggcctgagaaggagtgattgctctagtcacatggaggagtacaccattacaaaatcaagagtgatggtaggaggactgaaagtttgtacattcttgcatactcctaagtaggtgaccgttctcaacctctgctcctagtctgtcatccacagcctctccccatctcttcactcttctttgtagggagaagacattgatttgcctcctttccacctccgtgtttttagtccttcaatctaacccctctcaacgtttctagaatcttgcttcttacacccaacctccctctgcaacttcctttctccctccccatcccaacacttttcctcctcattcctctttaatctcacctattactttgctcaagtcccttggacacaaaaatcaacttcctctggccctacttccccatcaagctcctacttcatctctcccttaactcccttacctgggtttctccaatcattaatccactcattctgcctccacttttcaccttccactgacttttctatccttttccatctgagtatgccctagttctccccaaacttatctcccaaaggtcattggagacttgcccatagtccttctctgcatctctacctgtcattttctcatgagttacaacagctaaccatccctttcatgtttaagcccataccttccaggatattttgctctcctggttctccaactaactcctcatctattctttgtctcctttccttcctcctgaggttttgtcctcagcaatcacctcctatatctccatattccatcccaacttcggccatttcaacaattagtttcatgcctgtggctcctaaatttgtgactttagtcctgatctttctctttctcaaactgcagacccatgagttacatctggtgagcctctccctatgaatatttctttagtacctcaaacacagcctttctatactgaactcaagataattttcccacactcaagccttctcctctttctaccttctcagtctcagataacagaattaccatgctttttatcattcctattagatgaatgtaattctctctctttgcctcaggtctccaacatccagatagtcctgaagtcttgtccatttacctcacagaaacatgtgtttaggccacttgctctccaataagttggtcctctcccctagatcaaatgttatttgatccacctgcctctggattctcccacctgcaactcggcccccacacatctcccagtgtgagtttctcactgaggcatctccagactagcagcattagcagcacctgagaatttgttagaaatgcaaagtcaagggccccattcaagacctactgaatcaaaaactaagagtggagcccattaatctctgttttaagaagccatccaggagattctgatacaagctaaagtttgagtcactattttagagcatacagtagatttttaattgcattgttcaaaatcctttactctttccctatcaatataaaataaattaatagtccatagtatagcattcaaggcctcttactttgtggccccaaactatctttgcagagttatatctcaccacttcttttcacctacttcatgctccagaaaaatgtgagtattacctgtgctttctaaactcccctaacatttgatcccattgcttcagaaacctggcctccatggcttcacatctttcttccaccaaatcttcatatgcagctcaaatgcagtctcttctaaaaagtcttcctgagatacttcttccttccctgtccctatggaagtcttctctcccagctctatgctcccatataacttcacttgtatctctaatactatatgcatcctatcttctagtgcatttgtttgtgtatttgtgctgtcttccctagtagattgtgagctccttgagggcagggactgtgtctgtttcctctctgtatctctagggactcataccatgttttacacacagtcggcactcagtgtctgttaatgtgaatggaattaagtccctggaggagaaaatataaatgtgtcatcttttctcagtgagaaaacaaaacttccaaagtccatgatgcaatactgacctttttttttttccaaatcttaccctgacattccaggtttgtttcgaaaaattctgggaaaaacttatgtatggaaagaaaataaatttctcattgaatataa

SEQ ID NO: 281 - DNA, 7597 bp, Homo sapiens
  source 1..7597: mol_type = genomic DNA; note = NC_000019.10:c50984064-50976468 KLK7 [organism=Homo sapiens] [GeneID=5650] [chromosome=19]
aattgctctcgctgcgtcagggttccagataaccagaaccgcaaatgcaggcgggggtgtcccagagtcggctccgcctgcaccccagggcgctggggccgggcatggggcggggggtgatataagaggacggcccagcagagggatgaagattttggagcccagctgtgtgccagcccaagtcggaacttggatcacatcagatcctctcgaggtgagaagaggcttcatcaagggtgcacctgtaggggagagggtgatgctggctccaagcctgactctgctctcgagaggtaggggctgcagcctagactcccggtcctgagcagtgagggcctggaagtctgcaatttggggccttttagggaaaaacgaactacagagtcagaagtttgggttccacagggaagggcaagatcggagcctagattcctgggtctctagggatctgaagaacaggaattttgggtctgagggaggaggggctggggttctggactcctgggtctgagggaggagggcctgggggcctggactcctgggtctgagggaggaggggctgggggtctcgactcctgggtctgagggaggaggggctgggggcctggactcctgggtctgagggaggaggggctgggacctggactcctaggtctgagggaggaggagctggggcctggactcctgggtctgagggaggaggggctggggcctggactcctgggtctgagggaggaggggctggggcctggactcctgggtctgagggaggaggggctggggcctggactcctgggtctgagggaggaggggctggggcctggactcctgggtctgagggaggaggggctggggcctggactcctgggcctgagggaggagggactgagacctggactcctaggtctgagggaggagggactgggacctggactcctgggtctgagggaggaggagctgggggcctggactcctgggtctgagggaggaggggctggggcctggactcctgggtctgagggaggaggggttggggcctggactcctgagcctgagggaggagggacttggacctggactcctaggtctgagggaggaggagctgggggcctggactcctaggtctgagggaggcggggctgggggcctggactcctgggtctgagggaggaggggttggggcctggactcctgagcctgagggaggagggacttggacctggactcctaggtctgagggaggaggagctgggggcctggactcctaggtctgagggaggaggggctgggggcctggactcctgggtctgagggaggaaggtgctagggtctggactcttgggtatgagggaggaggaggttaggggtctggacttctgagtgtaaggaaggagaggccagagaaaggaatttctgggtctgagggaggaggggctggggttctggacccctaggtctgagggaggaggggctggggcctggacccctgggtctgagggaggaggggctggggcctggactcctgggtctgtggggggaggggctggggcctggacccctgggtctgagtggggaggggctgggcctgaatgctttctccttctcagctccagcaggagaggcccttcctcgcctggcagcccctgagcggctcagcagggcaccatggcaagatcccttctcctgcccctgcagatcttactgctatccttagccttggaaactgcaggagaagaaggtgaaagctggactgggaagtctgacctcacctcagggcccccactgaccctctccaaggagtccctgagtcagaacccttccctcctcaaacagcttccatcctgggaggaccagactgtcggctgaagcccccgctcttcctgcttctgctgactcagggggtctctgtcccctccaggccctgcctcctgtgctcagggtctctctgtggttccccagatgagatgcgcctcctgggtttctgagtgggctccttctgtctgtctctatccctatctcttgctttctctgtatttctccacacattttcatctgtctctgtccatctctgactctgggaatccctgaggtgcagcctcagccttcccctaatgctagctacccacgtgctcctccatgtctccatccagcccagggtgacaagattattgatggcgccccatgtgcaagaggctcccacccatggcaggtggccctgctcagtggcaatcagctccactgcggaggcgtcctggtcaatgagcgctgggtgctcactgccgcccactgcaagatgaagtaggtgccgcccaagtctctgctggaggtgcaccagcgtctccagctcgctatgggggtggaagggcagtctttctgtgcctacggctctattctcctctctctgggtctctgtcctcctctctctgggcctctgtaccccctctccctggggctctgtccccctctctccctggctctctgtctccctctctctgggtctctgtccccctctctctggatctctgttcccctctctctgtgtctctgtcccccattctctctaggtctctgttccccctcctctctctctgggtctctgtccctctctctctggtctctgtccccctctctctctggatctctgtccccctctccctgggcctctgtaccccctctccctggggctctgtccccctctctctgggtctctgtctgcctttctctctggatctctgttcccctctgtgtctctgtccccttctctctccgggtctctgttccccctcctctctttctgggtctctgtccctctctctctgggtctctgtccccctctctctctggtctctgttccccctcctctctctctggtctctgtccctctctctctgggtctctgtcaccctctctctctgggtctctgtcaccctctctctctggtctctgttccccctcctctctctgtgggtctctgtccctctctctctgggtctctgttcccctctctctctggtctctgttccccctcctctctctctggatctctgtccccctctccctggggctctgtccccctctctccctggctctctgtcttcctctctctggggctctgtccccctctctctctggtctctgttcccctctctctgggtctctgtccctctctctctgggtctctgtccctctctctctggatctctgtccccctctctctctgggtctctgttcccctctctctgggtctctgtcccctctcctctctctgtgtctctctcccccctcctctctctgtgtctctgtcccccctcctatctctgtgtctctctcccccctcctctctctgggtctctgtccccccctctctgggtctctgtctccctctctctggggctctgtccccctctctctctggatctctgttcccctctctctgggtctctgtctcccctcctctctctgtgtctctgtcccccctcctctctctgggtctctgtccccaccccgtcccccaggtctttgcacaccctctctgtcacagtgtctcttctgaatctgtgaatgtcactcctcgcagtgagtacaccgtgcacctgggcagtgatacgctgggcgacaggagagctcagaggatcaaggcctcgaagtcattccgccaccccggctactccacacagacccatgttaatgacctcatgctcgtgaagctcaatagccaggccaggctgtcatccatggtgaagaaagtcaggctgccctcccgctgcgaaccccctggaaccacctgtactgtctccggctggggcactaccacgagcccagatggtaggtggcctcagtgacccaggagtgcaggccccagccctcctccctcagacccaggagtccaggcccccagcccctcctccctcagacccaggagtccaggcctcagcccctcctccctcagacccaggagtccaggcccccagcccctcctccctcagacccgggagtccagaccccagcccctcctccctcagacccagcagtcctgggccccagaccctcctccctcggaaccaggagcctgaacaacagcccttctggtcctcgcccccatcctctctgactgacagctctccctgctcctccctgcagtgacctttccctctgacctcatgtgcgtggatgtcaagctcatctccccccaggactgcacgaaggtttacaaggacttactggaaaattccatgctgtgcgctggcatccccgactccaagaaaaacgcctgcaatgtgagaccctcccccccaattcctccccagtcctgggtaccctgtctgcatgccccagggacagagcttgacccgagtgactgggtaccaagcccggccttgccctccccccaggcctggcctcctcagctttttccacctcattctctgcctaggtcaggggtgggagtttacttaggggccaatgtggccctggggatgagacagagagtttaataggggtgagaaagtgggggtgggaccagggaaggagactgaggtgctggcctcaggcccaaaccttaagggggcaccaaaaacctcagtgattgagataaatcataatgcaatatttaaaaataaaaataaaaactcatgcagaagtccatgatggacaaaatgtcacattttaaataaagagcaggtggatcttactgaattttcccttgccgtaagtactagcgtggctcagcacagcgctgtactggcactgtcttcatttaaaatgtggataccatgcccatcatgcagttttatgtattacatttgatttcgttaagtactgcattgaagtattgtgtattgcagttactgagattttgtgcctgaagctgatgactcactcacctgaccctggccctggtcccggggaaaacactctttctctccacctcctctctgttccctctttctggccttttgtcatcccctctgtttctgaacagtcttcccacatctctctttgtgacataatttcatttcattcttttcctctttgttttttctctgtgttgagctagcttgctctccctcccttgttctctctccatgccctcctctctgctctctgtcttctccctctttctcttgcttctctctctctcctcccctccctctctcctctccctgcccccctgctctctcttttttcctctctctctgtctcctctctggccctctcctctttctctctctcccccacttctctgtctctcttcatctctctccctcatctctccttgccccctcctttttactgtctctctctttctctttcttctatctctctcctctccctgccgctcccccatctctgtctttctttctctctctttattctcctcctctcttccagtctctctctcctctccccacccccaccccatctctctccccacaccttccccccctttctctttgtctctctcttctccctctttcttctccacccccatctctctctctcttctcttcccacaccctccccatctccctcatctctttgtctgtctctcttctccctccttcttttccacccccatctctctgtctctctctctccccataccctttccctcttcctcatctctctttgtctctctctcctttccctctttcttctccacctccaactctctctgtctctccacacccatcctccttgctcacatctgcaccttcagctgtcaggggatgtgggatggtgagtgttagggatagaggagatgggagagagatgactgtcctagagaatagggtgttccccttctcccctggtgagggccagtttcatgaatgtgcaagctctgcacggacacagagccccacactcagaagggtctcaaacttagtctaatgcattcctgctgttgtcttgaaattctcaataatttttgaacaaagggccctgcattttcgttttgcaccaagtcctgtaaattatgtaactggtcttcaccctggtctccgagaccatcgtgtccccctttcctgcgccacagggcacgcatccaccccttggagatgatgttccttctcccactagcttggagcagggtccttaacattggaaaataaagagtgctctgatcctggaagccccaccccttctctgcaattggtctcattggccaagggtcaaaccagtgtcttcaaaggacctagtgtgtccctagcactagctctcccattagtccccagagacaatgagtctcttctcattggctatggtggaagtccataatctgcaagacaaagaccgataactgaggaatgtatgagaatgagttgggctttgatctgaagccaaagttaatctccggctctattccctctagggtgactcagggggaccgttggtgtgcagaggtaccctgcaaggtctggtgtcctggggaactttcccttgcggccaacccaatgacccaggagtctacactcaagtgtgcaagttcaccaagtggataaatgacaccatgaaaaagcatcgctaacgccacactgagttaattaactgtgtgcttccaacagaaaatgcacaggagtgaggacgccgatgacctatgaagtcaaatttgactttacctttcctcaaagatatatttaaaccaacctcatgccctgttgataaaccaatcaaattggtaaagacctaaaaccaaaacaaataaagaaacacaaaaccctcagtgctggagaagagtcagtgagaccagcactctcaaacactggaactggacgttcgtacagtctttacggaagacacttggtcaacgtacaccgagacccttattcaccacctttgacccagtaactctaatcttaggaagaacctactgaaacaaaaaaaatccaaaatgtagaacaagacttgaatttaccatgatattatttatcacagaaatgaagtgaaaccatcaaacatgttccaaaagtaccagatggcttaaataatagtctggcttggcacaacgatgttttttttctttgagacagagtctctgttgcttgggctgcaatgcagtgatgcaatcttggctcactgcaacctccgcctcctgggttcaagtgattctcgtgcttcagcctcccaagtacctgggactacaggtgtgcaccaccacaccaggctaattttttgtgtatttttactagagacagggtttcaccatgttggccagcatggtcttgaacgcctgacctcagatgatccacccaccttggcctcccaaagtgctgggattacaggcatgagccaccacggccagcccacaatgatattacaaacctattaaaaatgatacttagacagaattgtcagtattattcaagaacatttaggctataggatgttaaatgacaaaaggaaggacaaaaatatatatgtatgtgaccctacccataaaaaatgaaatattcacagaatcagatctgaaaacacatgtcccagactgcatactggggtcgtcatgaggtgtctccttccttctgtgtacttttccttgaatgtgcacttttataacatgaaaaataaaggtggggaaaaaagtctgaagatctaa

SEQ ID NO: 282 - DNA, 8613 bp, Homo sapiens
  source 1..8613: mol_type = genomic DNA; note = NC_000017.11:c64506866-64498254 DDX5 [organism=Homo sapiens] [GeneID=1655] [chromosome=17]
gaccattctccgccgaccaaaacccgtcaaaggattatcagacacgcgggtcggacggtccacatcagccggcagcccgggcgggtcccggggtgcgagcagcgcacttccggtgagctatttcgttttgtatccctccgccgacgtcaacgggaaagtagtgcggaccgctctctcggtggtccggggtggtacagccacgtgacaacgccaggccccgccttccccctcttttggttacagacgtgagggctctttggagacgtaaacatctccgagtggcgagggtgggcggggctgggcttgggaaagggcggggtggcttgcttgaggtgtggaaagaccagaagaaggtgaggtcaagagagtgcagaatgaggcattccaatggtgggtgggccctgacctgagagagtggcgcggggaggggtgaaagcgcggcgatcctggaacgccagcgggcgttgcggcctatgcgcgaggggcggggcgattaggtcatagagcggctcccagcgttccctgcggcgtaggaggcggtccagactataaaagcggctgccggaaagcggccggcacctcattcatttctaccggtctctagtagtgcagcttcggctggtgtcatcggtgtccttcctccgctgccgcccccgcaaggcttcgccgtcatcgaggccatttccagcgacttgtcgcacgcttttctatatacttcgttccccgccaaccgcaaccattgacgccatgtcgggttattcgagtgaccgagaccgcggccgggaccgagggtgagtttgggagccgagctgtcaggcctggcgggtggggggatgggagggcgggtcagggtggcggccggcgggggctttgcggcttggacttggcctttccgggctatcttgggacttcctttcccgaaggcttgcgccattttgatattcacgtcacagtgattggaagagatttgacggtgtagtgtcttcaagcttgctttttgtgtggggattggggagctgtcggggcggctgccatttggtagctgttgagggagttgagagggagcgtattgtgcggatgaaagcgggacgcttcgaggcagacgaaggaacatctgttaggtgcggcgtttcgggaggtgtttttggggtggccgggcattctgtgggagcgaggggaccacttccaaagccctggtgctgttggggtaggagggcggccggcatcagccatgtggctgagtcgcgagtacaaaatgccggcctcggacatggcggcggcgcctttgttaccccgcccggcggaggagctcaaaatggcagcgtcgagaaaatgtggcgcagagagaaatgcgagacaaagggggaagcgccgccccagcgggaacgccgcccggccgactccgcccgggccgggactcctcccccggtagtcgccggctcctccttttcttttttcctgcgttatataattttgattcgttgatccggagctctaccgcggcgttcccccagctgggtttgctagcagaagtgtttctgagaaaacccttgttctgttatcgctgactgtactgtttaggttcttaccactaaagctgtttggttccaaaacggccatatgagtaacatcgtcgtgatgctcttcggttcatgtagccttgttattgctgatagtgaattgctaggctggtggggaagattacagtaaccacaagaagtggtgtgtgccagaatcccaaattctggcatgtgggtgacaagtttccgacatgataaatccccggcttccgacatgataaatcccaggctgtttacatgacctaagtaatgtgtacttgggactacgggaaatgttaactgtggctgttgagagagagagagattttcacgaaggacagtgctaggtttacctctcgaagtctgttttcagtggtttttagcttgtgccaatggatgacaaatctatacagaaacctgggtatagccatttgaaaatgtgaataacgttttttttcattccaggtttggtgcacctcgatttggaggaagtagggcagggcccttatctggaaagaagtttggaaaccctggggagaaattagttaaaaagaagtggaatcttgatgagctgcctaaatttgagaagaatttttatcaagagcaccctgatttggctaggcgcacagcagtgagtaaattcatgtggcttcatcaggctgtaactcgatcgtggattctagtaaatgaaattctgacaggtgttttgcaaataactcaattttggtagagttacatgttctgacttcataattgggaaaggtgtgactcacttttggatataggtggctttgggatttttacttaaattaggttgagtataacaataaattttttttttcataatagggtgttcataggtgggtccagattaaaatgaaggctactttaaactagttactaaattatgaagttaggggcttatcaattacgtatttagctaggggtggttgtcatgaattttaagactgttataatttgttttgcagcaagaggtggaaacatacagaagaagcaaggaaattacagttagaggtcacaactgcccgaagccagttctaaatttttatgaagccaatttccctggtaagtgctacttttcagttctacctacccgtgtttttgtttccacctaccccctctttttcttggcatcactaatttttactaaatatctgttactaattatagcaaatgtcatggatgttattgcaagacagaatttcactgaacccactgctattcaagctcagggatggccagttgctctaagtggattggatatggttggagtggcacagactggatctgggaaaacattgtctgtaagtttgggagaactcttgagttgatctgatatatgcaagaaaatgtaatggtaatttaaaaacgagtattttaatgtgatttctgtttgtccccactttcaccctaaatagtatttgcttcctgccattgtccacatcaatcatcagccattcctagagagaggcgatgggcctattgtaagtatatatttttaactttttattagaagcataatgtgtagattttagactacatagctaaagatgtaatcatttgtggtggttttatatagaggttagctcaccctattcagctggagctgttttgggtattggacaacacatgaagaaaggatctgctagtataataagttagcagtttaaaactagtatccaggtttgtgctgaaagctgtttctctttccttagtgtttggtgctggcaccaactcgggaactggcccaacaggtgcagcaagtagctgctgaatattgtagagcatgtcgcttgaagtctacttgtatctacggtggtgctcctaagggaccacaaatacgtgatttggagagaggtatgtaatgaaaagggttttatttgtcattggtgctaaatatcctaggtattgtagttacacttacgtatttaattaaaggtgtggaaatctgtattgcaacacctggaagactgattgactttttagagtgtggaaaaaccaatctgagaagaacaacctaccttgtccttgatgaagcagatagaatgcttgatatgggctttgaaccccaaataaggaagattgtggatcaaataagagtaagtgtcctttgaaatatgtgatcaaactgaattgtgttttcactcttaagagtctgatactaatttttccccccaaaatccattagcctgataggcaaactctaatgtggagtgcgacttggccaaaagaagtaagacagcttgctgaagatttcctgaaagactatattcatataaacattggtgcacttgaactgagtgcaaaccacaacattcttcagattgtggatgtgtgtcatgacgtagaaaaggatgaaaagtaagttttattaactctgttatatttgcttcctaacaactttgctgtaaaattgagggatcattgtttggtgagttgttttaggttatttcagttggtgtgatttcatttagttagcctactaatcctgaaaatttcttgaatccttcaaataatggctgtcaccatttatagctttcctatagaaggaattcatgtgtcccctggttgacttaaggaccaagggtcgaactgctcgataagtggattagcaggcgtttcctctttgacttccagccatgtaaattgaacttaatgttttgctgaccataaatgtgtggccctagcaatggtcttttaaaactcaggatttttcctttctctctcctattattagacttattcgtctaatggaagagatcatgagtgagaaggagaataaaaccattgtttttgtggaaaccaaaagaagatgtgatgagcttaccagaaaaatgaggagagatgggtatgtgtgagctcctccattgaagcagattgattaaaacagcttaggaaagggcaaacttggatcacgagcagtggatttttttcatatctgatagtgaatttaactttttcatttctggcgaaattaaagagatctgtgaccaaaagtggtcaagcactggagtctgaggttttcaatgtgagtttaataacacaacttgtcttttaacttaggtggcctgccatgggtatccatggtgacaagagtcaacaagagcgtgactgggttctaaatggtaaatatttcaaatgaagtatttttcccccttacttaacctagctagaattctgctcagataattgatcatgtatatgccttcctttgtagaattcaaacatggaaaagctcctattctgattgctacagatgtggcctccagagggctaggttagtacaaactcgcattcatggcttggtttcccagaagatctccatttaacttttttaaagaaagtttattgctttctttaacctgcattttttctaagttttttttcacataaaggtgctgtctttgtggcaaggcctaggcatgacaatcggaggactcgagggggatggaggactagtgatcggctggctgcttccagtcgattagagaggtgaaaaagctgaacgtgtgccagtaatcttcaaaaggcagaacatatcacctctgccccgtaaactgttctctccgagggaaaaaatggaagttatcctcacagttcactgccgtggtatttcttctgtcccatgctttgcatgactgccatggtacagccttgtttcaaactgttcactgtgatctgtgggtctttgagtttcagtgagtttgctgaaatgtcgaagaagtagttccaaacttcaatgttcaatgaaatttttgttcaagtttgaaatggagagagcagctttaaaaggtactaagccttttacaaattggtgagtactggcacatgagatctagagcaggagcaacttctcacacatagtaagtgggaaaagaaagtgctttgaaagttcctccctcacctacacagtagtcgtcatgtcgagacctgccagagagagacacattctcaagtgaatcctggcttcttggaagcgcttgcctagacgagacacagtgcataaaaacaacttttgggggacaggtatgttttcttgcagctgcggttgtaaggtcttggcaagacaagcagtgtggccagaattttgaacttctgatgaatgtgtaatgcaaaggaccttgtacatttttttgtttcaaggtcctcaaaatgagcacatgaagaggttgctgtgaaactttaagtggccctactgcgcagaagcattcagatgtcacttgatgatctgtaagggaacttgctgatttgggaatgtgcttagggaacacacattccttttgacagggtctgtcactgggtgggtgatgaattatacagatgacatgtgcttttttttcttttttcaacctcaatggtattcctacaggaaatggataaccattttaactgtattttttgcagcccgtaccttcttgggaatacaattgtctaactttttatttttggtctggctgttgtggtgtgcaaaactccgtacattgctattttgccacactgcaacaccttacagatgtggaagatgtgaaatttgtcatcaattatgactaccctaactcctcagaggattatattcatcgaattggaagaactgctcgcagtaccaaaacaggcacagcatacactttctttacacctaataacataaagcaagtgagcgaccttatctctgtgcttcgtgaagctaatcaagcaattaatcccaagttgcttcagttggtcgaagacagaggttcaggtaaggatgactgataggaaatgttggtagttacgagtcacatcgttgtctacaaatccatttaaatggtattggagggtgagtaaaaccttgaatgtgaaaacttaagctgaaaaattgtaaaaacatttcacgcctaccatgaatagatctgtttctttctgtccacaatgatttgtgtcatagacataattgatcaatttgcaattgttttcttgacaggtcgttccaggggtagaggaggcatgaaggatgaccgtcgggacagatactctgcgggcaaaaggggtggatttaatacctttagagacagggaaaattatgacagaggttactctagcctgcttaaaagagattttggggcaaaaactcagaatggtgtttacagtgctgcaaattacaccaatgggagctttggaagtaattttgtgtctgctggtatacagaccagttttaggactggtaatccaacagggacttaccagaatggttatgatagcactcagcaatacggaagtaatgttccaaatatgcacaatggtatgaaccaacaggcatatgcatatcctgctactgcagctgcacctatgattggttatccaatgccaacaggatattcccaataagactttagaagtatatgtaaatgtctgtttttcataattgctctttatattgtgtgttatctgacaagatagttatttaagaaacatgggaattgcagaaatgactgcagtgcagcagtaattatggtgcactttttcgctatttaagttggatatttctctacattcctgaaacaatttttaggttttttttgtactagaaaatgcaggcagtgttttcacaaaagtaaatgtacagtgatttgaaatacaataaatgaaggcaatgcatggccttccaataaaaaatatttgaagactgaattaagtggaaattgtactttattttatataatgtcatgtaaaactttgcttaagatggtctggttttttttttgtttttgtttggttttttttttccatgaaaacaaatgactgttcctttttatttaatttgggaggcagggggaatcagaaggcccttctttataatgagctattcatattgcaggagtcagaatgaattgatacaggtgaatttttagttacaggctaaattgcataaaagctttgtcagcttccagcatcaggggagtcatttaatagcctttttccttatttgctagtatggttaaatgagaaaatagtaaaatagatacaaagtcatctatatagtgtgagaacgtgggtgactttttcaaagtttataatttaaaaagctccaaataactggctttttcaagagacttatactcatgctcttggctatactgtgaattactgaaatgttgaacaaacctgtgaaagacatacattagccctttaagatggccaggagctaagcttgagtctcctttactgaatttcgttcttagtgcaggttacttgtagattctagtcttcacaggctccctggggctcttaactagtcacactgggagtcatgaatgtctttccaataattcagggaattctagagatcctcaaactgtaaggtctattcatactcaacacaaggaaaaaacctcattaaaattaatgactaatcaggaggcaacgtaaccaaaagcacagtgaatgaaagttttcatggtaggttcaacatgggtttattgctagaaagatccaggggatagctttaggtttaacttcggctcaccaacgtaactttctaatcatttatttcagtaatagctagaagtgggtctgaatgttttcccagagtctgatacgtgtttttttttgccagaagagaggtcttcaggagacttcatttaaattctgattattaaactgaggctttaattgatgttaatgccttatgtcaaatgtaaagttagaatttgctagggctgggatagggagtgatatttctaggacttagacattgaaaactaattcagcctgtagtaacctggatggttttcaatggcatggttagtcaaattcatggttttaaacttagaagcagctttcgggggagagggtaggttggagcatttattacatattttactgtttaatgtcttaaccgtgggccttttaatttgtaaacactgaaatgattgttgggctgtggaaaacatttacctatttaccttggaagttttaaaagacagtccactttttagcatgtgtgttgtgtccagcctgtggtcgtcttaactaataaatgtgatttttctcccca

SEQ ID NO: 283 - DNA, 43233 bp, Homo sapiens
  source 1..43233: mol_type = genomic DNA; note = NC_000016.10:c88856966-88813734 GALNS [organism=Homo sapiens] [GeneID=2588] [chromosome=16]
aggccccgccccgcagcccagccggaagggccggcggacgctcgctaggtcggctcgctggccggggctccgcggctcccgtggttgccatggcggcggttgtcgcggcgacgaggtggtggcagctgttgctggtgctcagcgccgcggggatgggggcctcgggcgccccgcagccccccaacatcctgctcctgctcatggacgacgtgagtgcgggcggtgggacggggcagggccggggtggggcggggaggggaggggcggatggagggaggagcgaggtgggggaagggcgggcggggtggggggagaggtgaggggaggccccttggggaaggggggaggccccgcgcggggaggaggagggggaggggacggggggtatccccgtgcggggagggggaggcccctcggggagtggccgcggggtccaggcgtggggtctcggcggtcaccgatcaccacacgcgctgccactgtgctgcatgaccgggacagcgtcctccctggcaggtgggtggccggcgtgctaccgggccctgcctcccccgtctgacctttcccgccctctactcttgggaaaggtgggcgcgcagcgtggcctccccaaagggaggaagaggctgctcctgccgccctgcctgagagctgcgtcgccctaggaatcactcccgccacctcgggccgccgggtccccccgctgggctccagtcttacctgacggctgtctctgtcctctggagaatgctgagcgaaggtcaggtgtccctaaggtctgaagaactgaaaggctggaatgtctcctggtgggcaagtgcggggtcaggggtcacagccagcctggaggcctccttccctaactccttgtgggagccacctggagactcaggaatgagcctgcctggggcatgggtcaccgtgcaggaccccagacacacctgggttgaaaccctactgtctccaagcttgggggtcacttccattcttgaacctcagctgccacacctggggggttacacctgtcccgccgtgctcacgttgtgtgtgaggactgggacgacaccgagtaccagacagttttgggccgtcggtgtcgctcagcccctgtgtgctggctccgaccagcagagaccctgacaggtgccttcagacccacctgtgctgaccagtgggggccacgggccacacccaagggctgggcagtcgtggctgtcggaattggaaggtgctggtagtgtaaaatacacagatttagaagacttggtgaaagaaaaataatgtaaaatatctcacttaacaattttattaaattaatggttttttaacataaagatatacttgaaaagataacagacaccacccataatttccccacccaggggtgacagccgacagtcctgggcagctgcttttccatctcatatgtcttatttgtgtgcagtgactgctttccagagcacgctctccagcgcccaggggtccgtgtcctgacagcagtagccgggcctttctctgcactgagtggcatctccctcctaaagatactttgcttcagaatttcatcctttcacttttgaagttcctctgggccagtgtagatactttgtttcagaatttcttcttttcattgtgtaactccttctgggccagcatagcttcgctggatgagctgggctctgcaggtgaagcctccctgttaagtttctgcttttcctgactttctcagaggacagaggggtgaggcggggcagctcatgaataattttttatgttgaagacttgtcgaaataatattttggttatgttgggttaaataaaatataaagttagtctgtatttcacctacttctgcttttctaatgtggctcccggtaaatagggaattgcatgtggactcaccctacgtttccataggacagcaagggttcaggccgtgcagggtggaggggtggggtgtggccaccggggcacatgtgggggagggtgacaggaagccccgcccacctgggcacctgttctgtggcctccactgtgtggcttgtggggtcgtttggcagctgacgcctaaagaaccccagaggagctgtgtcctggccggtaggtgtacttgtaaggactttctgatgcagacagcagaagatgaagtcaaagtgacaagcaacagtggggattccctggccctcctgagtcgacagaccagggccgcctggcgagtttcccctttcgtggctctgctgcctctgaactggccacatcctcactcagcctgtgatggtcctaggtgactccaagtcacccctgcagtcagcagacccagtgggaggttggctctgcccgtgtcatgttagcgtgatgtgggtctcagccctgcgccaagcacactgggggaggggcacatgctgacctgtccagcccaggcctcggagcctcgggcctaccccagaagggagactgcccctgatcatctcatctgcctggacccagcagagagggggttccctgaagggcccatggtgcagctgccaggacagggcagggatgctggcaggtgagagccacagaagctcacagtggagccccgaggtgccctgacgtggcccagggtgcaagggggtcctcacaggctgtcttctctccttggagtccggggcttcctccgcagccctgtccacacctcttcctgcactgcagaccggttgtttctgccagggcgctggcgtctgaacctgcaacaggtcattcggcctctggcatgacatgggatggcttgatgacccacagctctgggcccagcaccacttgaggacgagtgtgcatgtctcaagttcagattttggagcatggccctccagggaccggctgcctccagcccagtctccccctatccagtcctctgtggctgggcagtggggggcctgggcccccctttcgtctaagcaagtgcagtttcagaaaagggttgtccccaaaactagcttattgcacccctcatggccagaagccactctccaactggtcacactgacccgggagagaaccattgcccccagagtcgggaccagaaggggaagctgggactcaggggtgagagcagctggcaagagcccccacctgtccagggggagctgagccgggcaaggacgggtctacctgcactccccagggctgccctgccctggcctttcactgacccacggtccagcgcggcctggcttcgtagtaccctgggcacctgctgcgtgagtgaggaaacctgcgtggcccactctgctctccagggcttctggggccttggagacaggtgagacccagtgacaagttccactctggcccacacacagctcctgcctcccagggcgagcagcactctgtgtctccactccttatttggaaaatagggttaaggagggtcagccctgaccacagaggaagtggagagtcagggccacccaggccagctcctgttgccacagcagcctcgtcgagccaccagagtccggggagggttgctcagtgcccctcgtttgaaacagacaagcactggcctgctcgtcttcataataatcccatagcaaccagtaggaatggaaactgcgtttcttaaaactctgaaattctgaaggatactgatccatggctcacagctgtgctcgctgaacgtggacaatcatttgggggcttttaggccttttttttttttttttttttttttgagatggagtctcactctggtcacccaggctggattgcagtggtgtgatctcagctcactgcaacctccgtctcccaggttcaagcaattctcctgcctcagcctcccgagtagctgggactacaggctcccaccaccgtgcccagctaatttttgtatttctagtggagacggggtttcaccatattggccagtctggcctgaaactcctgacctcaggtgatctgcctgcctcagcctcccaaagtgctgggattacaggcatgagccaccacacccagccaggactttttttttgagacaaggtctggctctgtcacccaggctggagtgcagtagctcgatcacagctcactgcagcctcaaactactgggctcaagcaattttcctgcctcagcctcctgagtagctgggattatagccgcccatcaccacactcggctaattaatttgatcttcaatcactgataccctttcttccactagatcgaatcggctactgaagcttgtgcatgcgtcacgtagttctggtgccatggttttcagctccatcaggtcatctaaggtcttctctacactgttgattctagttagccattcgtctcatcttttttcaaggtttttagcttccttaccatggattcaaacatcttcctctagttcggagaagttggttattaccgactttctgaagcctacttctgtcagctcgtcagagtcattctctgtccagctttgttcccttgctggcgaggagctgcgatcctttggaggagaagaggtgctctggtttttagaattttcagcttttctgctctggtttctccccatctttgtggttttatctgcctttggtctttgatgctggtggcctaaagatggggttttggcgtagatgtcctttttgttgatgttgatgctattcctttctgtttgttaattttccttataagagtcaggtccctcagctgcaggtctgttggagtttgctgaaggtccactccagaccctgtttgcctgggtatcaccagtggaggctgcagaacagcaactattgcagaatagtaaatattgctgcctgatccttcttctggaagctttgtcccagaggggcacctgcctgtatgaggtgtcagtgggcccctactgggaagtatctcccagttaggctacacgggggtcagggacccacttgaggaggcaatgtgtccgttctcagagctcaaacactgtgccgggagaaccactgctctcttcagagctgtcagacggggacgtttaagtctgccgaagtttctgctgccttttgttcagctattccctgctcctagaggtggggtctacagaggcagcaggctttgcagagctgcggtgggctctgcccggttcgagcttccctgccgctttgtttacctactcaagcctcagcaatggcggacgcccctccccaggcaggctgccacctcgcaggtggatctcagactgctgtgctagcagtgagcaaggctccgtgggcatgagaccctccgagccaggcccgggatataatctcctggtgtgtcgttagctaagaccgttggaaaagcgcactatttgggcgggagtgtcctgattttccaggtgcagtctgtcacggcttcccttggctaggaaagggaaatcccccaacccctcgcacttcctgagtgaggcgatgccccaccctgcttcggctcaccctccatgggctgcactcactgtccaaccagtcccagtaggatgaaccaggcacctcagttggaaatgcagaaatcgccgtcttctgcgtcaatcacgctgggagctgcagcccggagctgttcctattcagccatgttggaacggaatccccacacccggctaattaaaaaaaaagttttttttagtgacagtgtctgtctgtgagacccaggttggtcttgacttcctgagctcaagcgatcctccctcctcagcctcccaaagtgttgggataacagacgtgaaccactggatccagcccttttaggacttttaagggagagaagaaaggtggttcctgcccgtggtgccctgtgggggttttagatgttcaatggtaacctgctcactctgcagggaggctgtccacacctgcttttcatagccaagaaaggcgccgataaataatgaaagaacagggtcagcagatgagagctggcccagcagcctgggacgctgtcctcagaaggcccacgtgtgggacgttgccctcggctggtcagaaggcacatgtgtgggaggtttttgccctcggctggcgtctgggaacaggaggtccccccgctgttcgctgataggagcagctcaccttgccacactgtttttgcacatgccacgatttatgcccagcatcctccttctgggcataaagagtctcggcacatgccaggcagaggcggccgcactgccagcctaggcaaaagccctgggaactgagtctcgcacagcttccccgtcagcatcccgcacctgtgctcgcagcccgagcgtcccgtgtggctccgcctggggagggttccacgctgcggctggtctccccggccccgcccgcaccttctcccctggctgatgccctccccgttgtaagtcatggcagtgagtaggactgtcgccaagacctgggactcctcccagcgagagtgctcccttgcggtatcttctgagtcagtggtgagcgtggagccccctccctcaagccctgggactcctccccgcagtattttctggtgagtgatgagcgtggagcccactccctttacagcattttccgctgcatccattcatgttatttgtggcctggaacaggtaggaggatgacccaggtgagcacaagcagatccggacgcagctctgctgactgccgaccttctggggaggccagacccgcctcgggaagcctcaggacgcagcctgcagggagggtcgggcacatggcacccagtattcagatgtgcggcctcactcccagcccgaagggagcccagcagtggtcctgggcatgggcagacagtgtaacgggcgaaacatactgctccctcccatcccaggccttgtgcccccggcccacctgccattctgtactctcccacctggactggagacagcaggaagtgcagaagccacctgagaggatgaatctgcactcggggaggtggagggcaaggagctttgggcgtgtgtggccagtccccctcaggctggcctcagggagctgtaccgtcccagcctgcactgcaggtttctgctgcctcagtgggatgcacctcaccctgacatgggcgcattcgcccactgtgactaggtgccactgagcccaaggtcccttctcagcccatgagcagctctgcgggcgtcctgccccctgtcctcccacctccctttcttcctcatcagcttcaggggacacctctctctaggtcctcctttcattccagcctccattgtcctcagaaaagccatttcagtgacttcaaaataaaccatctcagggctgggcgtggtggctcacacctgggatctcagcactttgggaggtggaggcgggtggactgcttgagctcagttcactcaagaccagcctgggcaacgtggcaaaactccatctctaccaaaaatacaaaaaagttggcctgacacggtggttcacacctgtaatcccagcactttgggaggctgaggcaggtggatcacctgaggtcagtattcaagaccagcctggccaacatggtgaaaccccatctctataaaaaaaatacaaaaattagatgagcttggtggtgggtgcctataattccagctactcaggaggctgaggcaggcgaattgcttgaacccaagagccggaggttgcagtgagccaagaccacgccactgcactccaacctgggtgacagagtgagactccatctcaaaaaataatgataataataattaactgggcatggtggcatgtgcctgtagtcccagctactcaggaggctgaggtgggaggatcacctgagcccggaaggcagaggttgcagtgagccaagatcgcgccactgtacttcagcctgtttgtcagagtgagaccctgtctcaaaaaaataaaccatctcaaaagggatccaaagctaaaagggccaaacagaattgtgtcccatgagacatggagggcctttgagaggaaaaagcccagacctggcccagctctgggactccacacgttaggaggggctgaggcaaggagcggccaccctgccaagctgagccttacaggcaggggccatgtagcctgccgtccaccggggaaatggatcattgcatccagacaaagaccaaggtgtgaccacgcagacctggatgtccagccacccacgtgcgcccagagcggcccactgtcctcccgcggtccccggggcccagcgcccatccctccagcagccgttcccagtcagcacgctgccacccccgcccccggtgagggcttcccctctgttcagacccctgtcacttcacacaggccccgaggctgctgcttctttgacttaccaggacccagcgagtcaaacgcccaccggccccgacccagcagtgtcaggggagcccctggtccatctgcagaaaaccaggatgcccgcacttcctttttttttttttttcagacggagtctcactgtcacccaggctgtcctgcctcagcctcccgagtagctgggaccacaggcgcctgcaaccacgcctggctaattttttgtatttttggtagagacggggtttcactgtgttagcaaggatggtctcgatctcctgaccacctcgtgatccacctgcctcggcctcccaaagtgctgggattacaggcgtgaaccaccgcgcccggcctttcattcttttatagccgctttactgagacggaattcgctggtgaaagtgtgcgggtcatttttagtgtgttctcagagtcgtcctgccaccacacatcgtcacatcatctttgtcaccacggaaggaagccccagccctgatgggggtcactcccttgtgctccccgaagcccctggccgacccgctcccctttctgtctctaaggatctgccttttctgacgtgtccggtgaatggaatcttacggctcatgggccttgtgtctattttcccctcacacagggtttttgggcttcacacacacagcctgtgtgaggactccattccttttcgtggctgagtcatggtccacagtgtggagggaccacgtgtggctgaggcttccacccatggatgggcatccgggtgtttccagcttggctgccagggagcgagccgctgtgggtgttggttcatgcacaggtttccacgtggacacacttttcagttctgttgggcgtgtaccagggaggcgctgccgggcggcgtggccaccctgcgtggcgctgccggacctctcaccaggtgctgcgtgtcacgttcttacatggtgtgtgagggctccagtttccagtgagttcacttttaatgttttgttttgtttggtaaaaatcaaccttagacaatcagcgatcagactctagtccctgtcgtggtgaactgtggagagaccaaagtgagcctctctccggctcttggagcaccagggcccatgcagcctgtcttggggtcatttgaaatggtggaaactttacaagggcccgatgggcaggtgagccccactcggcctccaggcacagccctcctcaaggtccctgctgtccatgcaggtggcagtcctactctgtgggtgagtcctggagccacttgtgacaggaggaggctggatggggtgaatttggagaaaagtggcaggtttttgttttttatttttttgagacagggttctctgtctgttacctaggctggactgccgtggcgcgatctcagctcactgcagcctctgcctcctgagctcaggggattctcctgcctcagcctcccaagtagctgggattacaggtgtgtgccaccatgcccagctgattttttgattttttatagagatggggtctcaccttgttgcccaggctggtcaacgagagagaaaagtatttcagagacttaaaaaaagaaccatcggtggtctccagtgtgcttaagagctgcgggtggagctgtttgcgttcctcctgaaggctttggctgccagacatggctgggctgcagatacttgctttactaagaggttttccctccctgccgtccaggtgtgtccacaggtgtccacacaaccaggtgtcgtgaatgtctgttcacactaagtgggcttctcagtaaccccctggccacacccccatctcacccatcccaggagcctcctgggaccacacacgggggtcgggagcttaaaagaacagaaacacggccgggcacagtgctcacacctgtaatcccagcactttgggaggccaaggcaggcagatcaccggaggtcaggagttcgagaccagcctggccaacatggcgaaaccccgtctctactaaaaatacaaaaactagctgagcatgatggagggcgcctataatcccagctacttgggaggctgaggcaggagtaatcgcttgaacccgagaggcaaaggttgccgtgagccgagatcgtgcaggcaaaggttgcagtgagtcgagattgtgccctccagcctgggcgacaacagcaagacttcgtctcaaaaaaaaaaaaaaaaaaaaaaaagccagaaacgcattctgtctcggtctggaggccggaagtctgagctcaaggtgtgggcaggacctcgctccctcggaaacctgcaagggacctcttgcccctgcagcttctggtggcccccagccgtccggagcccatggctgtgtgtctcccgcctctgaccccattgccacacggccaccttcgccctgtctcctataaggactgcagtgtgtgggatgagggtccacccccatgttagtgacctcatcttactgaatcatatctgcggcaaccctgtttctaactaaggtcacatgctgagctacactggggccatgatttcagcataacttttggggatacagctccacccattaacacagatgaactgtgatttatttaaccaaatttctgttcccagtatctcaaccacaattttaaattggcataatgggttatacatagctgtaattattttcttaggataaactcctacaagtggaattgctgggccatgatctttttttgtttgtttgtttagtgagagtgtctcaccctgttgcccaggctggagtgctgtggtgtgatcatggctcacggcagcctcaacctcctggcctcaagtgatcctcctacctcagcctcctgagtagttgggaccacaggtacacaccaccacacttggctttttttttttttttagagttggagtcttgctgtgttgtccaggctggtctcgaactcctggctttaagtgatcctctcatgccctttttttttttttgagacggagtcttgctctgtcacccaggctggagtgcggtggcacaatctcggctcactgcaacctccgcctcccgggttgaagcgattctcctgcctcagcctcccaagtagctggtacaggtgcccgccaccatgcccagctaattcttgtgtttttagtagagactgggtttcatcatattggccaggctggtctcgaactcctaaccttgtgatccgcctacctcggcctcccaaagtactaggattacaggcgtgagccaccgcacccagccccatgattgccttttaagatagggtagctgcactttcactaagacagaggttggccaactccagcccatgggtcaaatgtgaaccacctgctgggttttgttgttgttgtggttttgggacggagtctccctctgttgcccaggctggagtgcagtggtacaatcttggctcactgcaacctccgcctcccaggttcaagcgattctcctgccggctactgtactccgagtagccgggactacaggtgcccaccaccatgcctggctaattttttgtatttttagtagaggcggggtttcaccatgttagccaggatggtctcgatctcctgacctggtgatccgcccgcctcggcctcccacggtgctgggattacaggcgtgagccaccgagcccggcccaccacctgccgttttttaaacccataagccaggcatgggttttataattttaaattgttcaaaaaaccaaaagagtaatattttgtgacatgaaaaattatatgaaattcagatgttgatgaataaagttttattggcacagagcgtgcacatctgctcgcatgctggcttgtggcagggctgaggggctgtgacagccccatatggcccacaaagctgaaaggatttgctgtgaggccctttacataatgcatttgctgatgccagctctaaatatccatatttgcattcagattggtttcagaaataaatatgcgttgaatgcagctgggcctgtgaacgtggtggttgaattcagctgggcctgtgaacttggtcgttgtgtttagaatgtgttgtctttcccaggtgttgtgtgtttgtgctgccgaagctgctgaaggcggcctgtagagggcaggggcccaggcaggcacagtcacttcactggtgtcttggttggtgcttggagcacctcaggagggaatatgtccttaaggaaggaagacaggccagacagaggggcctcggagtgttggcttctaccaggctcctgctgaggtgggcgctcagggagacggctggaggatccgaggagagccaaagccccaggcggtgccctccccttctccttctagagcaaagtcctggcccactgcctgtttaaaagcacttttttccaacaatacacactgtaaaatttgaagaagttttcagtgaacaccgccgctgccactcacctccggagtttgccgtgggcatttgctgtgctggtgccatcacacctggcatcaccccggcctcctggcatcaccccagcctccgtgcttcctgccctgtgctcacccgtcctcctgcttggggtttttattgtaaaatacacagaacgtaaaattgaccatgacagccaccttaacgtgcaccactcgggcacagtccattcacagcgtggtgcctccatcccttctacctgcttccaaacagtccatcccaagaagaaaccggtactcatcagcaggccctccccagcacccacccccagccccggcagccactcagccgcctcctgcctctgcggaccggcctgttccggaggcttaatgagcaaatcacagcctgtgtggcccttgtgtctgcttccttccctcacatgaagctttccagggccgtgcgcggtgtggggtgcccttcctttcgatggttgggtagtgtgccgcggtacgtgcgtgagtttcctgagacataacacgttaccacaggccaggtggccttagcggaaatggattcttgccggattctggaggccagaagtgcaaaatcaaggtgtcagccgggcccctccccctcaggctctccaggaaggtccttgctgtcccctggctggtggctgcgtcactccagtctcggcctcggccttcacccggcatctctactgcatgtctgcgtctctaagggcccagtcataggattgagggcccaccctggcccagcgtgacctcatcttagctcactacatctgcagagaccctacttccaaatgtggccacacccacgtagtacacgccggccgcactttgtcgtctgccgatgggcgctcagggtgctcctgccttttggccactgagtcgtgctgccctggacgctcgtatgcaggcctgcgtgtggacgtaagtttcagtctcttgggtgtacagctaggagtggagttgcagcgtggaactgcagggtcacacgataactgggcttctgggggacagttaccagttgactttgaaatctagacgtgtacagacatacgagggcctgtgtatttatgttgaaaatagatgcacgtgtttagaggccagctcctgcgagcatgcagatgctggtgtcaggctgggaggaggcagacggacacattccccacctgaagaccaagcagaagtggaggcgaaagacagcgtgggctgaccgtggagcggccccatcgtgcacgcacgcaggcgatgctgaggtttgggctggcgtggagcggccccatcgtgcacgcacgcaggcgatgctggggtttggccgagctctgccgctggctgggacacagggtggtgctggcttccacggtccccgacacgctcttggcaccatgggcagctccccaggccagaagcacctgcagaaggcgctcattcctcctccccgtgctcttccctgcagatgggatggggtgacctcggggtgtatggagagccctccagagagaccccgaatttggaccggatggctgcagaagggctgcttttcccaaacttctattctgccaaccctctgtgctcgccatgtaagtcagcggggccctcgcccccaggaaggggtgagcccaacaggccgaggcctcccgggtccttccagccctgactctgggcggctgcatcaaccttgtctattcctactactgcagggagggtggcaggtgggctcaggcctttctcatcaaatcccagcccggctccgtgccatgtggggtgcggcacctgctgggttttcagggtcgaagttgcggtattgttggtggctgctgttctgtttcccagagtcgagtgctgtggccgcctggggagaggtgctgcagtgtggctccgtctcagggtacctgggaagcaggagtcccactccctccctccctggggagagtctctcctgctggagacagaaacatgtggtgttgatcgtgaggaagaggagaaggcagggcacggggctggtgctcgaggatgggggcgtgtggacctgcacgcccagtgggtgtcccaggagcctgcgaaaggaggcggggtcttggggacaacgctgagctgcagggcccaagggccacgcgtctttcagtggaatgggtgccgtgccccacccaggtggtggagacgctaacggggattgacaggcgtggcagccccttgtaaacctgcgcgtgcctcgtctgtcacgcgtctgtctactcgttggggctcttgttgacgcccggggtctgagccacacccttcttatccagtttctgtttctgtcacctccacatagcgagggcggcactgctcacaggacggctacccatccgcaatggcttctacaccaccaacgcccatgccagaaacggtaggctgcccaccgcctccagggacacccttggggtgcagggttgggcaggtgggctacgggtggtgcccgtgtctccgggactcgggtggcaagctgcaggtggggtaccgctggtgcctgggtctctgggacttaggtggaagtgcaggcccccctagctggcttccttccctgccctggcccagtggggactgagcggagggtgcccagtctggcctaaggagctgagccggcacccccaccccagaagctcccactccccaggcgggtgagccgcacacccacagggaggccggggctgtggcatcagcggcagttctggaatgttctggaatcgctgtgcttgaggggtttggatgggctccccaggggcatctcacaggggaagtgggatttccagtggcatttgaggaaagggaaggacgggggaggcaggggtggggcagtgcagcatcacgtggcatattccagagacccctggagaccaggcaggtgggaggctggcctgagaggcagggtggggcctgagggtgggcaggagtcccaaggaaggcgctggggggcacggagtctgccccgtccccaccctctggtgatggcactggctctgaggggtgcctggaaaaatcttgggaagtgccatgccctgtggacgcgcagcccccaggcacagcctttgaccccgaggggccagtgtcctgttaggatgtgtggacgcagcccccagtgtcctgttaggatggggttggtggcagcttctcggggtctcctcggggctcacccagcgctgctcttccagcctacacaccgcaggagattgtgggcggcatcccagactcggagcagctcctgccggagcttctgaagaaggccggctacgtcagcaagattgtcggcaagtggtaagtctcctggccacgcctgcccaggcgtcctgctccatccacttcctggccttggttccaagggacatggccacaagtttccaaatgaggagggtgtcttgggtgggaaacggcagctgattctgggtgtgttcaggtgtctccagcgtccctgtgcaggccagcgtgaccttgccagcaggatctcaggtcaccaggctggtcccacggccgcgagtatcctgcggcatcagactccgcaggcctgtcaccgtcatccctcgagtcacagcccctagcacccgccaccactgccccccggctgcctcctgccacgtcgtccttggaggggccacgtcattacacacaggagctgtggcggaggagctgcctgtccaccctaggggcctgttggatggtgaaagctctggtctaaaccacaaagaagccaccaggaaggagagtaacagcctagcagttgatgaaatcctgagctgatgagagcttgggtgctacacagcccccacgctgcggttttaggcgcacaggatgtttcatttcttttactccctgggacgcctgagtgagcctagagggttgggtaggagtcacctgtcccgaatttctctccacttgttggagcgttccccgcctgtcaggtccgcatgccgcctcctccaggaagcccttgctgctttcccagcctctgtgatccccagtcggctgcctgtggctcctgccggtccccttcagatggatgctccttggatgtagatggtcatggcagccaggaatttgctgagcttgatcactggatgaggaggacccagaggctgtctagggagcacttcatcattcttcagatgagaggaagcagcctgccgagctgagctctcagaaagcacagggcagagctgatgggcacagcagctgcagagtcctcacacagggaggttgggccccacgcagcctgcatagtccctgagccagtgccaggggccatggcggaagtcagcccccgagggccactggagcgcgtgagtactgtgccaacaggaggaagagccggtggcctctccaagtgacaagccccacagtgacccagagctctccgcctggcctggcagctctgtcttgggcccagcggcctcctatgcatggtcattggtgccggtggccagagctagacagggagtgggtctccatagaggcctcgaggctcctgaacagctgtcgacgggagagaggggaccccaaggagtgggagcaggagccaggcagacctcagagccccaggctcctcccgcacatggtgcagtggctggatggcccgggctgggtcctacagcggctgctcagtcaggtgggggggtccctatcccagcagggtcccctctcagggcagtaggggtgttgtcagccatgactcagacttccctgaggcccctcacctggactcaaaaagaggctgcttgatctgcatgaagccacgcgggtgtgcagggcagggacttgagtcccagagggccgcggacactccctgctccaggtcacctgctggtgagtgccaggccccactgctgctttcggacaaggacgttgagctgacagcttaatttgtgtagcgtcctgcccatgtgcttcccctgagcaaggcctttgtgctgcggacgtggaagcacgagtgtcccctgtggccgggcggtgacctgcggacgttggcgcacgagtgtcccctgtggccgggcggtgacctgcggacgtgggcgcacgagtgtcccctgtggccgggcggtgacctgtggacgtgggcgcacgagtgtcccctgtggccgggcggtgaccagcggacgtgggcgcacgagtgtcccctgtggttgggcggtgacctgcggacgtggacgcacgagtgtcccctgtggctgggtggtgacctgcctggggtgttcagggatgtcggggtgctctagcaatgggcccaagtgctgaagacccaaaggaaacagcccggagttggcagccaagggagctctgaggtcacagagaggtccaggcgtgcttacctgagagaggagatggggagaggcagctcgggaggtccagggtacagaggccatgtccagggaggcagcagaaatctgctgtggtgaaatctgcctcggggaaatctgcgtcggggatgctgctttcaaagccgtagctgcagaagaactttcctcagacgacacgcaactgacgtgagacccgcccacggccgtgcctagaagccatctcataccacctctcctgcagcccgttctgaagagcagccgcaagctggattcgttccaggacaggacaggctgcgcaaggaaacccggacagctggcctgggggccagggcgagtgggcacagaggtgtggcctgcagggctgctgtgggccggaggatgagattaggtgccaccagagggtgggagcacaaggtctgcgggggattgtcagaaggggagtgcgggacggggtctggaggggttcccacaggcctggggtgtgatgcctggcgatggccattcccagcaggtgaaccccggtcccaggagagcggttggtggaggtcaccagtgtggccacactgtcacgttctcttgtcgtcactctaatccctgcctctgccagggtcctggggatgtgggtacagctggcaggccccggggctcccgcacggcacacaacgccccgcccagtcgtcatcctggggccattgccctgaactgggagatgagactctgagcgcctcggtgtggagagacccagtaattacctggcaggaaatattttctgccctggaaaacccagaggagacacacttgggttcgaggcatgacccgcaaaactctcctgggagttcagaaaacgtggaaggaaggagccggggccacgaggggcatgtcaggcgggttccaggcggctgggaggctcctcacgatgcaccacccttcaccgtgcagggaaccccggccgccgccatgcctgccgccctcggttgtgcccagacgctctgcagggtaggcgggcagtgccagcaccctcctcgggtgaggccttggtcttttgtccctgccgtgcccaggcatagcccatactcagtgctggagggtgctcgtcttaccaagaattttgtgaaggtggtatctgttgctgctcagaacttccgagtgtccccacgtggggtccctgaagtgtcctgggttcctgtttccaggcatctgggtcacaggccccagttccaccccctgaagcacggatttgatgagtggtttggatcccccaactgccactttggaccttatgacaacaaggccaggcccaacatccctgtgtacagggactgggagatggttggcaggtaatggagccccaccccttcccctcccacgtcctgaactgctgtgcccggcgtgcctgccccccgcctctagcactggtgggctcaagtcgccactcatgagggctggtctgtccctgggtccccgggcaccgagggctttggtttggtggcttctgtcccaccaagttttgccccagagcctatgagactcctgcctggggtttcccaccttttcagggtcgtagatccctgtagctgtcctgagagaggaaggcccccagcagagcgagcccacacggtctgccctagctgtcagggtactgcccatgtggtctacgggtggggaggccggctgtgctccagacatccagggacatgggcaggacaggaggtgggatgaaacccccactgggagccacaccaggagcaaaagccgctgtccagacagagccgtcctggtgcccgggcgtgggggcagcacctcttgacacggcagtgccgggtccgggaccctcatcttttgtgaattttattttgcttaacttgactcttcttggcggaagtgctcattcattacatgacggtgaccagaagcagcaccagcttgctgcctctttctagatagagccccgtggaggtgtgggagtcgcaccacgcagcccccatttgaagtgtgcagttctgtggttggcattagtcacaggctgggacaaccagcactgtagctgcttcagaacgagccccatggcctgagcggcggctccccagccccagccgagtgaccacagccgcctcactgccttcaccttggtgtcgtgccctcagccccattcccccatcttcccatgtggcaggttattgcagcaccggcctcagccaggtcatcagatgcaagaccgtgccctgggggagcgagggatgcgtccagcttggttgttccctgagtggacatttcatttccaggcttccttttttttttttttcttgagacaggatcttgctctgtcacccagggtggattgcagtggcgcgatctcggctcactgcaacctccgcctcctgggttcaagcaattctcctgcctcagcctctcaagtagctgggattacaggcgtgcgccaccacgcccagctaatttttgtatttttagtagagacagagtttcaccatgttgcccaggctggtctcaaattcctgacctcatgatccaccttcctcagcctcccaaaatgctgggattacaggcatgagccatgacgcccagccctagccttcttttaaatgaagcccatggctttgctggtgaaatcagggagaacgggactttcttggcctaaattctgaagtctgtctggatctgtgttcttttcagatattatgaagaatttcctattaatctgaagacgggggaagccaacctcacccagatctacctgcaggtgatggggaccgcaccatcctcgccctgtgggacgcatggggacggggaccgcaccaacctcatcctgtgggaggcgtggggacaggaatgcatcaacctcaccccgtgggaggcatgggttcagggacctcatcaccctcgccccgtgggacgcgtggggacggggaccgcaccatcctcgccccgtgggacgcgtggggacggggaccgcaccaaccttgccccgtgggacgcgtggggacggggaccgcaccaacctcgccccgtgggacgtgtggggacggggaccgtgggaggcatgaggaggtcggcctgaggctggaggacgacggtgtggctctctccataggaagccctggacttcattaagagacaggcacggcaccacccctttttcctctactgggctgtcgacgccacgcacgcacccgtctatgcctccaaacccttcttgggcaccagtcagcgagggcggtgagtcctggctccatggagcatagacctcgctggaggccccagctgtgcttgactccagagatgggacactcagtaccgtggcatttaggccaattatggaaaggccagagcaaccccacccctttgaagccgtccactggcctgggatcagcagaggagggctgtggtgggggtgctggctctgtccttcataagccacatgaacttgaactgaggccattcctcttctgggaagaggccggccagtttcactgtggtctgtgaagttatgatttaatgaactccgtgaatcacagtatgccgttggctgcctgatccatttgtcaccatcctccaggtatggagatgccttttgtcaccatcctgcaggtatggagacgccgtccgggagattgatgacagcattgggaagatactggagctcctccaagacctgcacgtcgcggacaacaccttcgtcttcttcacgtcggacaacggcgctgccctcatttccgcccccgaacaaggtgagtgctcgctgtcacttctcacggtttccccacagccagcgtgtcagcgaagagtgcctggaccggctgtgcccacggggtctgtggtgggcagagcatgaagggtccctctgggtccagcgggaggagcagatgtcaccgagcctcgagcaaggcccttctggcccaggactaacctggaagcaggagtgaccttgaacttgggggtggggaggaggtgacacaggggagagggtttgtcttggaagaggctgacgcctcccgaagggtgaccccggaggccggaggctttggaggccgcatggaaacagcagggccggtggagcagggtgtccctgctgaggtgggggccggcaccccagaccccgagcagccctgtgagtgtggcctggacctggtcacccaggggccgggctgcctccatgaagatggactcctgcccccaccacagccctgtcaagtggttcctgggatggagcttcagcctttcccccgctcggcactgatgaatgcctgacccatccccagcgccaacaaacctgaacccgcctcttcccagaccacgcgggggggggccctgcagcctcttcccagaccacacggggggggccctacagcctcttcccagaccacgctgaggggggccctgcagcctcttcccagaccacgcggtggggagagccctacagcctcttcccagaccacgctgaggggggccctgcagcctcttcccagaccacacggggggggccctacagcctcttcccagaccacgctgaggggggccctgcagcctcttcccagaccacgcgggggggccctgcagcctcttcccagaccacgcgggggggggccctgcagcctcttcccagaccacgtggtggggagagccctacagcctcgtcccagaccatgtcggggggcgcctacagcccagtgtgctgcggggattgggggcttcagagtttcaagtgatagaaaccagcacagctgaaagccaaaacagaagcataggctccctcgcgccacgtcccaccagatagctcccctgggtgagcctggctctcgtgcaggccctccggacagctccatctcccgcccactggagtcagacccacgagtcgaggcccccaacagacccatgtgtggagggctacaggcagctcccaggaggcagggtgctgggtggggggagggtggtgttggccgtcattccccatggggagcccgggggggcccacctcgacgccagcacccacaaccaccagccagcaggggcaagggtcccagcgacctgagtcttcatttctaaatgatggaatgtttcataccaacaaatggcatgtttcataccaacaaatggtatatgtacctatttgtaacaagatgagaacccacacacccagcacccagcacaagactagaaacagaacatcccagagaaagaaagcaggggagggggctgggcgtggtggctcacacctgtaatcccagcactttgggaggctgaggcgggtggatcacgaggtcaggaggtcgagaccatcctggctaacacggtgaaaccccatctctactgaaaaacaaaaaattagccaggcgtggtggcgggcacctgtagtcccagctgctgggcaggctaagtcaagagaatgacttgaacccgggaggcggagcttgcagtgagccgagatcgcaccactgcactccagcctgggcgacagagcgagactccatgtcaaaaaaaaaaaaaaaggggatgggagagagaaggaaagaaagggagggagggaaggagaagaagcacagcatggcctcctgtgagcctgagtgtcccctagaagtggccagtgtccccagctcagtgtccattgtcccttcacaggttctgtggctctgctgctgtgagcagggccctccctgagacaggccgggttgcgggtgttggcgtgtttgcccgtgaggggctctgagcagagctgcctgcgaggttccgttcagaggcttccccacgctgccgctcggggttggatggcagcgcaggaaggagctgcggtgactttgcctcccctggatggttcactttttcactgccggaaaaatattttctttttttttttttttttttttttgagaaggagtctcgctctgttgcccaggctggagtgcagtggcgcgatctcagctcactgtagccttgacctcctgggctccagcaatcctcccacctcagcctcctgagtagctgggactacaggacgtgccgccacacccagctaatttttgtatttttgtagagatggggtttagccgtggtctctctttggtagaaaccagtctaggctagtcttgaactcccgagttcaagcagtccccctgcttcggcctcccaaggtactgggatgacaggtatgagccaccgcagccggccccttcgtttcctttttcccttttattcaggggacccgaagctgagagagcctcaagtggctcaggctacagcagcaggggtggcttttgtccctgacgtgggccccccacccccttcttccatgtctgggagtgagccagggatggtgtagtcacctgagatggcctttgccccgtgaccacttcccacaagtgatggttcagaaaccaaaatccggtcttgggggcttgtcagaaacacagattcctacgccccaccgtgactgactgagtcagaaccatggggaggccagaagttggctgcattttaagtaccccaaacaccgggaggcttgtgaacattcacgttcgggaagcaccagtcggcagctgcgcacgtggcacccagggcctctgctgcgggagtgtacctctctgagtcttgctgacaccgtatggttgtgtttccatttcctcagtgggcatgatgtccccactttctccaggagactttgcagccgcggcatctcagatgagcccctggagagccaccccgaggctcggatcatgcactccagccagagtgccttggccgggccctttgtccctatgaccagtctcagtgactcagtggggagggagggggagggcctggggacatctggtcccagtggcctgacaagggcccctctctcccaggtggcagcaacggcccctttctgtgtgggaagcagaccacgtttgaaggagggatgagggagcctgccctcgcatggtggccagggcacgtcactgcaggccaggtgagtcagcgtccaccggtctgccgggcagcaggtccaggcctgcagccatcccagggtgtgtgcgcccctcactggccacctcccccatgcaccccgtgctcatcctcaccgctctcctccccacgcaccctgtgctcagcctccacgcaccccatgctcagcctcaccaccctcctccccacgctccccgtgctcggcctcaccgctctcctccccacgcaccccgtgctcggcctcaccgctctcctccccacgcaccccgtgctcggcctcaccgctctcctccccacgcaccccgtgctcggcctcaccgctctcctccccacgcaccccgtgctcggcctcaccgctctcctccccacgctccccgtgctcggcctcaccgctctcctccccacgcaccccgtgctcggcctcaccgctctcctccccacgcaccccgtgctcggcctcaccgctctcctccccacgcaccccgtgctcggcctcaccgctctcctccccacgcaccccgtgctcggcctcaccgctctcctccccacgcaccccgtgctcggcctcaccgctctcctccccacgcaccccgtgctcggcctcaccgctctcctccccacgcaccccgtgctcggcctcaccgctctcctccccacgctccccgtgctcggcctcaccgctctcctccccacgcaccccgtgctcggcctcaccgctctcctccccacgcaccccgtgctcggcctcaccgctctcctccccacgcaccccgtgctcggcctcaccgctctcctcggaaccaggtccctctcggtggctctcggtgtgtagggcttgctgtgcttggtcagacaggcaggaaggctctcggtggggactggagccacgtatactgccgtgtgtcacgtgggtgctggtaatgactgtgtggtgaggagacatccgtggtccagtcaccgcagcagtcctgagttaaatggagctaaacaggtttcttccctgcaggacttatcagtgcctttagcatgctggtgggcaccatgagcttctagaaggggcttagagcaggctgagtgtttaaaaacctgtctgtctactacagaatcggtcgttttttcccccaaagcacatcttctcaggccagtgtcctaaggacactcagagaacagcagcagcccgacacgagaccgttggtgtctgtctgccgcatggggtgcggacctcggtggtggcctgggtcctggctgggcgagggtgcgccctgccatctcagtgtgaccaccttcatgctgtcactgcatctcctctggcccaggaagctgcccctcggttgagaatcacaccgtgtggtcttctgtaacaggcacttgagccagacatacccatcaacacgcggggctgagtctggtgtttgtaaacgaccgctgtttcttcactgtttcttagtcttttgccctcccaatggcctccagaggcagccatccccttcaagtggccccacgaggatggggggggctcccagtggcagctggaacatcacacatgacgacagccagagtcaacatggggctcatggggctgagtgaagacgtgcgtggggccagctccttctggaggctccaggagatgttctgttccctgccttttcccaatcctagtagctgccccattcctgagctcctggcccctccaccgtcaaagccagcagcacgcaggcatctgtccctggccttcctgttccacgttttttttttttttttttttttttttgagatgaagtctcactctgttgcccaggctggagtgcagtagtgcaatctcggctcactgcaacttctacctcccagattcaagcgattctcctgcctcagcctcccgagtagctgggactacaggcatgctctaccatgcccggctaatttttgtatttttagtagagacggagtttcactatgttggccagtatggtctcaatctcctgacctcgtgatctgcccgcctcggcctccgaaagtgttgggattacaggcgtgagccaccgcgcccggcgcctgttccacttttgaggaccctgtggctgtgtcccaccccaccccctgctcacccaggctggcctccctgtttcgagcctcgctgatgagcggcctgcgttgtgtctgccgcctcaattgcctggcctggtcgcgcgcctgaaggcccagggattggctgctgttctgccagatcctcctcttccccactcattctacacatcaggaaactgaggccagagaggaagtcgtctgtcagggtcccccaattactagggagcagaggtgggagcaggcgcctggctgtggatcctgcactcctgcccaccatgcctgggcagtcccctgtgtccccagcagccagtgggactgggggcggcaactgccaagggcgcctgttctctacagctgtctgggcctccctcagaccctgcccagggcagcctttgtctgacatgggactcctgggccaccccaagttcccaggaccctgaaggtggaagagaccccacggttcactgaaaaggcagctgcggctccgtgtgaagggcagagtggctgtgagagtgaccgccttgttgtgcaggagaagcatgggtggtgggcacggcctcctttgtggtgtggggtgcccctaggacagaatgcagctgtgccgccccctccactcccctgagcgccatccccctgagggtagggatgggccatttggtttcttgtgtgggggcacctgcagggagtggccggtggtcactcagtgaacactgtgacgttggcatgagactcaggaactgtgtagctctgggagacgttggcatgagactcgggacccgcgtagctctgggagacgttggcatgagactcaggaactgtgtagctctgggagacgttggcatgagactcgggacccgtgtagctctgggagacgttggcgtgagactcgggacccgcgtaggtctgggagacgatggcgtgagacccgggacccgcgtaggtctgggagacgatggcatgagactcgggacctgcgtaggtctgggagatgtgaggttccccactgcagtgggtgcccaccaggccgggacagggctggggctctgctccccaggctgggagccacccgtggctgtgctcagcagcagcctggaaaaggtgaggggagccaccccagcgccgcccggctccatgcgtagtgggttcagggacgtctgtaccccacagacctccccacccacctgcccacggaaaggctccagctgagaaaaatgccaatttcagcgttttggaaccttgccatctgcctcgctccctgaagaagggaaaccctctccccacctgaggaagggaaaccctcttcccagagccaccaagttgccttttcccgtgggccacaaagtgaaattgaattcgatggcatcaggcctgtgcaccaggacaccacgacggggtttcagtgaaagcgcctgacgtctgtcccgacagttccctctgggcaggggaggctttagtccctgcagccctggattctgagtgaagtctcgaaagcgctgataacggtttcagtgacttctcccacagccgcagctgcccactgcatttctggatgtttctggaaggcatcgctgcctggagagttcttcgaaaacgctccacgaggaccctgcctgtgctgacaccactcccgcccgcccgccctgccggcaccacaagcactgctccgcagttattttttcagatgacaaaagcatctggatttctttcctttattattctgtcctttaaaggacacgggaaggacgggaagcagtcgcacagacactgctgaccagacctggggaagcttctcaccttctgcaaagcttcctgaactttcctggcaaacgctgagctttgcattccctgccccacactgggcgctgcagaccccacatcccgtgagcggctgcagcgcggagtgagtgtccctgtgaggccagggctcctctgttggagaagctggcgatcgccgtctgccctagcgaggagctggctgcaggcggcgagggtgcccctggaccgtggggagggctgtcgacactgggtgggagctccagggcctggcagcggatggcggtccctgcccagctgccccaggggctgagcttgccaggcaggggtgtctctccagccccaccccagtctccccgtcgagtgacccaagcctggagcccccgagttaagaaagagacagggccgccgggctcatgcctgtaatcccagcactttgggaggctgaggcgggcagatcacctgaggttgggagttcgagaccagcctgaccaacatggagaaaccccgtctctactaaaagtacaaaattagccgggcgtagtgacacatacctgtaatcccagcttctcgggagactgagtcaggagaatcacttgaacctggaaggcagaggttgtggtgagctgagatcgcaccactgcactccagcctgggtgacaagaacaaaactccatctcaaaaaacaaaaacaaaaaacaagaagcagacagggccactgagggaagccagatggcacgctctgctcatggctggtcagcagtgcccacgccctccggaggtcaaggcacggcgggaaagacagcctcctgcctgtcctggagctctctgggtgtgtcaggagccgtccccaccccagccactcggagctgctcctgtccagcctcagctgcccctccacatctggtttttctccacctgctcctctgacttaaggggcagggctcacagtggccttagggcattcagtgttagagcgaggctgatcctctccggacaggtgggcctggaggggcatctccctgggagggctgtgattctcctttcatctgatccacagaggcagagaagggtgccagggagtgagggcgtggcctggctctggggtctttgggcctggtttgaggctcctctgtctctcacaggccttgtgaccccgctcagtccctgctgtgggcgtgtgagcatgtatgcatatctgtagacccagctgggcagcggggctcacgcccccccagggattggcccccagccccatcgggtcggtgcagagtgccctgaccgtgttgctgccatgtgtttcaggtgagccaccagctgggcagcatcatggacctcttcaccaccagcctggcccttgcgggcctgacgccgcccagcgacagggccattgatggcctcaacctcctccccaccctcctgcagggccggctgatggacaggttggtgctagacctgccccggccccttcccccgatccaagtagtgaagcccagagctgctaatcaggtgcaacccccaggcccagcagccctcctggttctggacacaggcgtgctcgtgcccagggcaggaggaggcaggggtgcctgagacgagaggacctggggacctgcctgtggggcaggggccatcctgggagggtccaagcacagcgaggccctggctttcaagaaagccttaggagggagggcaaggccaggagaggggcctcatccctgcctgtacccgggcacatgccgcccctgcccgccccacccctgttccctgcctgtacccagacacacgccacccctgtccgccgcacccctgttccctgcctgtacccagacacacgccgcccctgtccgccccacccctgttccctgcctgcagcccgggcacatgccacccctgcctgccccacccctgttgcctgcctgtacctgggcacacgccgcccctgcccgccccacccctgttccctgtctgtagcccgggcacacgctgcccctgtctgccccacccctgttccctgcccagcctggtttttggtgcctcatggcttcctgtagcttccttcttccttccatccaagtcgctgctctgccaagtccatggcccagctcttaccttctgtccaaatccttagtgtccaaagtccatttcctaccccctgagagcagccaccattccactcaaaccacgtttcctgggtggtcctgaagggatgaggattccaaaggctcaacgggaagcaaggtggggacggcccaaggcagctgccgcctccggctatctggggccgggtagagggagttttgctcacttgtcccctctcgagacctggcacaagtggttggtcactgtggggagagacggtgcccagctgcgtcccccactccccgttcctgactcgcaggcccaacatggtcaggagaccccgtgccgcctgcttatcctcttgtctgcccaccctccccagggtctggcccagccttgccaaggaccagcaatgaggggacgcccaggcaccctagccccggccgcccaggcaccccagacacccaggcaccccagccccagctgcccaggaatcccagtcccggacacccaggcaccccagccccggctgcccagaaaccccagccccagacatccaggcaccccagccccggccgcccagacacccaggtaccccagccctggccgcccaggcactccagccctagacacccaggcaccccagacacccagtcaccccagccccggccacccagacacccagccaccccagccccggttgcccagacaccccagccccagacacccaggcaccccagatacccagtcgccccggccacccaggcaccccagccccggctgcccaaacacccaggcaccccagccctggccacccagacaccccagccccagacacccaggcgccccagacacccaggcaccctagacacccagtcaccccagccccggccgcccaaacacccagtcaccccagccccggccgcccagacaccccagccccagacacccaggcgccccagatacccagtcaccccagccctggccacccaggagctccagccccggccgcccaggcaccccagccccagccaccttgcgggcctttttacttttcaatcatctttgtaaagtatcaaccaagacctcacgtggaggcatgagccactgatgacagacgcagcccagagcctccaggtggccccagcgtgtccttcctgtcattacatggtcctcccctcccatcccacaggcctatcttctattaccgtggcgacacgctgatggcggccaccctcgggcagcacaaggctcacttctggacctggaccaactcctgggagaacttcagacaggtacagggctcgggacgtgggcgcaggcggagctgcccccatctctatccagacgtggcccctgagcaccgtcctgggggaggcacaggagggtgagacaggcaggaactccaccccctccacagccttctctgtgtggcccccagtcgttcagcgtggcctagggcatggcagctgacaggctggagaggagggagggacctcttcctgccccgcgtgatgacagtagccccgcggcatagctacaggcgtggcctagaccctggtcaggtggcccccatgggcctctccatcctgccagggcatctgagcctcccccacaccccaggctggaggcgacagagacgtggcctgcttggcccaggtgctacatgggggccgcagcattggcatcaccacagcaacccccagtgtgggagggtgaaacgccacacgcacagggcctggggctcctgccgccccaggctaccccagcattgtcagcgccaggctttctcccacgagccctcgcctcaagcctcctgctccctccccacggtcttttctggcccctgctgacccctacgctccagcatcccccagcccctcctgagaggtctctctcagccccacccactcccagcatcaaagtcttgagatatgaaccccctgctaatctgccttaattgggaagaaaatcatttagtgtaatggagagtctaaagactggaagtgagaactggggctgagggctgagcacccaggctgaggagggaagctgctcgtggggcagtgtctggagggcaatgatgcccaggagtgttttggctcctccccaccctgtgcaggccccgcacccgctcttctttcgggttttacccagcactgtcacctgcaagggccatcctgggcatcggtccccggcattgccgcctgtgagggccgtcctgggcatcggtccccggcattgccgcctgcgagggccgtcctgggcatcggtccccgggcattgccgcctgcgagggccgtcctgggcatcgttccccgggcattgccgcctgcgagggccgtcctgggcatcggtccccggcattgccgcctgcgagggccgtcctgggcatcggtccccggcattgccgcctgcgagggccgtcctgggcatcggtccccggcattgccgcctgcgagggccgtcctgggcatcggtccccggcattgccgcctgcgagggccgtcctgggcatcggtccccggcattgccgcctgcgagggccgtcctgggcatcggtccccggcattgccgcctgcgagggccgtcctgggcacagtcctcggacgagccccttggcctgcagcacccgctctgggaatgttagaggcatacctcgcctttcccgaatcaggaggcccaggggcagcagaaagagaattgtggttactgtaaaatccttgcccttcttgagtgtgtgaatctgtgtcagctccctgggtctgtttttgttttctgtgttttctcttgcctttcacatgttggtcctgctcctccctgtcttagggtttctgtagggattctgagcgttgtggctctcccttctcccagggcagggcctcccttcccgtccctttccctcccctcccttccccagcagagagtaggctgttaaaaggggctttcctccatgaaattagtggcagtccagatctgaggctggctaaggtgttttaaatacactcacctgcctcgcaaagaagaggggtacatgaaaacagggtacgtgaggcatgccagctacgcatctcgggcccagagcgggtggcttcacctcctccacaggatgcttatgggcccgctagtccttcagcgtttagccagcgccctgcaccatgctgagtaccagggacgctgctaggcacaggcagacgagacccccccacggcccccagttaggggctccaggacacaggcagacaaggcccctcacggccgcagtcaggggctccaggacacgggcagacgaggcccctcacggccgcaggtcaggggctccaggacacaccttccctcttctcattgcagggcattgatttctgccctgggcagaacgtttcaggggtcacaactcacaatctggaagaccacacgaagctgcccctgatcttccacctgggacgggacccaggggagaggttccccctcaggtgagtcggtgcagggcctcctggctgctgaggcagtgccagccggactcccccaaatgcaggctccacagggacagagccctctgcaccctgcccgccgcctccccttgcctgcatctgctgttgctattcatacccacacgtgcttggtggcctgccctcctcccagggtgcctgctgctgcccaccctggtggtctccccacttctgccccttctgggccaccatccacctggcccccagtgatgtatcccctactctgagctgcatttggggatggctgaggccagaggggaggggtccaggccctggggcaagtaggaggtacaaggacacaggtcagctagcaggaggaatggcagaaagccaccagccccagctccaccctctgctctctgggccttgtcctcaccccaccgaggatgccggagtctgcgccatcacctgccagttttcagggaagccctccccttaccctcaggagtcttgagggtcatggtcgccagtaccagactcacctgctggcagctccttaggggcgacacagaggccccaacacttggctggagaccccgccctggcttcctttttttttgtccgaacccatctccctgggctagggctacctggaggcttccccccctcaccccagcaggatgagcaggtccccaattcctgctcctggcctgggggtcctggggcacgtgcatgcctagtggtctccagcattcctgccctatcgagttggtcctgggaagacccaggagcatcaggggagtggcgtgcagaggcagaaccaggcctgagcacagcggttgctccctgcccaggctttctatgctccccgatgggcctgggtttgagtagggccggtgggaggcagcagagagcagtacaggaccgagggtggcagcaccaccgccaaggtgccctgaggctcctgcaccctctggacggggcagccgccttcccacggggctgagcctgcggtgaggctcctgggctgcagcccctcagggatcccttgggcacttcctcggcagcacctctcctccaccgagcgtccagctcagaagcccaggatggtgactgcgggaaggcagcatggagcctggagtggacagcagtgtccccaggcccaggtccacccacacctcccagcttggcctgaagggaagtagggcctgtgccttgtgattaaggcacgggtggcgctgggtccaaggccaaatgccctgagtccagagggaggagacacagacatggtgaaggccacgggacgagacggggactggacagagcgccaccagcctcggctcacctggggccactggagctggaagaggcaggaaggagccccagttcctccaggggtgcacagccctgagacccttggtttcagcctctggcctctggaaaagtgaggggcatctgcagtttcattgttttaagccccagttcatggtcatatgttgtgggggtgccgagatacagagacagacgcccccgggggactcgtgatcacccatgggggtgagacccgtgaaaccatggggggcctggagcttggggccttgtggagctggaggggctgtctgggagccccctgtgcccgcagaagtcactgaggagccaacagcccccccagctggaagcgccgtcccagggggaccacggggagcagattgcaggccccagttacacagaacaagctgctggccacaccggtgcccgccacaccccccacaggctggtcgctccagggaccacccgaggttaaagcctggatggcggtgccccctcgcgtccactgggcgtgattggcatccacaggggggtcctcagggccactgctccccgcctgttgcgtttgctggagcccctccagccaggccagagcagagacacagtcccacccaccacagccacccagccccgccctcacagctggagaaggcagggttatttcaaagcaaacccaggcagcaggcagagcttcccagagggggtcacaaggaggcccagctgtcggccatgcctttgagaaccactgtccctgaggtcacacacccatgacacagcctgattcaccgtgggctgcttctcagacacagacacacatgtcactttgccaggagcctctctaaattaaagacgggtggccggtcgccatggttcatgcctgtaatcccagcactttgggaggctgaggtgagtggatcacctgaggtcaggagtttgagaccagcctggcctacatggtgaaatcccatctctaccaaaatacaaaaaattagctggatgtgttggtcggtgcctgtaatcccagctactcgagaaggtgaggcgggagaattgcttgaacccaggaggcggaggttgcagtgagctgagatcgcaccactgcactccagcctgggtgacagagcaagactccgtctaaagaaaaaaagacgacggggccaggcatggtcactcacacctgtgatcccagcactttgggaggccgaggtaggaggatctcttgagccccaggagtttgagaccagcctggtcaacacagcaagaccttactggtacagaaaataaaaaattaaggccgggcacagtggctcacacctgtaatcccagcactttgggaggccgaggcaggcagatcatgaggtcaggagttcgagaccagcctgaccaacatggtgaaaccccgtctctactaaaaatataaaaattagccaggcgtggtggcgggcgcctgtactcccagctactcaggaggctgaggcaggagaatcgcttgaaccagggaggcggaggttgcagtgagctgagatcatgccattgcactccagcctaggtgacagcgcgagactctctctcaaaaaataataattaaaattagccaggcacagtgatctatggtcccagctactcaagagactgaggcaggaagatcgcttgagcctggaaggtcaaggctgcagtgagctgctgtctcaccactccagcctgggtaacagagcaagatcctgtctctaaaaaataaatgaaataaacaagattaaagcaacaagccaggccacggccttcggggacgctcaccgtcagaaagtgcacgtgcagttcacgccagttctcaaccagcagtatttggccacagaatcctgcagaaacacaaatgcacctgagaccctcctggattaaaaatggaccctgtgctcaggggcgctgtgtgaagcccaggctgggaccaggacaggcatctccgcgggcaccaagcggggagccctgaaggaccccagctctcctgaaggtcgccctctgatgcaaccccaggcctgaggcctaagcagggagtgggtggatcgagcagaaagaggctggggcaggtggccgggggtggggaggggggcgcatccccgtccctgttgcatgcagcttccgtgtgaagcctcatttttagggaaggttctggagcaaaaagccagttctcacagactgctgagcgtccaaggcagaagactgggcttcagtgggtccgggctcacctcccagaaggtactgggcctggacaggtgctgccatcaggaggggagctgactcacctggtaaccccgtctctagctttgtaaggagctgccacaccaccttccagagtggctgctccggtccacgtccccaccagcagcaacgcagctcccagcctgggcattgagaaactccagcttcagccacactcgcagaagttcctccctgcatctccgctatggcagcgatggcaggtgtctttttatgtggatgttgtcgatattagaagtgattgaaaatggtgaaaaggcatcatctgtgcagatgtcctcagagcacagcatgacggcgccgtggacccaagattcacagcatcgcaaactgcggccctgacatcgcgaaccgtggcacctcgtcgagccgtgtaatcgtatcttcgtgaagatgaaaggaatccaaacactccgcagcttgcattggaattttagaactgcagatgccgttcccctccatttcctgctttttggcaatgggatgacgttgcttttgtaatgaaagaagggtgtgtcatatttgtaaatgtttacgtagtagtgagtgctggggagacccacaggccccagcccacatatcccgggtcctggtcacaggcagggacaggatgggacggctctactcacagcctctctgccagggcttggcctgctgagccttcatttcctctcttgcccgtgagtctgagggcagaggatggctcgggtgcctgctgcctgtcctagcgaggcccggggccgctgcaggcttgagcacatggtcccagtgactgctcactgtggttctcagcccgttagagctctgcagcctcagcctgtccaggccagcccctctccgtccttcgctgtcagccccagccgtgtgaccagagctctctgtccccagctttgccagcgccgagtaccaggaggccctcagcaggatcacctcggtcgtccagcagcaccaggaggccttggtccccgcgcagccccagctcaacgtgtgcaactgggcggtcatggtaagtggctggtgtgtgggcggccgtctctttgccggggctgcagccacccacccggggcccaggatgaaccgtggccagcacagggcagaggcaggcgtgcttccccgcctccgtcagtggtgaggccctcgtgcctcagagcacacgcggcggcgtccgggattcgggaggcaggagccaagcgactcggggaccagaacaacgctgcaccagggcagccgcaggtccacagccggccacccgggcctctgcctggctgagctgagactggggagctccaaggcccctctcctgccccccacaagtcactgagggacagcagggcgcgtgagagggtccggggtcccctggtcctcgactcccacacgggcagcttctccttgcaggggccctgtgatgacctccaaactcccgggctctgaaggcaccgaggcaggaacggcactgcccggtgggtcccgggtgggctggtgggcactgttgagtggcggcggccccagggcccacctgcgaggttctcatttgtgcctccttcatgctgggccagccccagagaccttcgcatcagacctgatctcactcataggcacccacccagagcagcacctccgtgcagcctgacaagaccaggccttgttcacctccagtagagaaacggcctcatcacgccagcatcggccagaaacacaagcacagacgtgcctccaaagtttcactgaagtctgtgttcaggccacaaaggatgcgtcgtcgtcttgtccagccctgggggccgcagcagtcagggcctctcaggagcagcttttctgtcccctgcttgggggtcccatagggtggcatgtggacggcccagccatcccgcgtgtgcagtggccgcaaaggcctgtttcccagcacagctgatgtgggtcccagcagggcaggtcttcacagctccttcagatgggacacgtgcggccctcgctctagtcggcaaaaacgagccacacacaggtctgcggtgtcgctcctgggtgcccagagcccaccgagcacagtggagatggccgagcccagcctcgaggcccctgggccgtcgctcacctgtttacacgggctgggcgtggctgcccacagcccctggatctgccgcgcaggattcgggaagaaggcccctcggcagctgcagacttcagcctgggctcctgctgtgcgggcgaaaaggcccagctgaagcctctttccagggccagacccggctgcagcgtgggagccgctgggtgcccgccgtgccgtgggaaggaaggtggtggctctgaacagccagggagccacagcgtgggccggcggatgtaacaggagagcaccggccatcgggagcacctaccagcagtgaggaccatggagggcagatggccttgtccctgcccagggacagtccaccctgcagggttatttaggactgggcagggcagggccacctccgttagttggggggcggggggcgggggtgcctggcaagtttcataggaagatattcagggcccttccttcaaagggacctgggcagctggcgtccccgcctctggactcagtggtggagcagggaggtccctgtctcaggacccctgagtctcggggccccaggagcccagggccaccagccgtggaggagccctggccttctgccttccacacccaatcccactccgtgctgctgggtccttctctacgacccaggctgcagtggctccacgggcgcaggccacacctgccatggagacagtgggcacagggcaggggaggtgggcgcacacagcctggctgccactgccatctcctgggcactgggggaactgcccccaccgccacacctgtgctctctgcagggggaaaagtgccaactcagacctggcgagctgagccactggggtctgaggggcccagatgccaccgtgagcagagccatgggggagatgcacagacacgcgtgtgaagcctgggggccctccttaccccttccctgccctctgtccccgccaactccaggccagccccaggagaggggctcagtggcgtctctggcacagaggagagggagtgtggccacctggacccctgcttctgggacagctgagcggcctttgagaaatgcagatcccccatccagactcaaacacaccctgcggctgcctctgctgcccctggagtttgggagcagcttcctcacccaaacccactcctgctctggtggccaagggggcagggacactcatgcggcatccctgctgccgcctagggctggagactgtccttagtaccctgagcagcacccagaatccaaagtctgtccccggaaagtgccctcagggccatgcggcgtctgacgtggcacagaagtggcctggatggggacacagaaccaaactgcactcatttcagccaagaaggctcctcttagcggcataagtctccctttctgttgccaggaaaagtgccctcccatcaagcaaggcttccgctaagcaaggctgcactgtgaggtccacacacacccaggcgatggaggggtgcgggctccgctcagcaccgcactgaactgagcccagcagcgcagtagggactggcttctccctgggaaaggcttcttgagaggctgaagctgcaggagagggtgatgagttgagaagctcagggtgggccctcctgggaggaccgcctgccctttctaacactgctggccctcggaggccctcagccacttggcagctgcatcccccatacccgggacctccccaccaagttctcatttctccaatggcagccttcagagctgagaggccgagtcaagagggtgccatctcccaagttcccatgattcctggggagcgtctgtgtagctgcccacctggaccgaggtggtccccacactgaggccaattggttggggtccggggttgacctgggcaggggacacatcaaaactgctcgaggccaagcgcggtggctcacgcctataatcccagcactttgggaggccaaggcaggtggatcacctgaggtcagaagtttgagaccagcctggccaacttggggaacccttgtctctaccaaaaatacaaaaatggttgggcgtggtggctcacacctgtaatcccagcaccttgggaggccaaggcaggtggatcacgaggtcaggagttcaagaccagcctggtcaagatggtgaaactccgtctctactaaaaatacaaaaattagccaggcgtggtggcgcgtgcctgtaatcccagcagctactcactcaggaggctgaggcaggagaatctcttgaacccggaaggcagaggttgcagtgagccaagatcgcgccactgaactccagcctgggtgacagagtgagactgtctcagaacagcaacaacaaaatgcccgctgctgctgggtccagaagagcttgaataactgcatgttctttttctcaattttcatttcccagaactgggcacctccgggctgtgaaaagttagggaagtgtctgacacctccagaatccattcccaagaagtgcctctggtcccactagcacctgcgcagactcaggccaggcctagaatctccggttggccctgcaagtgcctggaggaaggatggctctggcctcggtcctcccccaaccctgcccaagccagacagacagcacctgcagacgcagggggactgcacaattccacctgcccaggacctgaccctggcgtgtgcttggccctcctcctcgcccacggcgcctcagatttcaggaccctcctcctcgcccacggcgcctcagacctcaggaccctgccgtctcacgcctttgtgaaccccaaatatctgagaccagtctcagtttattttgccaaggttaaggatgcacctgtgacagcctcaggaggtcctgacaacaggtgcctgaggtggctggggatacagtttgcctttatacatcttagggagacacaagatcagtatgtgtatggcgtacattggttcagtcagccttccactgaatacacgattgagtctggcccagtgaatccgcatttttatgtaaacagtaagggaacggggcaatcatataagcgtttgtctcaggggagccccagagggatgacttccagttccgtctgtcctttgtccacaaggaatttccctggacgctaattatgagggaggcgtgtagcttcttatcattgtaactatgttatttagaaataaaacgggaggcaggtttgcctaattcccagcttga

SEQ ID NO: 284 - DNA, 53304 bp, Homo sapiens
  source 1..53304: mol_type = genomic DNA; note = NC_000005.10:c39424980-39371677 DAB2 [organism=Homo sapiens] [GeneID=1601] [chromosome=5]
agtcctcagctgccagcatctgattagaaccatatctctcgccgggagtggccgcgcggctccgaagctcccggccggcggctatttaagcgaggcccgccgcatccgctgcgctgtagcctggaggctccgggcgcggggaagtcatgctcgcttcacggaggcaatagctagccggtgagtagcttcgaaacccttcttccctctggctccattttttttttaaagatctccttctctcctttgctccccctctctcacccccccgccccccgctacccttctttgagtacagaccttgggctgtggggaatcttagaaatgagaccctgtgcttggggaaaccagcagttttgtggcctgacatctgaggaatgcttccgcggaatgtatttacctttcgaatccgactccagatgcccagcttgtgacatttaacaaacgcctccttttgtgtcgtgtgtgtgtgtgtgtgtgtgtgtgtgtgtgtgtgtgtgtgtgtgtgtgtgtaaaaggtctgcgggcagccctcctaggacactgaggtggctgctgaccgcctaattaactcctcgaagggtgtttatttttgctgtgtgacaaaggctggggacctggcttgtgcccataaggagctttttcctggtgactgacaacatatggcattaaaatgtgaacttttgtcttacaccggcattcctaaggaagtatctacccaagggacttaagaaacttgttttatatcccccggcgcagggagcatggtttatatggtgcttgcctgcctgttgtaagctggttaaaaagattaagtaagaattctaaaaaaggggggaaaaatgaatgggttaaaaccgtggagcctcagtcaacatagcggttttcatagcatagagctgactctgttatttgtttctgctgtctttccctcttgacttaattctgagcctggaattctggtccgcagacagtttcagcagggagctgagtccaaagggaaattcaactggattaaaaacacttaaggaatctgggtgttatctccaccccaaccaccccccaccttttcccctttctttttagtttttgtttggaaggaagagagccgctctgtaaaccgagaagagcagaaacaagcttccagacacatggaaagacttaaaaattatggaggggcgacttcacgaatagtaaatgttgctattgctctataaagtgacttcatgaaaaaatttctggccttagtcaggcaaagcaggggcatgggggagaaggaggtaagatataactaatgcaaacagaagtaatgggagtggaaagcaggcatctacaaaaaatgcctttgagatgtctgataagcctcttggaatggctttgatgagatgtatacttgattgtccttacagtcttgaggttggcttctcacacaaaagcacctactggctgttggggaggagggagcttgcagctaccaaatggcttgtcaccatgcttcttaccccagcagccagactttgggaggctacttttctctgagccaggtgccccgcccactccaggttctgtgtctcccctcttggaagggagatggccctcagtgacactgtaagaaagtttattgccttgagaattcgggagtatttgagtacaatgggaaagtcttctagagaaagcatgaagaagacctagtggtctttgccaatgtggatttctgggacagaccacttcttccaaatccttagtcagtttcctcctaaggccaactaaattctttttcctgttgttggtgaataacttcccccttcttttcccactcccagctggaaggatcccttctcatccaaatgactgacctagaaaccagtcatttttcagctatgccctcctatgctttaatgtataaccagaataagtagatggtagaggaatgtcttccaactttgagcccatacacgtatgtatttgccattctggggatctttgatcttgatggttgatctttacctgaggatgtaagtgagggaagaaagcacttgttacaaaccttgtctaatttgtgaagggcaaactccagagtttgtgtttctgctaaagacttttatagtttcagattaaactggaagtccaaattcctgtgcattaggcctgtttgttgtctttctccaaaggttgaatggatttcactggccttgtttgggttgaagggtacggcttttaaggcacttgttggcatgaaggtagtacagggacctctggcagctgctgaccagctgtttggggatgatatttactggcctgctcaaccaggcctcgattatctgaaggttaagggagcaggaagatatcttccttgctgagtgctcctggccaagcaggaggctttgctgtgacataggctcttatgctgcttcatttctaactctaccctcatatgtccataaacctaagtttgctaccactgatatttcatctggataattttgaaggctctgcgtgtttctcttcctcattcttttgacctgaggatttaattattgctcttcttaaagacaaagccaagatgctgaaatgcttgggaaagctgctgagagtgagccctcctggggtttgaagttgtcctaatgctcatcagaacatacctccccagctggaaagattcgaaagcttactggccaggaaggtttaggtaactaaccaaacacataaggttttttaccctttagacagaaccagaatgggaaccagattggcaatatgaaacacctgagtaacaggatgtggtattttaaaattctccctggcactgctatgtaattccaaagttgaagctgtgccgctgaattgcacaaaggttggccaaaatcatatttaggtgaaacagatttttgttttgttttgttttgttttgtttgagacagagtctccctctgttgcccatgctggagtacactggcatgaacttgacccactgcagcctctgcctcctgggttcaagagattctgtgacctcagtctcctgattagttgggattagaggtacccgccaccatacctggataatattttttttttttttttgtagtagtagtagagacggggtttcaccatgttggccaggctggtctcgaactcctgacctcaagtgatccacccacctcggcctcccaaagtgctggaattacaggcatgagcccaccacacccggccagatgaatcagatttaacaccagatatgtgtctttaaaggagacccaactcataatatcagcatatcctgactggattaactggtggaaatcagaaggaaagcagactcctcagtctttacttaaagacagaaaacaagcaaattcctggttaggggaacaaatgatgactggtacggacacagagggctaacattcaacactggctgcctccaacagggcacaattggatagtagttgagaactaccttctgaagtaccatttcctgggttcaaatcttagctacagggttgcaggttacatggccttgggcacattccataacctctctgtacttcagcttgcttatctggggagaataatagtacctaccccaggattgctgggaagacagctaatctaatatacttggaatactttttcccatctgattttgaaggttttgtttgtttgttattactcccccctgaacaactgaattaagtgtctttgtgaaaactgaaagcaaatggaaaatttcttcatgaaaattgaatacccttcacctacttgaaaaaggttaattattcaagcacttgattttaataaagccagtgcgtttgcttgtgctcatgctagaacagacagggagttactctctgttttcgtcctggaagcctgcactttggtttggtcaggctgacctcgctggtctcaattaagtcctccccacaccctctcagactcctgacagagaaggagcaatccttccccctgaagtcagcattgtcacagaaggaagtgggaagggagggaccacccggattaaactgaatgactaggctagaaataaaaattcttccgagtgtgtgcaggccccatactatccttgcccacatagctgggcaggttgccatggttactccccttcccgcatccttctaccctggaaggaagcctgcctctctaggggaagtagaatctgaacaaattgcttcctggtctaaaaatggaagttactaagtgaagtagaatctcctctctacttatatcaccccctccaaacttattttaatcccaatacttaattttctaaccttcctagttcttgcatcatctagatagcaaaacatgaaagcttatgaaatttctggaacctaaaagttactacctcaatatagaagcagcctggcaagttttccctactacatttgtactagctagctaggggcaagtgatttttaactaagtcaactggtaaaaattctaagtgaatggggcaggctgagtgagtgttacgttgaaggtaaacaatgtatgagggctgtcacttagattttcaggtaaccatagagtaaagggagcaggtaaataggaagtaacaatcctagaatgctggatttgaagcacctttcaacctagaagaaatctggatgagggaaatatggtttaatgttgtctcttggtaaaaaactaccctattgctacctagcaatatgatgcaaaatgttagtcccaaaaagactttgatctttatatgaaagatgagctgccatacacaagtttgcatttgacaaattaattcagtctttcaaaattggacatttagcttgatgtgtatttcacagcttgagggaactcatctaagacaatagttctcagagctgattcccaaaccagcagcatcaacatcagctggggacctgtcagaactgcaaactctggaagtagggcccatccagctgtatctaaactagctctccaccacgtgatccaagagtaactttcataattcagtggttttaggattcacttcttcagtggaaatcataacaaagtatttgaattccttcagtcatggagataataaagcaaaagcctttaaacacagtgcagtttaactgaatcttaggatgcagaaagattaaaaagcatgggatttggatatttttcccatataccaagtatgactttcttgatcctaggaaatccaatatacttttggtttgatattatcacctcacttccaaatcttttcccctctgctggggtttttaaagagtataattaatcttcatttattaggagactgtcccacttacttcttttaaaaaggattccagtaaactagatcattacccttgaaccagatggttttctctaacctataaaactttttattttgtttttatgccatgtctagaagtgcagatgaagtcctctccataaatgagtctacttcatttagtttttgtaaagtttaatggctaacgaagcactgctcctttctcccattcgactttcactttaagtaacttgaaatagaaaagatatctctatttattggctccaatatgatgagtatcttgcccaaggtgttatcattaagtggtagagccaggattcaattatgaatctttatgatttgcaccttggcgtttatctgaatacttagcaattacctactatgtgaagtctgatgctaggttagcaatggaaaatctcccagtgagcagaaatcaaaacaaaagtcttcctcatgtgtggcaaaggacataggatagagagttaaacagacttacatgtgaatggcagtgctaccatttcttgggcatgctattcaatgtctctggcccttagttgtctcacttaccttgcaaaaacagtcctaagaatgcctgatgtcaaacagagatcacatctcaaactgaaaaatacaagggtgtgatgtacaagtatataattggaactctgattttgaaaagccaacatagattcatggttaagagcttgggttctaagctgcaaatgactgtgcccacagcctagctttgccatgtaagacaagctatataaggcctgagcttcatttctccatcaggaaaatgagttgcctcgattttaaaattaaaaactcttcagaactcctgcggctgcttctgaaatttacctgtcctagaaatgcaattctcaatgcaataactaagctgatattttttaaatggtcttgttctcattgtttttgagtatcaggcaagctaaattctagagatgcacacattcaggctgaaaattagaagactgtctttcctatatatctttaaactattaaatgtgaataatcaaggaggagaatgtggcaatgcttcataaatcagtagaggcacacaaatactaactttaaggtaccacttaaacctcatctgagcagggcagttaagtcctcttaaggtctatagttaatccatacccaaagaactggaaagtgaataacttcatccctaattgtgtccatattgaacacagctgccctctcggttctaaatattgcatccaaatgatctcacttatttttttatattttaagtgtcctattagggggccaagacctggtctagttttctgtaatatgtaatacagatgctaacgtgctttttgttaccatttagtgcaacagaaataaaccaaatgtgtttgaacatatgtcagagggctgacataatcatatgaagaatgctataccagtttggctttgggacgaaatgtgaatctactagggcaacatacaactgccctctgagtcagaagatcagaagttgctgtggctacacatagtaggtgctcaaatatccatcctttaaagggaagggtcagctgtgctttagttatatcagcattaggttttgttgttgttgttacttgattttgttttgtgttgctccctgccccctttacctctaaaattaagcgacttaaatgcaattcatttttgaagtagaaaaaacaagtatgtagctgatagaacaggcttttccatcaattgttggttgctagtaaggagggtcaatattgatttctgcctgggctaaggttcaactatagctgaggcttttcagagagcatacatgtactagaattgaaatgatagacagttatatttaatgtccacgctgtcttctaaaggatagcttgatgcagaaatgcttgcttaactgcctgaaaacctgttctttgtgatttctgatttgtctaactggtctgaagttcccaatgactaaaagttgatagtaattgaaagttgggtgcaaatatttaccttagagggacacatatatgacaagagctgcctataagatagttagagaaaatagtaactactcaactaacatatgattttattgtagttaagtggtacagagtgttgtgtggatccagagggagaaaaaggccattggtgttaatggatttggcttttaaaggaacaatggaagtcaaataagcaaaggtaagaagagaaaatgcattttaggcagcagcgcatatgcaaatcatgcagttggatgaacttaggatatgcctaaagaactctgactggtcagtttggccaagaaacagtacaggtggcatagggctgagaagtgtctgagtttgaaaagtagggatgaattatactgagccatggatgtcaggataagaattttgattttttttttttatttttatactttagattctggggtacatgtggagaacatgcagttttgttacataggtatacatgtgccatggtggtttgctgcatccatcaacccatcacctacattaggtatttctcctaatgctatccctccccttaccccccaaccaggcgccggtgtgtgatgttcccctccctgtgttgatgtgttctcattattcaactcccacttacaaatgagaatatgcggtgtttgccaagcagatccgtcattaaagcaggaaaaccaaatgctgattgggataacttaacctggctctattggcagaatgtgtttgagtggagattgcttagtagttgaagaaaagcctatatttcttcaaaaatcatcaaagtagagaaaagggttgcttaacctaagattaaggtgcaaaaagaaatatttattacccctaatgttttaagcgcactgctcattaacagactgtgtcgagcctagaaaagtagggcaaataattttcggatcccaaaagctttattgaattgagagaagagctctacatgaatcagagggcaatgataggtcatggcaaatgtgaggaaatggctggtaagaggccggtaaagacttccctgagaccacacatcttgagtggccttggaatgaaggttttcacgaaattcaagaaggtgaaggcagtacatattacaggctagcagaccacataagaaggtctggtgtgtctatgtgtctgtttaggggaaacagaagacaacggcctcttcagagagcaggtggccatgtatatgtatagtccacagcctgattagaagggctttgaatctcagcttgaatgtgaatggaggaattgaacaccgatacctgattaattcaaaatcaggaaagctaggaggccagtaaacactcctacaaaaatttagccataaagggagatcagttacaaccagagtctcttacaccttagattctcactgaagccctttggagaaaatggaagaaagagctcatcccataaagagttgtttgtttgtttgtttttcacttcaagtgttttaaatatattaaggagtacttatgctatgtgtgtagaaaagatcaacaaacaccataatataagtccgctaatcatgagggacatgtatgatacaacgtggtatagctttttagggaggaggaactcagggtggcggtgaggcaaggttgaggaaaaatgctggaactaagtaaaaaaaaaaatatgatggggagggaggagaggtgtgaaaataaagggtaattatgaaaagtagactttcagaggtttgactcattcattaaacatgaacagtttaggataaaatcttagcttcattctaagctgcagacagtactgttgtggatcttttaggtatatctgcatacgaagtacattctgtaatgctgttcccacttagtgtatagtgatgcaaatgttcagttttctgcacaagaactctttcatagaaacagtgggcacaaccatgttctgtgttaggatctggactcttacacttcatgcggccaacatttgtggagggctcactacttgtattgatcatgaagtccatttccttgaagactgacattgaccaagtgctgcctggtagccccttgataatgctcttgtgacttggtagtgctctttaaataactaaagcaagctgtagggacccttggttacattttcataagattgtttcactgaaatctgaggttcaatgtttggcctgatctgaaagtgacacgttgtattcttagaaaatctggtaattaaaagtgccacagaacatgtctggttctagaatacagaagttccctgaattgcttgtacttcttaagtgaatgccagactgaatgccaaatgagcatagtgtttccttctggtgtttatgaagatagtgttgattcagaactttggatcttatgataactctgaaggaaacatcactgaaattcttcaataccctcaggtataacagaattgcttccttctgttactgccatacagatggtccttcagattgtaacgtggttataggagactcataaatattaaatgtaaatatcccctcaatttgtgtcataatttaaaaattgttgaagagggttattaacccttcagacaacatttgcatctttccataattgatatcaatacagcaatttatatataattccttgatgtaatactactttttcttccttttatgaagtattattaacagcaatgaagctttctaccctaatcagaaacaattcctccaaaacacatagcatcagttataactgtgacctgcttgttctttctcccctacctaacctctaagcccctttagagtagagaccatgtctattttgtcactctatacataggataatgcagtgcttggcaaatagtaggtgtttaataaacaataaccagatggccaggtgagtgagtaactcaagccactttcatttacaacatcaattgcaatttattatagagtgagcaaaatggaaaactttagcttgccttatcatctgttggtataagtaaaacaattctgaccacccccccccctttttttaactttaaggttatttataatgagcaatatccatatgttcttctagtttatatctgctcagggcctgaggaaggcagacaagctgttactgaaattctccagatggtgtggtctttccaagttgctagtttaacttctaccaatggagtattcatcattgctcatatatctgtctgacctgatggatgtaatcacctggctaataagaattgtggtgaatagatttcagcctgatactttatccacaaacaacttcttattctccttctgtttctccttttaaaagtgtccaccaaattgtttataaaattactaataaaatttgagaaaataggtaagacctttggcttagcactggataattaaggctattgctttgacttaacacaatttctgcccaaatcaaagaatcttgttttgttttgtttcttatttccctgtgcagctgtattgtgaattaagatatccattaggctctttaaaatgctaaaattaggtcacaaactcattactgtctgcacagaccccagcatttccaagaaccccaggctggaaaccaactataggccatccactgaccaactttgaaaatcctagcataagagttttttgacttctacttatcatttgactgaaaacttactgttgaatttttcatatgtcaggagctttccccaacaactctgcctagctatcatttaatgatgcctaagatgaaagtgttgacagctgactatgggcactgttctatgtgatttcagatatgcttatgttctatgtgtggtttcccttcacttttgagtttaattgaaagtgactgaaccctagagcatcttcatgattctgtctttagcccaagttagactgtagacttatgcctacattttaagctttgctgtctaccaaattagcacatctttaaggaatttaatttttaaaatacagaaagcgcatcgccccaatatcacttattctaaatgtataagaagcagaaatctgtcttttcctttcctactgcccttcttaatgagcattttcttggcactggtctttccagactttcaacagttttatggaaaaacatatataaattgggaaaaatcatgttaatacattctgcttcatacaagaggctataaatgcaggactatcttagtaaatagctgccatttacaaaagatgctctttttttgttttaaaggagctcacatttcaaaatgtcattccacttcatatacatttctataaagcagacattaggggggcccttttgtatgatgaaatcgatcttagaatgtagggtgtaagacataatggcctttgactttttaaaaagccacctttaagacattatatttatttgaagtttgagggtcactaagcatcagagcttggcaagatgggataaccttgaatctaatgtttgagattgttagtccttaacctttcaattaaaagcctttgtttccagaagattagccaaatatttgaaagaaaccggcaatgttgaatcactccaaagggcaagtctgtgcaactgtcatactgcagagctctctgactctttgatgccatgtccctgtactcggatttgtcaccaccccaacctccacaccatcactcaaaacctgaaagtcctcccagtcccatctagacaaaacagagtgctatcgcccaccctaatccagtttgacccaccttttaacttttcccctggtataacccagcacaggccctatattatagccaagcagacatgaatatcttttacgcattgctattagttcctctttcctgaaagtactttctggctatgcacgttgccccagtctttgaagaactaaattaattatctcttttgttgtaaagcaaagacattaaagcatatgtattaggctggtgtgacttgcaggttgttgcttcactcctgtgcttcagcctcctctcctgtcaaatagggatgatactgtccaggattaaatgataatgtcttagcatcacatctggtatacaataaacattaggtaaatttaacttttaaaaatctaatattctgtgtttctaaggaacatgtccaggacattctcagtcctggattcccaaatctattttcctctactctcctttctccccagagcatttttcatcttctgaaagtctatactccacttatgttttgctccctgttagatagtaaaccatataagggaacaaatctttattttgctcactggtatatcccaagctctagaagaatgcctggcacttagtagggatgcagttttgattacatgaattaacttgctggtaaagatcactggaattcaggggcaaacttggtttctagtctctaaattgcaatggctttaagttgggatcaatcaccagacccccatgtgctctaaacaacaacaacaaaaaaggctgtcagtgtctgcaggcttttcaagttttgtcataatcatggtttcacagcaaaatctagggtagctagtggcctaccatttgcgtcatctctctggccatgcacaatataagggaaatgacatactcttaagagtcaaagacatttgtttttttcccccttaagggaatgttttggacccaggtgcaaatataaaatagcatttagggtaggaaaccgccccagctctgagagcgaatgacagactcggagaagggaactttattcacatctcacctctgataattaactctaaaagtagaactttgcttattttggaggtactatgcaaacttggtagtgttgtttctctcactgttttccttgatggaactaattgttcatatgcttctgtagtatgttaattaaggaacacattgctagttaaaaaaacactgcaactgtaaatatttttctgatttcacattttgctttactaaaaggctcctgtggagaatggaagggcttggtcattacttttggaggatttgtcttaacttccttgtctgcaatattgagtctttttaataaagattggattaggaacttaatagtggctttcaaagaagacttgtctttgcacagggctatagcgttcagctaaggaaacaaatgatcgaattgcattctctgatgctaaaaatgcctacataggaggactagaaaatagcacatgttaccatggagtggatcctccaaggcttcaaggaccaaatcaagttacttttatttaatgaccatagtaagaagcatacagagaggctacaaatggagcccctatctaatcacttgtgtccatcccacatttcccttaagtattgaaatggcaattgctaataggtacagagttttgcagcaggtcattagtggttcagagaacagaggagactgctctgaaagaaaataaaagctaatgaaacatcttgcttaagtattatgttttttatgaaccaaggaaacttcctttattatgactcattgatgttgacattcccgggtagactaaccagaaacctttttttagttcaatataaatatgagtatttcataaagggccaagaggtctcagctgacactcagctaagtgtcatttgataaagaaccattcctattagttcacctcatgctagaactataaaccagagtggtacccccatgattagttaacttaaagactggtgtgcattcaacaggcctggagaaagaagaacccttatcccatctgcttactctgggaaagtctcccagtgttaagtcagattttttaaccaaccttttgcctaaagtcaaacctggaccattaatgtgatatgtgtgacactgagggctaggcaggtatgtaaatgataaattttagtgaaaaggaaaaatactcaatacaatttctagccaatactctgcaaactagaaaacaatataattcatagttttttttttaagcaggttagacaatacagtaatctcaacattaacataaaccaaactcatttaacatggaaggagtaaagagctggccagtactagatgcactgtaaaattatctacagctggagatgattttgaataacacatattaaaagatacacacatagatctaataaatgagtctttacagcttagaaaaccagaaaaactcaattgtcctagtatataaatttttcatgtcaaataagttaagcccttagggaagtagcagtttatttggtaccctatgatttaatgatttgtttaattaatgcattgccttttaaaatatcccaacagagttgtttatcaggctagtagtataaggtttataagaaacaacatcttgcatgggctattacttcatattaatataaagttaagatactaattacttcaatcttacagattatgtccagatcaaaagtaaaaagaatatgatgttgcctttgggaaagaaaactagatttttctacgatcctcaaaatttgttaataccaaaatggttaataccatctcaagagcttatcttaaaaaatgtaaatggagtagtcaagacttgagcctttgaaactgttagctgatgacataaccaggtagcttttctaggatatcttgtttttatgcaactcatacaaagtttattttttccccttccccagccctggattaattagagatgactaaaatagatgaccaaagaaaacaatccagtggagtgtacatattagaaaatcttcaaagtccctctataaatcctagaataaactttctgaaatctgtacagattaaggtgaaacttgagatctgtccttgtgttcttggagtattacaaccaagaaagaagatgtgtgagctatttaatatatattccttcctaagaagtcttagttctccgaaacactatcattcactttaatcttatctgtagaggtcatctaaatgacttgtgaaaagtggtatagaaattgaattcctgaggtcttctctggattaggaacaatgtttaatggttggggtcaccaaggggtggttcttttctgaaatctctactagacacaaggttccttgaattatgcttccaaacttgctgagtgtgcttcctgatcccaaagatagatgtctagccatgtttgtgaaagggtagaccagtcaatggtgattacttacatgatactaacaggtgtgattttaggtatgtaaacttggatttatataaagaattcatgaaacaaaacctgtctcacttacagactttataagcaaaattctgatattaagtcggtgttttattgtattaataagtgaacctttctatgctcatctatttctgcagttactgaactgtatacagatatttcaatacattagaacactttgttgttcaatgtaaatgctccaattgtgcaacaactaatctgtttacttcagtataaagtagaatactgtcatttggaatttttacatccctcagtttaaaagtgcatttatttattcccacaaaacatatttgttccaatactatttcccaacagatgagagaataatgacagatgtgaactttagctcaagaatacttgtgcatttctgccaattttgttcatcttgtactcaatctgcagcagctttttagagtttttttttttttaataatcataagcacaatttcaagcaggtaggctaactattgggaggccttcttttggatctggaattcgactcatgtggtattattatatgatcacaaaaagcaagacaccaatttgacagattcacctctctcccttgtatacaaaaaacgaaaattacccaggggtttcttatccattaacctatctaatttgtccagtaaccaagaaataagcaaataaggaatatattcttactcgtagaagaactctcctggacttttaggaagcacagtctgatgttgtatattctaggaaacaaactgccaagattctgaccttcagcctgcttgaacactggtatcaagaggagagatggctggttgtcaggctgctggttctctgcaaacctgaaatttgacaaataaatatcaagtcactttttgtttttaaatgactcctttttccttcatctaatttgaaagcaaccatgtcttgtctaaaggaaattaactaaatcatgaagaaccattttttaaatgataatattttgagcacaccagatgacagtaaatagtaagcagtttcaaatcaaaacaaacatagctattcatagccactgggattagcaaggccaccaatattcctggagatgaagcctaactgccatgttggttgtggatgtcttccccaactcgaatagatcatatcagatgtggaaatgtgacccagcggcaagtctctcatggaaggttaatgccaactctatgggtaggttgaatatcaaaacaaaggacatgccacctagaacctagagacaacatattcgaattagattagttaaactgatcttgttttgagtctgcataactgtaagaagtgttttcatggttttgctctctatacagaaatgcaacaaaaaatacgttccacctgtctgtatacaatcactatgtacaccctagtttgctctgtgctgatttacaaggcagctggattcttcttccttcaaactctttaaacagtgtgtccttgaaacatgagttgcaagaaagggtacagcaacactcaagcaatggctttgaggattatataaatatggggcttttcctggaaagggaaaccacattgggattttatataatttagccaggctattaaagaagaaaccaaatatcaggcagtatttcttgcactggttttcggaagaggagaagtttaagattacctgcttgttttaaagtgccctggtgtggtatatatcataaaataattctactagtgtacgtagcccttcatttatagcttaatgtttatagcacagatgcttctaaattacatgctttttaaaaactcttctaacatccgcatagagtttcaagctgactactgtcatggcacttgaatagaaagtgggaagtattcaataattaggatttatatgcatatgcgtcataggtgaagtcacagagggacgtggatgaagaaatgattgtatcctgaagtccacgagtgaggtatgctgcacatctatgttgacttaattcaggattatttcatacggggatgagaatgcacaacctaatgttgtatattctaggaacaaactgccaagattatttgtatcattcattttaaaactagcatggtgggccgggcatggtggctcacgcctgtaatcccagcactttgggaggctgaggcaggagtttgagaccagcctggccaaaatggtgaaaccctgtctctactaaaaatacaaaaattagccaggcagtgtggcaagcacctgtagtcccgacttctcaggaggctgaggcaggaaaatcgcttgaacctgggaggcggaggttgcagtgagctgagatcgcgcctctgcactccagcgtgggcaacagagcgagactccgtcacaaacagaacaaacaaacaaaaaacctagcatggaaataggaagaggagttatttttggtagaaatatctaacctagcttagaaaggacagacatgaaaacagtaaaacatttgctgggtcagtttgggtcagtatatgatgagggaggattgtagtaaaagctatgaatggtgtgagtgcgttgcctctgagtcttaactttttgactaccttttcctgccaggatcaagcataatacattgtatatttagatgccaaatttaaagtaaaactcatgcatttactgtgttttgtatcagttccagagtgcttctcttcaagtcactgccccaaagacactgcaatagaaaaattctagaggtttctatgtcagtagtagttttttttaatattaaaactctaatatttttcatgtaagttgttcgttctttagaaaattgtatgcccttggatttaggatgggagggaagcagaatgaaatataatatcctactttaccatctaatgatacaaaataaagttcttctaaattcaaattttaaaacgggtttattctattgacccattccagttgcctatgaacactttagctttctaaaatcttcttccaaaagtgctttcttggtatatgttctgattaatatcacttcaaaactagaaataccaagccttcctggtcttggggtctcctatgagggtcccttcctgctgttgtcaccatggtgtgaagtcttcagcctcatcacagtcacctagtgcaagtgactgggctaccaccaaaacctggtgggttttagccactgaagaaagtgctctggtgagcggggcaggtttggccatctctggtcctgcagtagtgtctccaggtatgggaagtgctcagtagagttccgccatgtccctacaggccctctggtcacacggctctttcagtgtgataatgcatgccacccaccagccactgcaccaaggcatgcccatgctgcccgagtctgcttggctgggtcagattggacacctaatgcttgtgccaggtctttagttaagactgcctaccttcctgttatgggaattcttcccttgggccctctccactgtgtcagaccacttcagcccattgatcatttcccagaagtgcctcagcttactctatagacttgttcaccagcttcccagatacctttgagctttaaagcctaaagtatatgggaaagagtagcctttgccaaactcttccaaccccataataaagccatattatcctttttcccagaacaatggtttcataatagcttttcctcagaagtaatgggaatcactcatggcttcttccataggtgacttgatatttctctaagtagaaagagaagcagctagtgaggtggttcgagatgacatttaatatcacaactctgggctcaaggttgtagtcattaccttgccaatctctcttccctacatcacttcccagggacaagtacaaaatggagaacagcacataaggaaagacataccatataaggaaagaattatgcatgggcataggtgcctagcaacctccaaatacagagctctgcaaaagctacgttgcagcatgctatgcgctagactgtaattccccattgtcttttccttgtcaagttgtgcccacaacattgtcctacccagcttgcttgagatatatgaaactcacgtaccaaatggtccctgatgtaaagcaggtcatagcccaaatgattcagtgccagcaatgtaaggcaatgacagaaatgtgatttttaacctctgtagtttccctgaagtttcaatgtcacttcctttcctttgtagaagtgagttaaaggagaaagttggattcctgttctgtgtagtctaagccagaggaggttatacttgagaactggggtggaatatgtttcttctcccacattaaagctgaaatgggtgtatactctctaatgccaattaattcaacctcaagcctcatatgtccatattcacaaaaattccacgtgatcaaaagaccaaaaggacattctgacactgctctctttcttagaagctgaataagtgtaaagagggattctagaatcaattgtctctgcatgtctgtgttcatacaagcatattaacttacacccagctttgccgagaggccagaacatgttctcactgtgaagactacactttctattttttccaactttagtgcagttaagtgttcaaactaatagcccttgtgctgaaacaacaaagcaaaaatacaattgcaaaattgatcataaccttaatacttctgttcagcttgtgaacactttcagacacttgccgtgaattgggtggcactgccccgtctaaaggccaagtgcagtggctcatgcctgtaatcccagcactttgggaggccgaggcgggtggattgcctaaggccaggagttcgagaccagcctggccaacatagtgagaccctgtctctactaaaaacgcaaaaattagctgggcctagtggtgggcacctgtagtcccagctacttgggaggttgaggcaggggaatcgcttgaacccgggaggtggaggttgcagtgagctgagatcatgccactgcactccatcctgggagacagagcaagactctgtctcaaaaaaaaaacccaaaaaccaaaatccaaaaacaaagaatgtgcccttatttggatgcataaagcttctttgaagtttaaactcttctaaacgttctttatagaggggactgtttctttcttttttttttttttttagataataatacatgcatttattttttatttatttatttttttaattttactttttctttttttttattatactttaagttttagggtacatgtgcacaatgtgcaggttagttacgtatgtatacatgtgccatgttggtgtgccgcacccatcaactcgtcatttaacattaggtatatctcctaatgctatccctcccccctccccccaccccacaacagaccctggtgtgtgatgttccccttcctgtgtccatgtgctctcattgttcaattcgcacctatgagtgagaacattgactcagcaatcccattactgggtatatacccaaaggattataaatcatgctgctataaagacacatgcacacgtatgtttattgtggcactattcacaatagcagagacttggaaccaagccaaatgtccaacaatgatagactggattaagaaaatgtggcacatacaccatggaatactatgcagccataaaaaatgatgagttaatgtcctttgtacggacatggatgaagctagcaaccatcattctcagcaaactatcgcaaggagaggactgtttcttatgctccaataagagacattcttaataacaagttattaaaaaaaacaaaatgggtagaggtgggtacaaaattaggatgggttataatgagtccagagtattgaaagttgccaattcaagagcttagacttcctatcatgctcaaaaaaaaaaaaaaaaattccaaaaaaactaaaactaaaaggccaaacactgaatagtagagaatgtaccgaaataaatttaaatgctttgatctgcaagtctcagacctaggcaaagcagccaaatcaatattaatgagacagtttgaccaagtaactcctgctacctaggcaaaaaggaatctagtgacaatgtataatgagaccatgtaagatcctttttctattttgattcagaaaacatctataaaataccatgttcaaattaccctgctaagctatcttcttgttcttttgcttggtatatctgctaaatggaaggcattcttggttcagtccccatgtaatgggctttgtacatcctgtttttaaaaaatggtttttaaaaacaaacacaggtaatctctaggaataaggcattacagtctcatgctagatctttcctggtgccagctttgtcccctccagctatttcacaattagacaagtcaaactctctttcttgccctcagttttctaatcattataataaaatgatgtggccaaattattctctatttttcttccagctcaagtctaacccacttggtatttctttaagcagataaagcgttgttaaagtaaaccatcgcacctcacataggtcagtatattgaaatgatttaggaatctttaaaatatattgatacctgggtctctatgcccagagactgtgatctaatttatctgggaatgccatgaatatcaatgttttaagaattccacagtaaaattttcccagatgatgtgaagcagagcttctaaactgtccgtgataatgacgtaggcatgaattttaactcaggattcattggaacaggcatctctgggtaacttagagtagattttgttcccagagtctgtttctatcagaacccaacttttgtaggctcagaaggcagagctgagcaggaggtggctcttacactggcaaaccatctcacttttccacctgggctttactagttaaaatactaggctgggtgcagtgggtcaagcctgtaattacaacattttgagaggccaaggcagatggatcacctgaggtcaggagttcaagatcagcctggacaacatggtgaaaccctgtctctactaaaaatacaaaaaattggccaggtgtggtggctgatgcctgtaatctcagctgtttgggagggtgaggcaggagaatcacttgaacccaggaggtggaggttttagtgagctgagattgcaccactgcactccagcctgggcaacaagagcaaaactctgtctcagaataaataaataaataaagtattacaccattccacctttccacttattagtcatttgagcataggttcttactgttctaaaagtgtttaaacacttactgtggaaatgcaatgttggaaagagcacaagactacacaacacatagcttctgtgacctagctttggtttaatagtagctactgatatggtttggctttgtctccacccaaatcttatcttgaactgtggctcccataattcccatgtattgtgggagggacctggtgggaggtaattgaatcatgggggcagtttcccccatactgttctcttggtagtgaataagtctcatgaggtctgatggttttaaaaggggtttcccttttcgattggctgtctttcttgtctgccaccatgtaagacgtgcctttcaccttccaccacgattgtgaggcctccccagctacgtggaactgtgagtccgttaaacctctttttctttataaattaccgagtctcaaaaatacaaaaaattagccaggcatgatggcaggcgcctgtagtcccagctacttgggaggctgaggcaggggaatggcgtgaacccggcaggcggagcttgcagtgagccgagatcgcaccactgcactccagcctgggcgacagagcaagactccgtctcaaaaataaataaataaataaataaataaataaataaataacccagtctcaggtatgtctttaacagcagtgtgagaacagactaatacagctaccatttgttaagcactttctaagccaggtgcagctgtcgctatgtaagttcttactgattttttttctaatagctcagcaaactatattctcattttaccaatgaagaaatgaacattagataaattgtctcaagccacagagccaggaaatgatgaatcctgggtgggtgggactcacaagcctgagctattagctgctatgctatcccacctctacccaaagttaactgtttgatagaatcttaactctggtctgacttggttccaaaaacagggaaagcatcttggttcaagatttactaagtcctctaagtcctgccatatcattttcaaagattaaaggcaatgatacctcctcgctgtaaatgcataacttgtggatagctcattgactcgggcttgttttgttagtgaggcccctacagtagtgtcagcatttacaagaaaatcttctaaggactccttttcagtatgcattagcatagtctcattcctcagtgaaacaggctgtaaaaatcttactgtctgctcagtttggtctttgcagagcagaagagccttcctaaaagcataagaatccaaaaaagcagttaaaggaaggatttgcataaagtatcagaaacagtctaactttgctacagcatcgctggtaatgacccctattcttaaagagctactttgaagatagcagtgaaggctgtttgctgccctcttggaccccgaggtctgtcttagaggttaatatttcacatgttgtcctaattccgcactttagctgaggcaggcagaaagttcaaagaaacaaggaagcacattctctgtccagtacaaagtactggacattctaaacaaatatgtttatgttgctttcttcttgagtctccttaattcctttccctgtgtctattatatgtggcttcttgctaaaaattaatggtgtgttaatgtcagtgggatgatgactttttgaaagtagcttataaaatccaggttaaaatcagtgggattcaagaaaagacaagagagacagtatatataagagaagagaaaacacagactatgctcactttgagcccaatggcttatggcggattgattttctgttgctgtgtccatttcattattcataaaatagagacacattcagccggatgcggtggctcacacctataatcccagcactctgggaggccgaggcaggacctgagggaggtcaggagctcgagaccagcctggccaacatggtgaaaccctgtctctactaaaaatacaaaaacttagccaggcatggtggtgggtggctgtaatcccagctactcgggaggctgaggaaggagaatggcttgaacctgggaggcagaggttgcagtaagccgagattgcgccactgcactccagcctgggcaacaagagtgaaactctatctcaagaaaaaaaaaaaaagagagacacattctgtttcataggcctttcggaataagtgttcttagtggttggtatactaggtgtttgtcccattccccttaatgttaaaaataaattccctaccatctgttgaatggggctaccactaagtccttaactcaagttattccttttaccagcattttgagactggcaaagcacttttcctgcctgctctgtataattagggtaagaaggtaggcttgggagtcacaggggaggatggttgacacttgtattatgatattgcttcaaaaccttggaatcattaagtagtaccattgctgatgccaacacattcctactggtagaaaggataaggatatataagaagtgccaaccaactttacccctataaagcctagactaatcattgtccaccatgctggcaattgaaggattcaaaacactagacattttatatgaatcactaaggactaagcaacagctgatttttattattgcaaagcccatagtcattctaagatgactcatgcagtcttccagaataaatttctcagagccttctcagaaaccaggagagatgttgcaagctccagaatctcttgcagtcatctgatgctagtcccacagaagggggaagtctctgcattctttcagggagatttgcattaagtccaaaatccaagttagagatcttcacttaaatggaagctaattttattcatatagcagagtttcctttacagctttctgttctatctgaggccttaaaaaggagtcaggactataagataactttagatcttcctttgtttttacatgtgtcatcttacttctcttttcaatcttctaatgaaggaaacagccagtccctgagaaccaggataacaaactagctatttttagatggggaactgtgcttgtgagcctttttatatgtttttgagctttcatttgtaatccttgccttgtgataacaccccttgggtgtatttcctgactaattttgcactttttgaactgaagggacctgagactacacccaacgagtgagaaaattgtatacttcctccttgtgctgcactcacttgcttccctttgtaagaaatttttaccatcctagagctttcaaacagaccccattgcttaacataagctagacactttcttcaacagagccccagtttggaaaggtaatcaaaggaattaactaggggacttttggtcctcagatcccttttctaggcccaatcccttttttaaattcaactcattaaaaaccctgctaaaagttttatggatgcaagtgacaatattcaaatgcattacatttgaatattgactattaagtttaaaccaattattctctacagatggatctaagtctgtaagtgagctgccttctacccactgcatgttaaatgataacttgcctatttgacaagtctatgatggggacgtgctctttaaaccttgggagaaatgtgaattatcactctggtgtatgcataactggatgtacacttttgttaaaatcttgcaataagtcttgaacattttttttgtaaaggggtttgtagtcttggggcctgtaagcagagtctaccttctgatcatttcaggaagtagagatagatatattttcaattgtatggcctacaatggagacttacccttggctattgcaactcaacatacacatccattttcttcagggaatttatattacagaaacttttcctccttatttttttcttccttgtcccttggaattgctcatacccaaatggcgaaaggatatagtcaaaggaaatcaattacctttaaagcaattccaatgctatgaaaagctgtatttaaatatctgaacagagaaatttttgctataaaaacttacagcaaggtaatgccactcaccttagaatccttccatttggcccagtctgccaacgctagattcgatacctggtcttcagctacgtcttgtgttacttttatgactaaacccagatgccaccgttccctcccccaaaacccctcaaagtgctttgtggcacttctcaaattcttttaaaatagtctcatgtaagaatacaaattgccaaatttaatgagctaagtcttttcatgtcagaaataataccttgcagtgaagtatgatatccggcttcaaagatgggcaacagactcttaagcccaggtcactttttcagccagtgattctaacccagttctgggccatcttgctgctgctatcaacacatgcattgatgaactcaacataatactgacctaagcaagacagatctgaaggtatagtcacacacacttcaattgcctcccatgaagaaaatagaatgtattctgttttggaatatattgttgcagttcttgttctgggcctagaaagttaaaagtagatatcgaagtatataaatatagccttgaaagccaaaataatatggtttttaaaagcatataaggattaatattcaagtgaaacacttgaatctgccacatttagggtacccttaaagaatagttttttgatctggaaaatcaaaacagattagccttaccattgtgtcagttggagttcagtccacaccagttattttaaaagattttaatgttaagcattaattcccactcgaatactaaccaggcctgaccctgcttagcttccaaaatcaggcttgttcatggttgtatggccgcagatattaagtgttaactaggtataagttgttagctagaaaactgagagagtaagaagagaagatcaagtcatcactgggtaagtaaactacagaaagcagctaccacctctagggctgaggggacaaagttaagacattggaaccatcaaagtttataaagcttgcaggagggggtctcatggtgctgatactgaggcctctgagaagggagtactgcttagctagtactggagtccctgtgctctgagggcctgggacctgttggcctggagagagtatgccagagggctgatgctgatgtctccaggacaggcatgatgagactagttctgcaagtgttaaaactggattcaggggctgttttaggaagaaactcttgctgctggagtgaagaagttctactagagtcacactcccaggagtctcaagtcataaggaagtccatgtggagcaagcagacatgtccgagtcccttcaccagcttggcagtttccctccagcgcaccttactggcagagccaacatgcagccagcaggcaaagcaggaatgtttgcacagtctagctctggcttcactaaccggagatagaggtggttctgaagctgagacaacttaaatggcacagatcacccctccagctactcagcatccacatacacccttccacacctttcaacttttcctctgacagccacacaagtgtttccatctaaaaaggtgcaactgtctttcattcagagaaagatgttctcaccctctccccaaactgggaagctgcaaagaccccataggcatcacattcatttctggaaaacggttactgtctttgggctacattaaccacccctagacttcagttgcagtcccatctgaataattcactgcctaaagacaaaattgtacatttaacttcaaaaatacttgcattaaaagagaagatagagagataagaaaataggtaatacataccagtgtatacacataacaagcaaggaagaaaatacgcatagctacaactgccctcattaccatctgcatgaatgccatctatatcccagacattgagaaatgagtctcctacattcaaggagattatagtccagtgtgtgggcagacaagcaaatagacttgtgtgtaaaccatgcaatggacatgtgtatttcaagaggactacgtgaagctgtgctggaatacagcttctcagctgagatttgtcactgcagtgttgaggaactctggtttggggccagacagtctgggttacaaacctggttctaccacttagcaggtatgtcgttttaaatatctttgccttcactttgggaggctgagtcaggcggatcacaaggtcaggagcttgagaccagcctgaccaacatggtgaaactccgtctctactgaaaatacaaaacttagccgggcgtagtgcccctcacctgtaatcccaatcccagctactcaggaagccgaggcaggagaatcgcttgaacccgggaggtggaggttgcagtgggccgaaatcgtgccactgcactccagcctgggcgacacagcaagactccgtctcaaaaaaaaaaaaaaaaaaaaaaagaatatctgtgtcttagccttccctctggaaaatgaaatatgatacagtaatactcacaggactactatgaatcttttaaagttatacaattaaaaggttaatagtgcctggttcccacctaagtcctgagttaagaatggctttgagtctcctactgtgtaagactttcatctgtaaacagactgtctccctggttgccaaccagccaggtgtctttgagcaaaattaactactaaatctccaaatgaagcaattcagataacattactcatacatagattgcatgaatgtatgtatttaaagactgttcagattataaagacttttaaaactcacagtgggagaaattaagtactgacccctatgaaaacatgttgacatctgtaaacaagctaagtgcaatttaaattgagtaaaaacttgagacttactttttatttagatattctttaagtatctaacaaacgacagttattcccatgtggtgggcttggtccttcagttacaatgttcacttaaatgggtggtataggcacggaatgaagagggcttttgttgaaggcagggttgtggaggggttagtgtgccagcccacaggttgtcttaacacgattacaaaacaatgaatagcttttctttgcctttggtcatcagtcaatgtagaaagttaatctactcgccctagctctctctacagcatatagaaacattggctcctgggaagtgagagaaccttttggaaagttagctcacttctgcgtggttacaatgactgcattttcctgtttctcctactatgatacattgtgggtagggcagaggttgtgagagcacatgacagactgtttggagtatggtgatgctgaataatagcataaaaatgtactagattaattgcacaattggaaccccctcaatccattatttccctgatacaaataagtgttaatggcaaaaaaggatgtgttttatagtgcttggataaccctggggatcatatgcagaatcctaatacttaaaacaaatttatcaatgtgaataagatacaggtcataactctactctagtcactgcctttatagttaagcaattttccgaagaactgaaatttataatgcccaatctcaaatggcatttgcagtcttaccaggcttaacattcaatttatttctgttttgcaataatgcctagcaagttttcgatccctatctttaatacttgctttttatgtgaaagttctaataaaaactgcttagctagataatcattaaatgttaccagatatcaagtgcttaaagaaaaaactaataggcacacatgttccattttggaaactacaaaggaaacactcctacccactcccctgctttcagtcttcagtctaatacagcaggagaaggaacaaaatgagtccaaagaactacaaaagaaagtcactagttgtaagcctattctggcataaagtctgggtctgctgtgttctgatctcaatatgcctctaaactctgcctacaggtgtctgtgggaggttatgtttatttgagacttctccatcgggatcgcctggtgtcaccaagtgtccactggtactgaggtttgctgcctgccttcttgccatgtctaacgaagtagaaacaagtgcaaccaatggtcagcccgaccaacaggccgcaccaaaagcaccctcaaagaaggaaaaaaagaaaggtatggagaaatccacttgaagccaaggaagggagctagagatggttacccctggagaaatgtgagattcagaataaagtaagggctggctctgatcttccttcaacctcagcttagtctcatgttctcctaataggaaagttgtaccttgggagaagagactggttcatctcacgtgtaataagacatctctggaaacctgcgattatacccacttaagtccagttgggaaacagtcatggcatcttgttcagttaataatgcagtcgttaattattatatggttatcattcagttatttatttaccatttgattttactgaactcattgggaatgggactacacagaccttgtaaaaggagcaaaagacattataaagatgggataattatcttaataattttcaagagaacttaggcataattcctttctgccttattgataatttaaaatgttggtaaattgcttggcagcttatttttcttacattaaaaatacatatattatcatccttatattcctttaaagacttaaaaaaaactatgatgaaaaatgtccccaactcccacctcccatattcccatacgtttcccataacgctgtcaattttgtacttctaacagtttattttctccccacctcaactccatacacagttgattgtggaacatgattttgctcaaaggaagtaagaataagacaggacagaatattacatacatgatcagttgtagtataatcaggatttatattacttaaattttggagagtctagagcatatttggtcataattagaactagcattcttcatcctgtattcctttcttttctcaggccctgaaaagacagatgaatatctcttagcaaggttcaaaggcgatggtgtaaaatataaggccaagctgattggcattgatgatgtgccagatgcaagaggggataaaatgagccaagactctatgatgaaactaaaggtaaaagggaaatgaatgctttatctgtatattaagcaaaagtccaagagagggaattatattagaagctcttgttgacctattgttcaattacttgaaaactgcttttaatcacattatccatcagtagtgccccattttctgagaaaccgtgagtgtttgcatatttggagggatgtcctagatacctaattttatcaagtataataggactctagatgccttttccttctggcaagctcaacattaggacgaaccaagcgtattcctatttctattcctataaaagctgtgtgcaaatatttgcattgcttgtcttactatatgtggagagcacggaatatcctgttttagacctgggaattgttctgataaaattgaggattctacttagacattggtgttccttagcgctagcctttctgttttttgaatttaaaaatttagtactatggcactatgtgaaactgactgaataaataatacttgttcaatagttcaaggcctagaagaaacatctctaaagatcttctagttgagctttaccagtgactattctgaggccaagagaattagagtgacttgtccgagttcgcacagctaactaagggatgccctggttcaacgtcttctatgccgtcttgctgtcccggatgaaaagtgccgaatcctctcatcgatggcagatcaagtcgaaaacaaagctgactgactttgaaaattttaatattaaaaccattgtaggatgtttttaaaaattcaacttctcttgtttttccaccctcatcagggaatggcggcagctggtcggtctcagggacaacacaaacaaaggatctgggtcaacatttccctttctgggataaaaataattgatgagaaaactggggtaagaattcacatttgctgatacctctctgaccacctgagtctgaccaacaatttgctacttgaatttcggctccccttcttcgttctcaaagttctgtggggaacaaatatatcatatattacatctccagaagtaacaggcagaaaacagaataggaggtaaaagtcaagatacttgattttgaatttgtgttctataataaatgtgaatctaagtctgttaagtctgttaataggcttagattcacattatgtctataatatataaatatatatatttttgaaattaaataaatatatataatttatataatatacaaatatacattaaaatataaatacatatataatttataaagtaaaacttctatatatatatatttttttttttttttttgacctcgggtatacagaactagattaattttaacccctagtttgtgacacttttatgtattgcttacatgtgaacttaccggctaacctaaagctagaacctcacccataacacatctacctctttttcatttcttttttccctgccttctcacctcacagatgtaaccttgtttttgttggttcctgttgttctattacttgtgaacagtcttacttattttgccttgtttttaagccttatcagaaagctatttatcatacatcaagtcttctgtgattttttttctgtactcaatgtaacatcataagactcatgttttttaaaatgttgtgtgtggctcattttcattgctataaaatactctctcgcatcacgatactgtgaggagacctccagttactattcatccctttctagagtgcccattatctaccatgcaaacctagggccctggcaccctagtggaccccactcagcctgctagtgctggggtcctcaggcaccactctctttatcagtcgcctttatctgtcaactcttattttcccaagcccatcagagaaaggtggcatgtttctctcacccttctgtgtctcctcaaactttctaagatactctaagatatcttagacattcaggacaaaaagccaagacacactctgccacctacaaatatccctaaagagttcaaccttgttaactgcttgaaaggatcaagaaaaaggagggaaaaatagaagaaaagacactaagccaatacagtccccaccccttataattcctggttactgatgtagtcattatgtcattaacatactgtagttattactacattatgttactatgtattaggctgtctaggtgaggctgagaaacacttgatgacagtatttggtatcctccagaatatactgggaatacggttccaataacacataggatggttcctcggccactctgagccatcgtcaatgaatccctgtgaacactcctctagcttagttatgctgttcttttaagtttgtctttgagttgggaaagtagacctatttggcttggcttaagggctaaatgtctcctcttcacttggtcttctaatcctcagtccttcctggctatgtggcatcatgtctttaaagcagggagagtaaagtatcaatattttaagaaggaacattcttcccacttacgttttctattcttctttcttttgagccctttctagaaagagtaatgctctagccttcaaccagaaatgaaaagtctatcttcaaatggtttaaacttttcatatatgccttcatatatgtgtctgaggcttcggtgtgctagcctgcaaatagattctagttttcttaataaattactctttatgttcttttttaaggtaatagagcatgaacatccagtaaataagatttctttcattgcccgtgatgtgacagacaaccgggcatttggttacgtgtgtggaggagaaggccagcatcagttttttgccataaaaaccgggcaacaggtgagctctaagtcttgacatagacctggggacttgtcctctgtggacattggagtgtctgtcactcaactaaaagatttactggaaataattggatgtaagagggctaaataataattccgagaatgactatttttattggcctatggaatcttttaaaaatgtcattgatagctatgcactgctgtgtgccacaggattgtgagaatggaccttcttataaagtgaatactgacttcacaacagtggtgaattattctcaggaaccttaaaggacttcaaatatgatcatgatacctcttgttttgtctaaatacttattaaccctgctgtcttttatatacctaagggtgaggattgggttggtggtgatcccctataagccagcagagggtagtaaggcgttttaagattaaaaaaaaaatcccagtatgaattataattgatagcagacaaaggaaataaaatactaaaattaaaatacggataacagtgctttcccttactgcaggctgaaccattagttgttgatcttaaagacctttttcaagttatctataatgtaaagaaaaaggaagaagaaaagaaaaaggcaagtactacctgattaaggctctattaaatttaaaactggctgggcatggtggctcacacctataatcccagcacttcgggaggcagaggtgggtggatcacctgaggtcaggagttcgagaccagcctggccaacatggcgaaacctcatcactactaaaactacaaaaattagccaggggtggtggtgggcacctgtaatcccagctacttgggcgtctgaagcaaggagaatcacttgaacccgggaggcagaggttgcagtcagccgagatggtgccactgcactccagcctgggcgacagaacgagactctgtctcaaacaaacaaacttaaaactgtactcaggactatgtttaatattatatataaatatggtctatctgaaaatttggcttctatatgtattgtctattcttcccaatagggcaatggatacatttttatggttaggcacttctaatctgcactccctggcttttattttttttctctctatgagattcatattaattctaggaaatatacaggacaaccaagtttaaatccagtaactctactcaaaccttatattgatatgaaaaggggaggggaacggagggcagaaataatatacaagacttattcttgccttatgcctgtgaaccataggcatacttgtttgtgtatttaactccctttcactatgaatatgaagatcactgaatatgtatctttctttttagatagaggaagccagcaaagcagttgaggtaaaattgcatctttacttcttgttaatcatgtgtgtgacatgcgtaagcccctgttttctacctgcccaaccactctcgccacctcgcttattactatgtgtttatgacttctctgatcatgaaagatgtttagttaaaagatgataccaaaaccattgctgcttagcagactaatagagtggacaaatacattttatagacaaagctcaactaaatccttaaatatttgctatcttttcagaatgggagtgaggccctaatgattctagatgaccaaactaacaaactgaaatcggtatgtattaatatgtgacgtttgacagttcttacttatctgaacatgggttctacttcctgtagatgttgctgataccaaatctgtattgaatctatatgaaaatccaattgagacaactgtttttcaaaatattagtgtaacatctatgtcaatatacaaaagtagtcaaaaaaagattagaaaagtaatctttttagtagccacacctgaatctaatctaatactttttaaggatgtggacaagatagatttgctttgagacatgtctacacttcctgacctaaacagcttaatatgaaatctattagttaaatggaaattaaattgtgacagctactttcctaaactttaggaaacaaatgattacaatatacgaagtaatcttttttagtagacacatctgaatctaatccaaatacttttttaagggtgttgaccagatggatttgtttggggacatgtctacacctcctgacctaaatagtccaacagtaagtgtttgtttttaaatttgcaatgtaataaaatgacatctataactcaaattggcaataaccagaaatcttaagcatctcattgaaacttggaaggtgactgttgatttttgcaaatgaagtgtcaatggtttttagaataaatgtgaatcttaagtcaccatgggaacctatccacactaattcagttatattaatattgcttacagattaaacctgaacaataagtcagcaatgtagtccttcttggtatcacttaggattagaaggaggaggtgaataatagtccttgaataagcctacttgaagaaagtatgactgttagatggttaatcataaagcctcctggcctcttcatttcttttgcattctgtctgttgcaatttagcagcataaatttggtgtgaagtaagatttaaaacaaacaagtggctcagttatattccaccaaagcttgtccttgttagaaagctgcccattctcataggattttataccatatccagtctgctcaatattgaatgatctgtaacaaccctgtaagaacagaacagtattttcctttataaattaaaaaaaaatggtggttcagggaaaaaaaagaagaaaaaaaaataaaaaggaaagaggtccagattcaagacttaggcccaagtcttcagaccttccaaaacatacctctaatgaaaatgtccatgacattttgaatgacttcttgcaacttcttttatttatgtaacagtttcctgagcacctgctatttgcaaggcatagcagtaagatgcacaacatcaatgacatcatggaatttactctccggcagggagaccaacattaaaactaatcacatcgttagtaattgatgttactacagggtatttatctagttcagattcaggtaatgcttctgcaggagtgagtttctagatttgaacataaaagatgagaaggcaataaacagacaaaaagagaattagtctagaataatggggggaaatgtctagaaaggactctcttgtatcaggaaattatcatggaagcctatgtgaccaaggttacaggagttgaagcaatggatcaaagattggataaaattctcccttcagacttctgcagagaatttgaggcctgtgaatccttactgcataaaactttcaggtcaaatgagatggagaggagcagggacttcatgcattcttctctgaccctaaccatatgagtatcacaatgcatggtagcattctaaaatgcctttaagagagaagcctgtttaatattcattttagcagtgagccctaactcacttgcctatagaacctttcattcttcataatttttgttatagttctgaggataaactttttaaagtactagactagattatcctgacaggtccatcctaactctgaggtccttttgatttgtagtcaactttgtgctctcctccattagtgatgttttctcaaataaatcagtatctgaacacttacttcccaagtataaatgacattcaaacaagtaatattcaaagagagcaaagcactcaagatatgaagtggaattccactggaataggcaaggaagtactgcctatataatctacttctgtagacttctagaatgttctaaaaaaggaaatggaaaacaacatggataatcttcagtctcatttttattagactttatgaagtctaagaattttttatttataggaattcaagttttagttaaactaacaataaagtaataaataccatcaaaatatatactctctgataaccaaaagaaggctaacagatctaattatgtgctggttaggctttgacatgttcttatctattgactctatagtcataggtcaaaaatagatttatctctacttggtaaagccagcatgtttaaaaatattcaactctttcaacaattgctctgaaatatgtaaagagagaaagaaatctaaattacctagactttattattggtcctagatggttgtcactcccctcaaatttatacagaaaagttttatgagtttcaaataatgctcatgttgcaaactatgtggtatcccctagaacagaatttttattggcaagccccttgagcattatccttccacactgcatctcaaaaaaggaaaagaaagaaaaacataaaaacccatgttctgcaactttaacaaccacttgaaagcacagttactatggaaagaatataagacatgatctgtgatcaaggagattaaatctggtacaagggatgggatcaggatacaaagcaggagtgtcacttatgtccttgtgtacatgccataagataacacgggtgggcacagggcaagtgcagacagaaaaatcgatgctaaaagctttgtaaagaatctgaatttgagttgggtctttgaagtgtgtaggaaaatagatcatagttgggctagaaacaacgtgggtcttattgtggatcatttggaaatttggcctaaggaggtttattttaatatagggagccagcagtaagccacttaaggctttgagtagagaagtcctcagtctgacaaactggaatggttaggtgagattagccacccagagaagagctaggctatggaactcaggatttatgtccgattactggagctccctacgagcaggttctgtaacgcactgccgtgtctccagtgcgtgcggctcaggtgctcaaacagtggccaactggaggcagtgttgacagttcgacaaagaatgaatgaggcgctgaccaagtgggtggatgaggagtctttgggctctcagttgtagtctgtgaactacacttttaatcttggattaataacaaacccagcctgaggagagccttatacattttacttatagggtgactattcagaagtctaacattgtggctcctgtttggtgtcctaagaacttcttctgaagtatttgaaaacgagaactctaccagctgtgaacactcaactgttctaacccagaggtggctcaaaacaaataaataaatattgaaatcacaagcttttgtaatacattttatcctaccttttgattgtataaagatccctagattaatagctcttccaatccatttctctgattaaatttttttttaattataagctctttcttgtgacaaattcttcttttataaagagaaagcctggctttggcttataaaaactgtatttttatgcctcacagtaaaggaatccaaaagatagattaccatttaggtctgattttgctgtctcttttgtggccatgaaataggacttaaactttctaaacaattgggtatttttttttcttttaaaagccaaggagttctatttgaacccttttgtatttactagtttgcaaattttatattcccttgaagttgtttattttccccaatgatcaaaatatttagtattctgctcagggtaatgcaagataactactataacttgcacttcagcaaggcattttttatcatttatattcttctctgggtagcatagttaagtatttaatggatcaaagtcaagcagaaggaagtgatgtcagtatgaaagttctgttctaggatgagttataattctgtcttttactggaataaagacatgtcggattcatcaaatttactgcttttaagctgagaattttttatcaaacagttgaaaatccaaaaaattaacacaccagagaaatgatagagaggggatagaattagtagagctacatatttgatatgtctttcaaattaactcttaaacccatgtctctaccttgtacaatagtccccctttatctgcagtttcactttctgaaattaagtctgtggtcaaccttggtctgaaaataagtgagtacggtacaatataatattttgagagaagagagacagagagaccacattcaaataacttttattacagcatattgttataatcattctattttattacttgttaatctcttattgtgcctaattgataaattaaactttatcatgtgtatgtatatgagaaaaatactgtatataggttttggcactatgtgccatttcagacatccactgtgggccttggaacatattccctgaggataaggagggactactgtatataaattaaagatcagttgttggttgactttaaccactaaatagatgagattactgtcacaacacaggcaactctaagcaatgttatgaaaagatgtacaaataggagatcttaatgtgtgattgactaaattagatcagtattgagtgtctctttcagaggacatagacaaaaagggtaagcccagaggagagactgggatgatgaggatgagatcctacttgactatcagcttcagcaagagccttaaatattaagagacatacctgaaggccgtgatataaaagaaaagcctctctcccacctctagaggaaagaactggaccgattttagggaaatgcatttgatcttaaatttcatcacagccagaactataaaatatgaatgtattagtcgatgaattttctcatttagagagatgatcctacatgactctgggggtacaatagagaggactgtatgtgtataggtaggaagctgagctaagcttctgaaatcacttactttcaagctcaacatactttgataatcatttatagtgactcacaatcaattccctttaagactttcaaagtcacaaattgaaacaatgctcataatgaattaagccagtctgtatgtgtgaaccagggtgagcagagacatgaagtaagcaacagtaagatttcacctaatgaggttgagacttaaataaaagggcatgatattggggaggaatagaaaggacctagtctatagctagggagtaatggactacgggggttgatggaaggaggtaatgatcaaccgatttatcaagaccaaattcaaatggaaattctgataatcctagtcatcttatgtaattttctcatttgaagtcacaacatggactaacactttctttttttttctttccaaatgtgataggaaagcaaagatatcctgttagtggatctaaactctgaaatcgacaccaatcagaattctttaagagaaaatccattcttaacaaacggcatcacctcctgttctcttcctcgaccaacgcctcaggcatccttcttgcctgaaaatgccttttctgccaatctcaacttctttcccacccctaatcctgatcctttccgtgacgatcctttcacacagccagaccaatcgacaccttcttcgtttgattctctcaaatctccagatcagaagaaagagaattcgagtagctcgtctactccgctgagtaatgggcccctgaatggtgatgttgactactttggtcagcaatttgaccagatctctaaccggactggcaaacaggaagctcaggcaggcccatggcccttttcaagttcgcaaacccagccagcagtgagaactcaaaatggggtatctgaaagagaacagaacggcttctctgtcaaatcctccccgaacccttttgtgggaagccctcccaaaggactgtccatacagaatggcgtaaagcaggacttggaaagctctgtccagtcctcaccacatgactccatagccattatcccacctccacaaagtaccaaaccaggaagaggcagaaggactgctaaggtgaattgtcttctccacatatccattagcagagtgcatgttcggtaccaaagggtggtgtgatgcaagctctctttcctgctgctctcgtagtttcctgtgttgctgtgaaatagaaggtgggataaggcactttggttctccaggagtactttcctctaactgccaccgtttttaagcttctcagcagtgtttttcacaccctgctttccgtgtgcatgtcttgtcacttatgattaaactaaacacaagtttttccatttttaatgctgctatgcttctatacctctggtaagtttgatcatcgtgttctgggttgggagggtgagagttcttgtgattccctttgtacttccctgacactaacacatgccctgcacacccatcatgttgcatcagtgtccatggtggtggtataaaattctcgagcttatctcctcttttaaatactgagtaaatacataagctttttctaagcttatgtatttactattaccactatgatctcagctttatttaagagcaatttaaaatgcagttcccataggtgtctttttttacctctcctaagaatatacaggcttgcctggattaagaccctatgatctctatgtagactgacttaaaatccaatggaatgaacaaaaatatttaggatgcttattggtagttgccccttttacacacttgctcccccaacttcaagcatttagcgatgagaccagaccaatgtgagtgtgtaaaggaatatagtagatttcactttgcaagtcctaggtagtgtcagacactaagactcagtagtccgtccgttgtaggaatctgtgtctttttttggaggactctttttctgtagtagtagttgttgttgttcatctgtcaagaaaaaagttttcctttttgtggctctcaaattggggtatagggtaggagacaaaatgaggctgtatttcactgttagtgagtaactaaggcttctccctccctccctgtcctgtcagtcttcagccaatgacttgcttgcatcagacatctttgctcctcccgtctcagaaccttcaggccaggcgtcacccacaggacaacctacagccctgcagcccaaccctctggatctcttcaaaacaagtgctcctgccccagtggggcccctggtgggtctaggtaggtgcctagagataaaattaagtatgactcttttgcttttgctcataaaatgatgatgcatcggaagagatttcatactcccagagggttttacagcataagatttgagcatcccagggagcccttctcccacttctactatacaaccccacatccatttgatattcttgacttgtaactcacatttggctcctcgaggcagcatgagacaagaaattcattttcagtattgtacttacttgaaccaactggtcatggtttcctgaaagacaattgtaagggattctaaactcagaccagcttcagtagcaaaacagggttgacataagagaggcttgtctgtcaacatgcatgtcttccatgtcttttgccataatagatcgaaggcctatgtcctttcaacacatagccctcttagaaggaatatatgcccaagaaggatgtaagttaagtctgaagcaagaataagtcatagagtgaaagtcctaggttctgggcccagctgtgttcctaggtgtatggtaagggtagatcaggcacacatcctgatcagtctctgagcacttctgccataggagctccttgccaatattttggctagcttgagtgttttactgaagctagaacataagtcctagaaagccaaagttgaaaaaagagagaaataagggaagagatggaattttatcagacagctagtatgcattgacgctcttaattcctaaatgtgtcattagcttgtgtgagccgctgatcactctgtggtaggacagtgggaaagtccacttgactgagggctggccttgctattcttagtccatagcctatagttcttttcagactccatggtacagttttcagaaaccctgacaatagtttttgctgtcctgctatggactctatttttcttctcttggcacctctacaaactccaaatggactctggcttgggaggtggaggactgtagacgaggaaggactctcctctccttcggtaaaatctgaccagggatcctggctttctctgcctcctgcagtcagtcatcaggatccttgttttgttttcctctctgtctctgttgttttcctacaaaggaaaatagtttggttcttttacaagaaatctgtttaatcatatctagaatagggtggccagaggaggactgttactcaactgctgagtggcagaaatccgtgagggtatgaaaagccagcttgtcccaggtctctgctcgcatttaccccatcaagaggctctctctaaagacttcatgtctcttgggggcttccccctttctgcgttgctcttttccttgcacccccaagtggagctggttggtacccttccctcacagaagaccagagtgcttgcaatgcaatgtctgcagcgagatcacatcacagagctttttatctgatatcaatgcccttaagaatttttgcagccaatatttaacaagtcagcctgaaaatacagctggaccctataactgtttatttattcagacgaagtgaagctttttggctaggtgcccctgttgagggcttggggtatacaactgcagaatactgatgattgttccaagtttggacatgggactcaaactgagctctacagtatagtccctgtccactagcagggatcctcagccaaaccatggaaggttgtaggtctggcttccgctagacccagctgggggactgtctcccctggagaactgggggggtggggagagggtattgtagaaagctgagccctcagattcaacttgcttgtattttaatctagcctcagaaggtaataaaattaatgttctatacccatgtcccctttttccttattccttgcccctactttgtcaatgtgttcaatgtgttcaatgtgttaaaacacaatgtggggatttggtgggtaggaatgaagactggtataagtatatactgggaaagccttgaattcctggcaaatgtaatatttttctctcctttttttttttttttttttttgagacagagtctcactctgtcacccaggctggagtgcagtggtgctgtctcagctcactgcaacctctgcctcccaagtttaagtgcctcagcctctctagtagctgggattacaggcatgcgccaccacacccagctaatttttgtatgttagtagagacagggtttcgccacgttggccaggttggttctgaactcctggcctcaagtggtcctcccactttggcttcccaaagtgctgggattacaggtgtaagccactgcgcccagccctaatatttttctcttttacaaataccattctcactaatatgatattttcctaaatgaagacaagttgtccaacatgaaagatgataaaattctaccctcctttttgcacagctaactggtggaaattattagcaagtgatctggcttctgttaatacaatttaattgaatgtgttttaaaatacaagcaacaactttgttcaaactaaacccatttttagagcctgtattgtagaatataacttttctcttgatttgttatgaaaggagtatattcttcagtgaaaatgaagtctaatttctgtatccgtgaaataagtatttgaattaacatagcatttgaaaattaaaattgccccatgccttgctgccaaggaagcagaacaggagaatggggtgccggatttagagccagtgtgcctgattttcagtttctaccatcccagactatgaccttcccaattttaatgaatattcttgcacccagtttcctcacctccaaaaagcatgctgattaagtgaaatggcctgttctgaaacccaccactctctgtgagtacaccatgtgtgcccatggccagatggccagcatgcatgatgagaatggagtcaggtaataccaatgtctcagactaagaagctcgaagatataatcttgtgctccatcactcctaaataccattttcaaagtattccctcttggaaacataaacgtccctaacccaggtctgaagaaaactttcataactaaagaatgccatgcaccaaagctcaaagcaagtagatttcaagagcgaagcatcacccactaatagatatgaggctgaatttaggtttccttcttagcggtgagtttaactgaatcattaatgcacttggaaagaggcaggaaagacagtgccctgtatattagaacaagatgcagggagcgagcctctcaagaatcagaggccatcattggagaggcctggattctggcgatttaacgaattcctgatgacatagcaaggtcgtaggagatggagccattcaccacaaagatcagatgccccaacacaggccattagttaccttgaaagatttttgtttcccattgtcctctctcctcttttaaattctctgttctaacttctggcaaggtttagcaaatggcacatggcaggaagcacttttatttgaaacagtcttcctaggataacatcctttcttccatttttatatataaacgtctaaaactatcttggcattggccaaactttatcttccctttatgtatatagctgtatcagtcttggcagcaataaaaagtgaagaaactttgaaatggtttcttcaggatgcaagcatgttgaggtcttgtgcacatgtgtgattgctggtttccataagactccagacgtgagccagttgccaaatgaaaagatcaaatctgtgactcagagagtccaatggattatcttaattaactacatcataatcagcatggttcatgcataaaaatatattcacttaaataagttcctgctattaacaggctctgttctagttgtttgagatgtatcagacaactagtgtctgtatgataagggcttatttttttgatgagtagatacttatggaccgtactacccttctaatcaggaaagttaaaaagacatggtaggaagaacatgggcctcaaaatgcaaccagcatttgaatgctcactatacagtgttagctggctaacttttacagtgattaatctgtcatattcttcccatatcagcctcagggctcaatggaggtgttagctgtggagaggctttccagagagttgtgctctctgaaattcaagaatcttcttcaagcttgactcctgataagtatttttcttcctcttacttcaggtggtgtaactgtcacactccctcaggcaggaccatggaacacagcatctttggtcttcaatcagtccccttcaatggctccgggagccatgatgggtggtcaaccttcaggttttagtcagcccgtcatttttggtacaagtccagctgtttcaggttggaaccagccttcaccctttgcagcctcaactccccctccagtgcctgttgtctggggcccttctgcatctgtggcacccaatgcttggtcaacaacaagccctttggggaatccttttcagagcaatatttttccagctcctgctgtgtccactcagcccccatccatgcactcctctctcctggtcactcctcctcagccacctcccagagctggccctcccaaggacatctccagtgatgccttcactgccttagacccacttggggataaagagatcaaggatgtgaaagaaatgtttaaggatttccaactgcggcagccacctgctgtgcccgcgcggaagggagagcagacttcttctgggactttgagtgcctttgccagttatttcaacagcaaggttggcattcctcaggagaatgcagaccatgatgactttgatgctaatcaactattgaacaagatcaatggtaagccactcaccactctgcctactgttccaacaactatctccactgccacatggacctaaatgagttccccaaatgaaccctctcccacccgccaacagctttgctcttgcttctgttggtaatcaagggttacggagacaacttaaccatttaccttttggtgataactatttaccttagtcatttctgaggactgacccaatgctgccctctagtgataaatcttaaaagggctgccatgagctattgaaatgtgatgactggtgactcttggagggctgtgtaataaggcgtcatccatgtcccatcagcttaaaatgaggggattctgaatctcttccacttcagataaatatgcatggctttctcttccgagaaggataataattattggggtacctagtatttggtgttgatttttgttccactgatgtaaatttcaaaagtatagaactaaacttcaaaaataagctgactcggggactggcctatatttggggaaagcttgtctactgattgcctggattttttaccttctagaaccaccaaagccagctcccagacaagtttccctgccagttaccaaatctactgacaatgcatttgagaaccctttctttaaagattcttttggttcatcacaagcctctgtaagtatgaactactagaagctcttctccaaagtacatgccacatagagctccagcctcctgaattaaccttgcttttataatagcttttatttatttatttatttttttaagacagagtcttgctctgtcggccaggctggagtgcagtggtgcaatctcagctcactgcaacctccacttcctgagttcaaaggattctcctgcctcagcctcctgagtaggtgggactataggcacgtgccaccacacctggctaatttttgtatttttttgtagagatggggtctcgccatgttggccagactggtctcaaactcctgaccttaagtgatccatctgccttggcctccctcagtgctgggattacagtcatgagccaccgcacctggctataatagctttttgatggtaaaacatgtttagctaagatttgtcaccaagaaccttcacagtataaacattcatttaaactggagaaagattatttgcacaagaactattatcttctgaatttgagaaataatatcacatagaaaacatccttcatatctcacttaacctgacccatgaaagcatttcgggagaaaattgagccaaaatactgtcttgaaaacctttcaaaaatttaagttcttaattttccaacaatatttctatagcctgtgaaaataatacttcccatttcggggaggcaaatgaaatgcatctgaaccttgattttcacataaataatatacactgccatctgcaagcagatgaaaacaaaacactgtaagccccatataatgtttgattggctgattggcctatgacctaagcgatttttaaaagaattttggaagtcttcattgcgatttttttcttatgactgtaactgtatttattgactagatgattttatcttcttaggtggcttcttctcaacctgtatcttctgagatgtatagggatccatttggaaatccttttgcctaaattctgtaagtagaagatcctaataagcctgtctcaggggtttttgtgagaaagggtgacatggaataaagagtgaaattttaattttagaattgggaagagggtaaatatctataatttaggagtaatcgacaggaaaatctctactgagatcattcaataatgactaggctgggcacttaagaatagaattcctaaacacatcaaaaaatagtaatatacccttggggatgtggatttttatcttattccatgttcttggtttttcagttctgtgtgggaagtaaaactcaaaacaacacatcacaggtttctaacctttttactttcatattgaagtggttgcaaaacaacctagtaataatttggtttcctataaagggttcagattccattgactttctgaagccaccaagtcagcaaaacagattatgatcattacttctctaccatttaactgtgagcaatctcaaagttagtctgaaagagtctgatggtattaaatctgaaagttttaacaactattaaagatctccttcataggcagtaggagctcaaaatgagtctgaaggttgattcttctgtctcatgaactttatcttagataagtgattaggtagaatcaccctcagctgaaatcctgggagggctcagtgtaactctttctctacagaaggtgacagcaactttattctgatctcaaaagactgaatttagtagggaaaggaacgctctccccattttagagcaggtaggccagctggtaggggtagaacaatagaaataatgaaaaacaacaacaacaacaacaaaaaccaagcccattttttttccaatcttgtctcatccaaacaggactactaaactgtgatttggctcatctagaatgtaattatttttaatagatagatatcttaaacgtggcgaaaacaataagattgagcttataggcatctggatcattttccctcaactccagttctacaatgactgtgtttcctgtagtacctttccataaactgcttcagagaactgggtaaatcattaaaaatgcaaattcctgggtcctactgcagccctaaggaatttctctttggtgccaaggaaatgcttccttttaacaagagtgcaggtgattctaaaggtaataaagcagtaagtagatatttaagagctagaagtcttaccagagatcattctcaccttccattcaaggggagatatacccaaaccaatagaaggagtaaactacactcagagtcaagatggattgtatggactaaattgaatgaactagacttctctttggaggtccttccttctttaggtcatgaaggaaggatagtttaggtcaacctgctacatcaatagattgggtaaggggaactctcatgggataaaataactaacattgttgagcacttgcgctaagcattttattagatgctctacatttatcatcttcatcaatcctcacatcagccctaggagatactattactgacatctttaataatgacttgatatttaatacattgatattcagttcaaaaattctaaccacaagtttctttcttctccatacctctctaggaacttggtctgcagaccatccagaggaataaaaaggttggccttagtagtcaaaaacaaagctgatagccagacacgttctgatttctgcccttgttccagctttgacgtattatctgttgccttatttctcattgcctcttctacttgtaaaatgcttttcactttctgtctaggttaaagctaaactgaatctatggctttaaataaattaagatcctaaactctctagcttaagtgtaaatgaagtacagtagtttccctactgaaccctgcctcttgtgtccctggaaccttctagaacacctgccttctaccctctggttgggagatgcagccaccacatcccttcatatcatactgttttgaataaattttcaaatccttattgttcagagttgtttgggggttctgtttcagagcataaaacctaaaggttatagtagaacaaggcaccttcttaaaagaaatcttgcttcagaccatcagttacagagaatttctaaagtaaaattgaagcaactacaacttctccttagacactttggaatctaaccacttaaggacctttttaaagagatagcttctcttctttctgaagatcaatttctcccaaggccaagattgtccttttctcccatttcttgctagctattgcaaatgagggaagaacattattcatctctcctccccttttttttctgattcttttttcagtcagttttgctcctgggttcaagtagtattaccaccctttcacaagcaacagactctcacagggcaaaaaaaaaaaaaaatctaatgattcacagacagatctggagcctctcttcattctcagtaattgctagtcccaagaactagaattgcaaatgggcacaacctatatccttcctgtggaagaggaggccactctcttgagctgaagttccagaagagcagttaatgttcaagagaaattgaactcaactcagcaacaaaggactctattttgaagagcaacatatcacaaagctaaatgtgattgtgccaaacacattaggtgcttatttggggtcatgctaggcctttatcaagtaactggaaaacttttcttgcagccacaatctcaatgtcgttagtaggaagataagaggggagaaaaagctgtagaacaaatgtttggggttaccattgaaaatctaatgtctgcaatatttttctcctcacaacttggaaacgttcccagttcattttcagtcctgttgtgagcacagttctgaagggtttattattgtcaaaataagttttgttttgttttgtttatgttgggtttttaatgttgtctcttgacccttaatgctcaggttcttgtgggagttaatcagccacatccaatgttaccttgagggggaagaagagggtgatgctcagaagctaaacaagacaggggccacatgaccctctattgattagccccaagtagaaagtcctgtggttttatgtttaatggtaatagttgatcatatatggcataattttctatcagcttcctactcagtcactataaacacagacttgaaatagtactttaaatgtccaaatacctaaatgtgctaaactggaggtaactatttctaggtagttgaatttttgaaagtcatgatcagccacacaactgttttgtacatacttattttctcatgcacttttctgtatgcaaataaagctataaatttactcatttcaataaactggagtggcagaata

SEQ ID NO: 285 - DNA, 78934 bp, Homo sapiens
  source 1..78934: mol_type = genomic DNA; note = NC_000001.11:c226310082-226231149 LIN9 [organism=Homo sapiens] [GeneID=286826] [chromosome=1]
attactggaaagtgttacagacagatattgtgaaatttttccttgggcttctttcaatttcgttcaattctcgtccagtattctcataacatttggatcaggtactttatcaccttgtagtgtcactgttcctttctgtatcctctcgaagcctcctgttactcgttttctaattctcttccagcccactgcacgatctagtgtcgaatggatgaaacagctgagcagaacagttctttagctgtcggcctaaatgaccaacttcatgacctctcaaggtctcgctccccggctgcacgcagctcagcttccaacattcgggaaaggcgtgcccggatcgcgaggggccgctgggaccgagtcccggacgtcgcgacgcgcagggggctgctgcggccggcggtctcgggaaaagtgaggggacggaggcgcccaagcaacgtgggtttcgggaactgtgagtatttcactttgcgtagagccccctcgggcaatgcgacccagaaccgagggcttctttccccccgccggggcctccctcccgttctccactcggaacaaacagcctgcagttcccgcagctgcagcgcgggccgcggaacatgcgccgggagcggggcccgggcgggactccggagctggtactgctccccccgcgctccggcgccgggcctcgccgtgcggcctccttcctcccttcctcccgcccggctcggccggaggcggcggcggaggggcgaggcgcggccccccttcggcggcacctcctccccgggcaggcgcgggcggagccgggcccgcctcagccagccgcggcgggagcagcgcagcgcggcgccgcgggcagcgagctccgcattcgaacctccctcgcaaagacagtctccgccccacaatgcaccgcggcgggcagcctttgaaaaagcggcgcggctcgttcaagatggcggagctcgaccagttgcctgacgagagtgagtagcacctcaaagcaccccccccttttcccgcctgctgcttgcccagcggttgcaccggccgggacggacggccgtgccctccgctgggcaggtgggctgactgccagccccactgtggtcccctagtcctcccactccggtgttgccgccgcgtcgccgcctttgttatggtgtctgtgtgttggtttctggggttgtgtgagcgccagggccggaaaccgagagcccgggagtccagcctgtgccaggcggaggcggtggctgctcccctggcgccactccggcccccagccgaggtggagggaagagcggcccctgggcgcgggggctgtcctcgccgcctgcaccactcgcccggcgccgagagacgcccgccggggttatgtaactcgcctgtcccggggccgggggagggctcgggctgggcacggggtggtccacggccccttcttcttgccccagcctctgatcttgtcctgtcacagctcctgcctctacgggcacttgtgatcttcactgtcctccccacccccccaccggtgtgtccacccctggaagtgtttccgtgtcagagggttggccccttcccctgggaccacaggtggctgtggacctttcctgagatcatccagcccggatactcagtgttcaggtagaccccgtcccgcagactttattctatatgtgtcttaagagccataaaggtacctttatgcatggatgtgaccaacacagcgtacgtgtaccctgcctgacacccaccctagggcattgcctcccctaaccatgtttactcaccctgacatctaagacatgtatgctcacttgtgttgagtaagtaaaagcaccaattccatagtttaagggcaatggaacttaattttgtaatttacaatattgcataaattatatgaaaagacaaatatgttatttaattacaaaaaaaagtcctgaatccactttcactattcagtttatacatatttgtgaaaggctcaattactattgaatcttatctatgcacaaggcaaatggacttaaaaatgaggactcaacatactaccgattccattttctttgtgaggtcatgtgttcttagtaagttataaagttaaaaattcaagttgccaagctggtgaaaagtcgtattaaaagtgtttgtgttttaaatttgatagagagcagcactaagtccccaaggaactttgtccatgatagaactgttctcttttgtgatgtccagtagggcagccaagctactagccatatgtagccatggaacatttcaaatgtggctagagtgatggaggaactgaattttgaattttatttaattttaacttgcatagtcacatgtagctagtagtcactgtattgggtagggcacagctattgaccagtcatgagctgtactgtttatttgtagaatacaattgattgtgatttattttatttatttatttattttgagatggagtttcactcattgcccaggctggggtgcaatggtactatctcggctcattgcaacctctgcctcccaggttcaagcgattctcctacctcagcctcccgaatagctggggttacaggcatgtgccaccacgcctgcctaatttttttgtatttttagtagagatgggggtttctccatgttggtcaggctggtctcgaactcccgacctcaggtgatccacccgcctcggcctcccaaagtgctgggattacaggcgtgagccaccgcagctggtcttgattgtgacttagaatgctcccaaatgagtgtggacctactaagcacagtgtacttgtcatccgaaaatgtttttcatcatccttggtatctttatcataaacatgtcttatcacctcttggatgtcacaatcactagagctactgttttggttactgtagtcattctgttgtaatgagaggcattttaagtggctttcttacaactgccattaggaatatttgcttcatatcatccagcatttattgagaatttactgtggttctttgtagggacttgggatttatattagggttcaaattccagctccactttcaaattatataacctaatcatttatattactttgtgacatctctggtgcattggtgtgtatttgtgaagcgtatgtcttgtttaggtagacttcagctttgttgaaaccagggattttctttctttctttgtcatacagtgccacaaatcaagtatacataaataatttttatggaattagtgcaaagtaacaggtattattactgaaactagagcagggtcttgaaaaggaaaagcgatttcaatttgatactggaaatagcagtatgttttttggccacatttagtcaaggaggctagctaatatattgttcaggagtcgatataacattatcaataatgaaagctaccatttattgagtatttactatgaaccagatgccatgcaaaggatattacatgtatttgctcatttaatcttcatttcagttgatgtaagtgctcacattttatataaggaaattaaggctatcttcagcccagatctttcctgagctccctttcttgatatctcttgcctgtttcacatttcttcttagatgcttcaaaggcccctcaaactgcacaggtttaaaatccacctcagtcctaccccaggacagatacttctagtgattcgaatggttccactgtgcattcagctggcagggcagaaacctagagattttctttggcacttccctctctttcttttcttttgttttttttttgagacagagtcttgctgtgtcacctaggctggagtgcagtgtgcgatctcagctcactgcagcctccgcctcccgggttcaagccattctcctgcctcggcctcctgagtagctgggtttacaggcgcccgccaccacacctggctaattcttgtatttttagtagaggcggggtttcaccatgttggctaggctggtctcaaactcctgacctcaggtgatgcacccgcctcaacctcccaaagtgctgggattacaggggtgagccaccgcgcccccagccactttcctccctttcacttcccatatttaagcctttactaagtctgtaaattttaccttctaaatatctatcaattctacccatttcttaccatcagcatagcccaaactgttaccatttcttctctttaccaattacctcagcctctcattaattcagcccccttcccacaaacacacagcgagagggatcctttcaaaacgaatgtatgtcatcctcctgttacaaaccctttagtagctataagaccctttgtggtctggctgctccctacctctcagctttatgttttaccacttgtcccctcattctatcccttggggtaaattggacctttttcattcccgatactcgccagtctccccttttctccagggtctttgcacatgctgttctctcaacctggaatgctacccccccacaccccccttactttcagttaacttctaattgtcttttagatcccattttatgcttcttcagagagccatttcccatcctccctgactaaattatgtcttctttaaatctgttttttgttttttaaagagacagggtctccctctgttgtgtagactggagtgcagaggcatgatcgtggctcactgcagccttgatcttctgggctaaggagatcctccggcatcagtctccccagtagctgggaccgcaggcatgtaccaccatgcccaactaaggttttttttttttttttttttttttttcttttttttgtagagacgaggtctccctatgttgctcaggctggtctcaaactcctggcctcaagcgatgctcctgccttagccttccaaagtgctgagattacaggcttcagccaccatgcagggcctatctttatttttttttaaagatggagtcttgctctgtcacccaggctggagtgcagcggtgcagtctttgctcactgcaacctccgcctctagagttcaagcaattctcctgccttagcctcctgagtagctgtgattacagatgtgtgccaccaagcccggctaacttttgtatttttagtagaacctggctggtctcgaactcctgccctcaagtcatttagccccccaaagtgctgggattacaggtgtgagccactgtgccaggccaggcccatattctttaaatctttttgtattactatgtaacttcctagtggcagctattacagttgcagttttgtatttgtttatgtgattggttagtagccccatcagagcaggtactgtcttaattgcattcccagttccatgcataacacctggcttacctctgccctttcataccattcttccctatgcaagcacagtcacccctcctcccttcttaggacttaacctgtttcttctgcccagactcattgctttgatttcctgctctctcacagctagttttttagatgttacctcctcagagaaaccgtctgtactcaaaagtaaggtagctagtacttagagtaattcccccgtccccaccaatatcaccctgtttatttcctttatcatgagctataattattatgtacgtgttttatatatatatgtctctttccactagagtttaagcttcctgtgaggagaggctttgtttgtcttgttctttggggtaaccctcgcccctaacagtgcttatggtaggcattcaataaaatttttttttccacatcagatgggtcatgtgctgacttttcacaaagtttgagagagacacatctcacacatgagtatgaaaacccaatcatcatgcttatgaactaagaagggtagaatctttggattaatgaacacctcgttagagcaagattctaatttaatcagattcgcctgactgaaaaatccatgttcttaacctattattttttgattgctcaaaataatactaacagcattatatcaaaattaactgtgtaatatatgcattgttctatgcacttttacatgtattaactcatttaatcctcattttacacatgaagaaacaatagcacagagaggcaaagtaacttgcttaaggtagcatgcaagaaagtgtcaggaccaagattcaaacatagctagtctcaatctagaacctgttttcttaaccactatgctatcctgcatctagaaaaaggaaagaaggaccggttgcggtggctcacgcctataatcccagcactttgggaggccgagccgggtggtcacctgaggtcaggagttcgagaccagcctggccaacatggcgaaaccctgtctctactaaaaatacaaaaattagctgcgtatggtggcatgcacctgtaatcctagctacctggaaggctgaggtggggagaatttcttgaacccgggaggtggaggttgcagtgagctgagattgcgccaccgcactccaacctgggtgacagagtgagactccatttcaaaaaaagaaaaagaaaaaagaaaacgaaaaagaaaaaaaaggttaaaggtgattggtcagaatccccaagatatggttcctgccttcgtggagcaggagtggatattcttatggcctatatacctcttccttcagatctctgcttaagcatcacctttcatagaagctcatcatgaacaccttatatacaaatagttttccttccctccatccccaccctgcgtattcttcttcttctgctttattttttccagagtgcttatcattactcgatagctgtttttgtttgcctcccatcactagaatgtacattccatgagagcagggactttgactattttgcttgctgttgtattcccattgcctagagcaggtagggactggcatgccatcagtactctacatattcagtgagtgaatggttactactttttctcaaatgcactgcatatcttttggtacacagatgtgtgtattgtctactattgctgctttacagttgtgtttcattgtttgagactttttagcaagattttatgtcattcacccccatgactttactgccttttgtcattaagcttcatttgccatgcagaagcttttatggtgtcctgttaactattcttcacatctgggcaagagagtagagtgaaagtaagtgtctttaatgctaataggtgtctgtttcacaagtctcttacacagacctgtggaggaaaaagtcagttgaggtttagtgatcagagatgcatagtgtttaaggatctgagatgaagtgtttcataactgccatactttatctgttgcttctcattttaagtctgttatccatttatatgagatgtaaatcatagctgcttttgttaaatagcaaggaggattaatccgtcctctctgatttttgttcctagttcatgttcttttttatttaatcccctgagatcatccttaattattatttttcagatgacttggactttgcaatgtatacatccaattctgagatttttaaatttagtgctttctcactctcaaaaagcttctttctctattggtttgttttttttttttttttggacatggagtctcactctgtcacccaggctggatggagtgcagtggcgcaatctttgctcactgcaagctctgccttgtgggctcacgccattctcccacctcagcctcccgagtagctgggactacaggtgctcgccaccacacccagttaattttttgtgtttttagtagagacgggttttcaccgtgttagccaagatggtcttgatctcctgaccttgtgatccgcccacctcggcctcccaaagtgctgggattacaggcgtgagccaccgcacccggcctctctattgatttttctactttccctacccatagatcctataattcattcacaccagaacctgtagcctgatgtttctcaaagtgggttacctgcaacagaatcccctgttgtttattaataatatagattcagtctagattttgcatgtatgaggagcttccttgttattctaatgtcttttttatttttttgaggcagagtcgtactctgtctgtcaggctgaagtgcagtggcacggtcacagctcactgccgcctcaacctcccaggctccagcaggcctctcacatcagccccctgagtagctgacactttaggcacgtgcccccatacccagtgaattaaaaacatttttttagagacaggatctccttatgttgcccaggctggtctcagactcctggcctcaagctagccttcccaccttggccttccaaagcactgggattacaggtgtcagccatcatacctggcctctaatgtacactggagtttgttttatccagtggacccctccaactttattctagcccctcttggccattctgtattcccttttccagcttagatcttgaagtatcacatatacctgcattctagactttcaagggacttattgcttgctctgacagtccctgaatcatttccattgcctgtttttttccactccattactacatcagtctttgcctcaatggatgtcggttccctttctcttttcttccagcaccacagcacgcctggatgaggatccaaaattacctctgtccccactcttcctctttcttctgtttcttcactttcttctcctggaatggtctccagttctcacaacttcagcaagactctcatatgtctctctccagttctttctttatctgagttctggtttatagtttgaattgtctgccagatatttcgaattgcacattccaccatctcttcaaactcaacattactaaaactaaatggatcacttttacccccaaaccaaggtctttttctctcactttggttatgaaataattattgatttgttttatttttaattgcaggctcttcagcaaaagcccttgtcagtttaaaaggtaagaagtatagcatttttaggtataccatagctaaaagtctaatttgttaaattaatctggatatagtgtttccattttccttctaagttatgattcattgtagcttttcagtattggttttcactgataaccttaaattaatatgcttttataggagaattgatcctcagttgttagaaattatttttaaaaatttctaaaattattgattaaaaacctttctaattaaacattccataaatatttagattaaaagcatttgttaaacgactgtgctgacctatatgttagcataattgtttgtttgtttgtttttgagacagtctctctctgttgcccaggctggagtacaacggtgcaatcttggctcactgcaacctctgcgtcccaggctcaagcgattctcctgcctcagccccctgagtagctgggattacaggcatgtgccaccatgcctggctaatttttgtaatttcagtagagacgggatttcaccatgttggccaggctggcctcaaactcctggcctcaagtgatctgcccaccttggcctcccaaagtgctgggattacaggcgtgagccactgtgcccagcagattttttgtttatttattttttgagacagggtctcgctttgtcacacaggctagagtgtggtgatgtgattacagttcactgtagcctcgacctcctgggctcaagtgatcctcttgcctcagcttcccatgtagctgggaccacaggcacatgctaccatgcccagctaatttctttattttttgtagagaggaggcctcactttgttgcccaggctggtctcgaactcctgggctcaagggatcctgctgcctcagctttgcaaagtgctgagattacaggcatgagccaccacacctggcccgtaatagcttatttttaagagtcttgctttcactgggcacggtggctcacgcctgtaatcccggcactttgggaggctgaggcaggcggaccacttgagctcaggagttcgtgattagcctggctaacaaggtgaaaccccatctctactaaaaatacaaaattatccgggagtggtggcaggtgcctataatcccagctacttgagaggctgaggcaggagaattgtttgaacctgggaggcagagattgccgtaagccaagatcgcgccaccacactccagtctgggagtctgggtgacagagtaagactctgtctcaaattccaaaaaaaaaaaaaaagaatcttgctttctaagtaataatgtcttgaaataaaaataaaagaataatagtacttttctcattctaagaaaaagtttgacatgttccttggtctcactatttcttttggcaggtacattagactaacctttttaacatagtttctttaaaattttacctcttgattaagattctggtaggtcaataaatttggaaccaagctaaatattctcaaagtacttttagtctttaaagctactatattgtgctttggattggtgatttaccaaattaaatccttctagcttgagaagacaatttgtcttccagaacaccccagtttgtttgtcttttgtgattcttaaaaattattccattattctttttctcccaatattaaactcatttctctcccccctgccttttttttttttttttttgagactgagtctcggtttgtcgcccaggctggagtgcagtggcacaatatcttggctcactgcaacctctgcctcctgggtcaagtgattcttgtgcctcagcctcctgagtagctgggactgcaggcatgcatcaccacacctggctaatttttgtatttttaatagagatgggttttcatcatgttggccaggctggtcttgaactcctgacctcaggtgatcctcccactttggcctcccaatgtgctgggattacagatgtgagccactgcacccggcactcattcatcttgataaatcatttatataagtaacgtacatttcttatggaaaaaatgagaaaatgctgatgagccactagaagaaaataaaaataaccagcttgtatattcatcccagttttctatgcctctatataaacatcttttttacaaaaattaaacttacccctctttattttcacaatatgtctaatcattataatatgtgtaaatcataatatgtctattcgatagaattcttttctgcttgtgtacaactctgaagacatttctctgaattaaggaaaacagaaataaccacgctgatttactttttctttttttgtgaggggacagagacttgccatgttgcccagactgaagtgcagtggtgctatctcggcttgcttcgaccctggctcgctttgaccctggcttgcttcgaccttcgcctcccaggttccagcaattctctgcctcagcctcctgaatagctgggactacaggtgcgtgccaccatgcccagctaatttttgtattttttgtagaggtggcgtttcaccatgttgggcaggttggtctcgaactcatggcctcaaatgatccacccacctcggcctcccaaagtcctggaattataggcatgagccattgcacctggcctaatttcctttttatatatcaagtgattcacatattaaagcagaaaacatttagaaatgtgctctaaatacaggctggcctggtggctcatgcctgtaatctcaacactttgagacactgaggcgggtagatcacctgaagtcaggagtttgagaccagcctggccaacatggagaaaccctgtctctactaaaaatacaaaaattagctaggcgtggtggcacacacctgtaatcccactactggggaggctgaggcaggagaaccactttaacctgggaggcagaggttgcagtgagccaagattgtgccactgcactccagcctgggcgatggagcaagtactctgtctcacacacaaagaaaaagtaaaaaagaaatgtgctctaaattcaaggttagaaaaggctttttccatttttgattcccctgctttcagaattgtaccaaaagttatgagatagttcttggcaagttggaatggagaaattattaaaaatccaaaaacaaagaaaaagaagcacatgtttcagtatggacatttaatactttcaagatgcattgctttatcaaattatttagagagtttgacagaaaaatacggaagagctttttcatttataataatctaaaattattatagtcagtatattttttccatattaaatattttagatatatggctgttatgaaaaaaacagtattcatggtatgaaatcctttgaactaagccaaaattccattagtattaactatttattacagaaggaagcttatctaacacgtggaatgaaaagtacagttctttacagaaaacacctgtttggaaaggcaggaatacaagctctgctgtggaaatggtaaggagtgagtttttcttacattttagaataattctagctaagttgtctgtattattgtcatgtgtaaattcttgcagcacagtaaaaaatttacaagtttttttcccaacctcaagtgtcattaagcactgtttgatcttatttaggtaaattaatctgtacccagtgataatctggtcatcagtaagcatttgttcagtaattgtgtaatagtttctttaaataggaaaaacaaaaactacaacttatacttttattagatacgcaaaaaattttacatggctttggtacctgcaaaaatatatatatgtggtaaggtattaaaatcttgtatagacaaaaagaaaaaaaaagaaatcattgtgtagctcaaaggtaagtgcatttagaggtgggaagtagagatgagcatataattgacatgactaacagttttaggaactctctttctctcctgccctgccaggtagccaggaggttttaagggtctgtcatgaaacagtcctggagttgggatagacagcagcagtcacagtagcctgggcagctgaccacagtgaatgtgaggggctttcctcactgtgtcaattccatcatcttcattcccttcctcttctctgcttgtggtcagggaaggggggcagtgtagaatggaattcctgtcagggctatagagtatcaagactctgagtgggtttaatttctttttgtttttctttttttgagacgaggtctcgctctgtcgcccaggctggtcaggaactcccaggctcaagcgatcctgcccgctcagcctccctagtagctgggactacaggtgtgtgccaccacgcccagctaataaaaaattttttttttgtagagatggggtctccttgtgttgcccaggctggtttccagctcctgggctcaagtgatcctcctgcctcggccttccaaagtgctgggattataggcatgagccactgtgcccagccagagtgggtttaatttcaagggttcatagacccgagtggatgttgcccatatgttgttagccgcctgcacctgtttctcttccaaatagccatgaggggtgggagaaggctttgaaaaggatgtaggtcttatcgggatattatttctttttctctctattaatgaaacctctgaacctagggtgaactgtaaaatctttactattacagacccttaagtgtatgatgtacttttggtacttaaacaacttttttagttctatgggtaattatcaggtatctatcatatgtatcttttatttacaagtgaaaattcggttaacaatttttgacagcagatagagtataatagtatacacatttaggcttactcttctagagtgatttagaacctttggcccagcccagccctatgcagcagacatatcatgtcacacacccaattggtattaacccaagcaacaacataatttgaactggaatttccggaacttattttcctatcatcactgtccaaggctgccagtgtactaaggagacttggggttccagttttactttattcatcagctaggtatttcattcataagcaccttgtataaatacatcttactgctttctaaatctgagattatttatatttggctttgtgtgctttgtgttgcccatactttatccttccatactgctgataatccagagttagctcagttttccaagtatagaattgtattttggaacaaaaatgggagggttcggctttttcattaaatgaaaacatttctatcatagcctttcagaaattcaaaacgaagtcgacttttttctgatgaagatgataggcaaataaatacaaggtcacctaaaagaaaccagagggttgcaatggttccacaggtatgtgtgtgctaaaattttgtttcattggaaaggaagtaagcaaatgctcagcctaataaagtttatatttctgttacattttgagtaacaagttcttttctttaaattcgtacggctgctctggtcctgttttagttacctagaaaatgttatttttttgatcaactttaaaacaggatagaaagccagtcattagtcctacaaatgcacacttttaagcatggagatagtggaagaatttggcaacatggcatcaatttgtaggtttgcacagatataagagggaaaaaatgttttacttgatcaccaagagaagtacattgaagacttcctttatccaagagaggaaaaaaatatatatatatatgtttatttatatatatatattttgagacggagtctcactctgtcgcccaggctggagtacagtggcgtgatctcggcttactgctacttttgcctcccgggttcaaatgattctcctgcctcagcctcccgagtacctgggattacaggatcacaccaccacgcccagctgatttttatattttagtagagacggggtttcaccatgttggccaggctggtcttgaactcctgacctcaagtgatctacccgcctcggcctcccaaagtgctgggattacagtcgtgagccactgcaccctgctgagaggaaaatatttagcatgaaatcgtatctccttatttatttttggcatttaaaaactcatagtgggctgggcatggtggctcatgactataatcacagcactttggaaagccaaggtgagtgcatcacttgaggccaggagttcgagatcagcctggccaacatggcgaaaccctgtctctactaaacatacaaaaaaactagctagcatagtggcacacgcctgtaatctcagctacttgagaggctgaggcatgagaatcgtttgaacccaggaggctgaggttgcagtgagccgagatcatgccactgcactccagcctgggcaacagagcaagactctgtctcaaaaaaaaaaaaagtagacatgtaaaaattaaaggaatgaaaattagatagggaaatattaactttaagggtaatgtaatttttgtcttattcaatttataacttctgatataatcattccctatttctctttcattattttccaaagccttataaaacaagattttctagtataatggatggtagaggtgatattctcaaccaagaatttagcattaggtttttttttttttgttttttttttttgagacagagttttgctcttgttgcccaggtggagtgcagtggtgtgatctcagctcactgcaatctccagctccttggttcaagtgattctcctgccttagcctcccgagtagctgggattacaggcatgtgcctggctaattttgtatttttagtagagatggggtttctgcatgttagtcaggccgatcttgaactcctgacctcaggtgatctgcccacctcagcctcccaaagtgctgggattacaggcgtgagccactgcgcccagccaggttttttttttttttttttggactgcattggcacgatcttggctcactgcaatctctgcctcccatactgaagtgattcttgtccctcagcctcccaagtagctgggactataggcacgcaccaccacacctggctaatttttgtattttcagtagagacagggttttgccacattggccaggctggtctcaaactcctgacctcaagcgatccactcacctcagcctcctaaactgctgggattacaggtgtgagccaccacacctgacccaaggacttagcattaaataaattaaaagcatgaccagcaatctaccctaccaataaaaactcttaaatgccttatgataattttaaacaggaaaatatgttcatgttctgtagaatgaacaaaaatgtatcttgaacttcaaaaaaaaaagttgtcaaggacaagtgcacataagcatctaataatttgattttgtaatcccagcactttgggaggccaaggcaggatcacttgatgtcaggagtttgagacgagtctggccaacatggcaaaatgccatctctacagtaaatacaaaaattagttgggcgtggtggcacacgcctgtaatcccagctacttacttgaacctgggaggcagaggttgcagtgagccgagatcacagctgtacactccagcaagggtgacagaacaagagtctgtctcaaaaaataaattaaaataaatttaaaaataataatagtttgatcttgttgaaactaaaatgcagtgtgcatttcttggctaagttagctgttgtatacaaggttgaatgaacaagaaatagttaaataacaattttgttagctagactttggaatagctatgttactaggataatctagatgattcacaaacatacagaaaactgatctttatgactgtgacactgtcctgtcgcaactctatccactgccttccttcctgagcacatcactccttctggactattttacagagccctttttagcaatacagagaattctgagcaatacagaacaaatataatgtaggataaacatgatatgagacttcttcaagtatgtgaaaagtttttatatcctctgagttttctctttactagttgtagaatctctagtgctttccatcttcatttacctgacatggcttgttcccttaccctccttagtcatatcttctaaatctctcgtattttgtctgtatgtttatttaaagaacaccacccagagctgaaaaattatgaaaactaacttttactgattacttatgtgttgagtcctgttctaagcacttcataggtattactttgatttaatcttcaacaactcctatgagataggttactgttacattatttcccattttgtagatgagaaaacagacacagataagtatcttgcccaagaactcaaagctaggaagtaaaggctagtaacagtcaggcagcctgtctccagagtcctactttaaaaagaaaaaaaaccagctttgttgagatagactttacatatacaaatcatatatttaaagcatttagtttggctgggcagtggctcattttgagaggccaaggtgggaggatcgcttgagctcaggagtttgagaccagcttgggcaacagagtgagaccctgtctctacaaaaaaaattttttttaaaaattagccaggcatggtggtgggcacctgtggtaccagctctttgggaggccaaagtaggatcacttcagcccaggagattgaggctgtagtgagctatgatcagaccactacagtccagcctgggcaatagaacagagaccctgtcagttttaataatttatgtttctggtctggtgcagtggtgcccgcctgtagcactttgggaggctaaggcaggtggatggcttaagctcaggagttccagactggcctgggcaacatggtgaaatcccgtctctaccaaaaatacaaaaattagctgggtgtggtgcacacgcctgtagtcccagcttctcaggaggctgagacaggagaatcacttgaatctgggaggtggaagctgcagtgagccgaaattgcgccactacactccagcctgggtgacagagtgagaccctatctcaatcagtcaatagaagattccctctaacaatttgaatctattttcccatacccaacaggcgggtccttaatatagttttatattcgatgagctgctaataccctatataccctatttaaaaatctgggtcaataatgtagtagaaagaaataacactttttgtgataagaatattttatagtaatttggttatttatgctaaacatctcctcacttataaattttttcttttttcttctttttacatttaatttttttttttctcctgagaatggtcactgagggaaaacaaagaaaaacaaagttatttttctaaatgcagtgtggtatcctgaattggtttctggaacagaaaaaggatgttggtgaaaaaactggtaaaatccaaataaagcctgtagtttagttaatagtattgcactagttttgacaaatataccaaagttactataagatattgatgttagggaaagccaggtgaagggcatgtgggaatatgtactatctttgcaacttgcctgtaaatctacaacttttccaaaatacaaagtttataataaaaattttaaaattttgaccctaacttaccattccaatatgtacttccctcatacagtggcagccactataattagtttgattatccttatgaaaccttttaaatatacttttaatgtattcatagaaaatatttaatattgttaaatgtatatatattttttctttttctaaatgtatgtattctaaaaattacatttgtagtatcattttcatggtattgtgccatgtgtcattctgtaattttttcactgtctttttttgagatctggccatgttgattgattgagataatcggattcagtgtttcatttctttttactattgaatagtattcaattttatatcattatttataaattctcccatttgggagcatttaaattgttcgtaaatttttactttgacaaataatgctgcagtgaacatcctgagcatgtttgtataaatttgcaagtttttttctaggacagatgcctaagatgtggaattgctggatcgtaaattatgtacatttaaagtttttaaagcagtaccaaatactctccgaataaattgaactgggaccatgcacagtggctcacacctgtaatagcagcactttgggaggccgaggtgggcagatcacctgaggtcaggagttcaagaccagcctggccaacatggcaaaaccccatctctactaaaaatagaaaaattagccaggtgtggcggcacgtgcctgtagtcccagctactcgggaggctgaggcatgagaataggttgaacctgggaggcgaaggctgcagtgagccgcgatcgtgtcagtatgctgcagcctaggtgacagagcaagacgctgtgttaaaaaatttttttaaaaaaaggaaagaaattgtactggtttatatatattagagttcctattttccaaatgcctccaactcagtacagaaccaaccatctagatttttgctaatctgatatatagaaatagccttggccgggtgcggtggcttacgcctgtaatcccagcactttgggaggccgaggtgggcggatcacgaggtcaggagatcaagaccaccctggctaacacggtgaaaccccgtctctacaaaaaatacaaaaaattagccgggcgtggtggcgggcgcctgtagtcccagctactcgggaggctgagacaggagaatggcgtgaacccgggaggtggagcttgcagtgagccgagatcgtgccactgcactccagcctgggcaacagagcgagactccatctcaaaaaaaagaaaaaaaaaaaaaaaagaaatagcctctcacttgttttagttggcattttatataagagcaaagttgagacacttttcatatgtttaaaaattatttctttccttttctgtaaactgtttatgcctttttcccatttttctattggattgtgggtcattgtgttactagtttataagaattttgtatatattaaaaatattggccctttggatgtttataatggctgtaattttttttagagtttatagtttgtcttttgatttgtttctgtattttttaacatatgggattttaaaatattttaaggatcaaatgtaactttgttaccttttaatgacttcttgagtttgtcatgctcagaaagaccttttctacactaaaatttatcattttagaattctctcatatttcatttttttggtttgaaccttcagtacatctggaatttattttgcagtaagggatgaagtaaaattgcaacctagctttcccacccccccccacccccccccccggaggactacttagttgtcctagtaacatttattgggtaatccatctttttaaacattgatttaaaatgctgccttcatcaaagctaaattcgtataagtatttgggattactttcaggctttctatctctacatctagcatatctctatatgtgctagtatcaaattattttggctgggcatggcagctcatacctgtaatcctagctctttgggaggctgaggcaggaagatcgcttgagcccaggagtttgggaccaacctggtaacatagcgagagcccgtctccacaaaaaatgcatgaattagcccagtgtggtggcacatgcctgcagtcccagctacttgggaggttcaggtgggaggatggcttgagcccaggaggtcaaggctgtagtgagcaatgtttgcaccactgcacttcagcctaagtgacagagagagagaccctgtctcaaaagaacaaacaaaaccaaaacacacacacacacacacacacaaaattggtttaacatgactttatactgtgttttaatgcctggtaagatattatcacatattctttttttgagatttttttccttttctttctttttttttgacatggagtctcactctgtcgcccaggctggagtgcagtggtgtgatctctgctcactgcaacctccgcctcccaggttcaagctagtcttctgcctcagcctcctgagtagctggcactacaggcacagccaccacgcccggctaatttttgtatttttagtagagatggggtttcactatattggcctggctgtctggagctcctgaccttgtgatccgcccatctcggtctcccaaagtgctgggattacaggcgtgagccactgcgcccagcataagattttttcctaaatatttttgtgcatttatttttccatgtagactttagaatcaacttgactaggaaaaaaaaatcctgttggcattttgactgggattggactaatattataatttatgggaaatgatatatataggtaacattgagactacctaagaactgattgtagttccacttagttcatagtatttcacagtagacttaatttttttccatatcagtcttgcatgtttcgtaagtatattcctacatatttaatttttttgtttatgtccatttttgtgctgttataaacaggatataaactcttatggcctgtccagttattatttacatatagtgatttttttgaatcatggtttttgtatatcaactttgtatttacccatttcattaaattttcttactgtttttaattgttacagttgattttcttgagttttcacctacaaggaaatggtagttttatcttctttctaaattttattcttcttacctgattggccaattccttcaaaacagtgttatgaaatagtggtggtagttgaaatctttgtcatactaggttagtggtggtagttgaaatatttgtcgttctcatcgtcttttaatattacgatactggtttttgggttggagtggggagaaatgttttattaggttaaaaaagtatccatctaagctgggcgctgtggctcacaccagtaatcccagcactttgggaggctgaggcaggcagattacctgaggtcaggagtttgagaccagcctggccaacatggtgaaaccccatctctactaaaaatacaaaaattagctgggtgtggtggcgtgcgcctgtagtcccagctacttgggaggttgagacaagagagtagcttgaacccgggaggcagaggttgcagtgagccgagattgtgccactgcattccagcctgggcaacagagcaagactgtcaaaaaaaaaaaaggcaataatcaaaaataatcggagtgtttaaaacagcaacaaaattccatgttgaatatcagtgaatcagtgaacctttttaagtacttaaacataatttaccttttgcaaatttattcagggttataaatgttcatttttacttaatggagccataaattaatctcttttttttattgtatagaaatttacagcaacaatgtcaacaccagataagaaagcttcacagaagattggttttcgattacgtaatctgctcaagcttcctaaagcacataaatggtgtatatacgagtggttctattcaaatatagataagtatgtatcatggcttatattatgaatattacttgaatcagaaatttaagtttttcaagtgttttaagctacaacattttctataggtctactttgatcttatttttctctaaattcatttttctgttccacattccagttggatctattctatttgtcatagttttcttccctgttatcctttttggggaagaaaactgtacatttttgtgaagaattgattacggtataatttctgtgttagaattcttaaagactatggagtagagataccttaaaacaccattatttgcagtgaatgagattcattttataattgagatgttaagtgctggtataatcatagagaaaccattactaatggtaaaaatggcttaagatttttaagagggtagtctttctagtttggatgtggtacttaagcacgctaggtatacacatatgcttaagtatgacgtagtatgagatttggctgaaatacaattattcaacaatggaatttactgaggaaaagttcttatttataatccttcctcatatgccagtcattgctgcttgctctgctggatatttatattttcttcccttctctgttttctataccaattgcctactctggagcttgtgaatctcatgaatgttcatatttgagcccaaggcatttatgtatcattgccaacactggttcctggtttcccagactcatgaatagaattgttttatttttgtccataggcttaagagagttttcagggtgtctcagtgtaatctgagttcttctgggatcccccaagctaatctaaccctctggagtcctccagtgtcccaagactggtttaattccaaagaggactccttggtgatggtattcctttgggacaaagatactttgtagctaacttggtttatcttcacctgatacaaggccagggccacgatagcctcccaaaggatatacctgtataagagattgaacaaaaatcagtgtctcttggaatcacaacacaaataatatttcctgagcaacttttacacgacattagatgtttcacaaatgccaaggatttagttttagcactttgaatttgtgccagtttatatatatatatggggtagaagtgaaagtttagcattttgtgattttatgtgttttaagaaagtaacacattgtatgtaaccattaaaatactatatctgttttacagaccactttttgaaggtgataatgacttctgtgtatgtctaaaggaatcttttcctaatttgaaaacaagaaagttaacaagagtagaatggggaaaaattcggcggcttatgggaaaaccacggaggtaaaaataatgtttttgtttttgtttaaaataaaatcaagccagtagcagtgcatgtacttataatcccagttacttggaaggctaagatggggtatttgcttaaggccaggggttcagggctgtagtatgctgtgattacacctgtgaatagtcactgcactctagcctgggcaacacagtgagaccattcctctaaaaaagaattaaaaaataaaatcaataaataatagttgttagtatcattagtacattgatttttttaatctttaaaatgactagtaccaaaacataacttttcagaataattgattatatgttaaatatatcctgttaaccaactttaatgtaggtgctgtttatacgtatgcatcttataattaaatgcacaatttcatttttgttaggatcacaggttttcaacgtaattttttagttttacattatctatgtccctctgtgttccaaaaaatatttaagaatgtcctaaaaagtatttaaggatgctgtaaagttctgtgtacatttttgttatcttttgtgaaatcctttataatctcaggagccttcccagaagtgcctattttattttatataaaagtagaaaacaaattaatctatctaatatgttacttcctgagaattgctcttcatgtgaaatgattttttcttttccagtgttatcctggtaacacattggaaaaccttatattacttttgagtgaaaattggaaatatgttagaagaataattagatcattagttctcacattatgtctatctgcctggtaaaaagtatgtgcaagactttttcattttaaatggtgggaaagttcaaggaaggtctgtaaatataaagtgatttggacaaatagaaatggaatttagatttaatgatttctttagatggtgatgaaatacagagagaacttttaattaaactgtcatcaagatgaccttgatgatgatgtttttaatatttcttataataacaaaattaaaatttgatatgttatttagtgtgtttcatactcataatttatggcctttggtaattacagtagccatttggtgactttttgctatcattttgcgtgtttgagcaaattgagttacactgtttctaattattgtccatcagagtgggatattggtcactatttactgttttgtcatagttctgtagtttgagtgtcataatatttctcgttaattgatcttctattctcttaccataacattatttaatcttatagtcctttaattcatcaaggttaattaatagttgaagtcttttttcaataaaatgtgtagtttttctttctttgaggaagtccaggtataatacaaattattgatacaataaaccttaaaatatcttaattttaaaaatcaattggtgaaactccatccacttggaagataaaaaggaagaaacaaaggaagataaactaccaggaaagaacctaagaggaaatatgcaagatacatatgaagaaacattaagacatacaggatcttggaaaagaagactcaacatcctaaattagtctataagttaaaatcagtcccaataaaaatattaacaggccttttttgttgttttgttgagacagagtcttgctctgtcacccaggctggagtgcagtggcgtgatctcggcttactgcagcctctgccttctgggttcaagtgattctcctgcctcagcctcctgagtagctgggattataggtgctcgccaccatgcccagctaatttttgtatttttagtagagacaaggttttgccatgttggccaggctggttttgaactcctgacctcaggtgatccacccacctcagcctcccaaagtgctaggattacaggtgtgagccactacacctggcctctttttttaattagatgagttaattctaaaattcacatataagaggggagaaatcaagcaggaaaattctgaaaaagcaaagtaatgaagagagattccactttaaagagcactttaaaatagattataaagtgatcataattaaagcagagtggtagtggtgcataaatagaaaaatgaatgaaaaagaaaagaaaatccagatacagtcacagatgtctctgggagtttagtataatagttgcaatggttgactctcaagtacatggtgaagaagagggtggattgtttgtttaatggaaaccgagactactgtttagtagtctatagaaaaaaacaagttgttctcatgccttacaactaggaaatatttgaaaaggattgaagatttaaatatttttttaaatgaaagaataaaaccacaagaggaaaacataagagagttttacttaatcttgaattggaaaaggcctttctctctctctctcttttttttttgagatgggagtcttgctctgtcacccaggctgacgtgtggttgcacaatctcggctcactgcaacctctgcctcctaagctcctacctcagcctcctgagtagagtagctgggactacaggcgcccgccaccatgcctggctaacttttgtatttttagtagagacggggtttcaccatgttggtcagactggtctcaaacatctgacctcaggcaatccgcctgccccggcctcccagagtgctgagattatgggtatgagctaccatgcctggcctggaaaagcaggcttcaaacctaggagccataaaagaaaacattaataaatttggctatacaaaaataagaacgttttacatggccaaaaacaaaagcctgtaaacagagttgaaagatagtacagaaatatccatcacatcttattacagagagctaattccctactatataaagaactcctatcaataagaaaatgtcaggtaacgcataataaaaatgattataagtagatgattcaggctgggtgtggtggctcacacctgtaatcccagcactttgggaggctcaggcaggaagatcacttgagctcaggaactcaagaccagcctgggcaccatggtgagaccccatctccaccaaaaaaaaaaaaaaaaaaaaaaaaaaattcaaaaattacccaggcatgctactcaggaggctgaggtgggagtatcgcttgagctctggatgttgaggctgcagtgagccatgctcacgccactgcactcaagcctgggcaacagaacaagaccctgcctcaaaaataagtaaataaaataaacttagccagttgggtgacacatgactgtgatcctagctactcacaagaccaaggtgggaggatcacttgaacccaggacttgagactgcagtgagctgtgattgcccccttgcactccagcgtgggcaacaaagggagaccctgtctgtttaaaagcaagaacaacaacaggtaattgataggaaaggaaaaagaaatggctcttgtaaacatgaaaaaaattccattttactcataatgggaaatgcaaaatcaaagtttgctgagatacagttttttttgttttttgttttttgttttttgagacagagtctcactctgttgcccaggctggggtgcagtggcacgatcttggctcactgcaacctctgcctcccaggttcaagtgattctcctgcctcaggctcctgagtagctgggattacaggcgcctgccaccacgcctggctaatttttgtatttttagtagagacggagtttcaccctgttggccaggctggtcttgaactcctgacctcaggtgatctgcccgcctcggcctcccaaagtgctgggatcacaggcgtgagccaccgcgcccggccgagatactgcttttaactatcagatgggcagagttcataaaggttttaatgtgttgggttagtaatggcatggttagtcactcatacatattactggtgagagactaattttatataatctctgtggaggacaatttggtaatatctataaaatttacaaatttccattgccttgatgtagcactttcaagaatgtacaacacagagctacttgcacacagatgaaattacatgtacaaaggtatttattgcagtattgtttgtagtagtaaaagattggcaacagcctaaaagtccataaatgggggaatgattatagtatggcactccatataatagaaaaccctgaaaccatttaacataaaacaaaaacagaagatggtttctatgtactaatatggaaatgattgctatgctgtgtcaagaaaagaaagcaaaatacacaacagtgcatactgtagctatttgagaaaaatagaggaacatatgcattttttgattgtatatgtctaaggtgtcaacaaaggatctgtaagaaaagtataatggctgggcgccggtggttaacactataatcccagcactttgggaggccagggcaggtgaatcatgaggtcaggagttcgagagcagcctggccaatatggtgaaaccccgtctctactaaaaacacaaaaattagctgggcgtggtggcacatacctgtagtcccagctactcagggggctgaggcaggagaattgcttgagcctgggtagtggaggttgcagtgagccgagatcacaccactgcactccagcctgggcaacagagcgagactccaaatcaaaaaaaaaaaaagaaaaagaaaaaaaaattgtcaactatagggaaatagtatgggtcctgggttcttatgtcaagaagactttttttggtatattttttaaattgatatataatagttgtacatattttgggagtacatgtgtacagtgtgtaatgatcaaatcagggtaattgggatatccattacctcaaacatttttctttgtgttgggaacattataatttttctcttctaattatgtggaaatagtcaataaaaaacaaagtaaaaacaaaaaatagtcaataaattattaactataattttcctaccgtactgtcaaatactagaacttattccttctatctcactatatttttgtaccccttagctaatctatctcactatatttttgtaccccttagctaacttatcttcatcctcccctcccttttcccttcccagcctctggtaaccaccattctattaataatttctacctccatgagatccacatttttagtttccatgtatgaatgagaacatcttatacttgtttttctgtgcctggcttattacacttagcataatgacttccaatatcatctatgttgctgcaaatgacaggatttcattatattttgtggctgaataagattccattgtgcatatataccatattttaaaattccattcatctgttgatggacgcttagggtgattccatatcttggctattgtaaatagtgctacaataaacatgggagtacagatatctctttgatatactgatttcctttttttgaatatacacctaaccatgggattgctggatttttagttttttgaggaacctccatactaatttccataatggttatataccaggaagatttctaaaagatgttgtttacaccagaagcaagtctggttttttttgtttatgtgtttgtttttgagatggagtctcgctctgttgccaggctggagtgcagtggtgtgatttcggctcactgcaatctctgtctcccaggttcaagcgactctcctgcctcagcctctcaagtagctgggattacaggcacacactgccacgcctagctaatttttgtgtttttggtagagatgggtttcaccatattggccaggatggtctcgatctcctgacctcatgatccgcccacctcggcctcccaaagtgctgggattacaggtgtgagccactgcgcccggccgcaagtctgtttttatagtactacttagcttactagtaactcattatcctttgctttatcttctcatattcttcccatatatactgcttgaatcaatattcaacaagttcagaaatcatacaaaaaaatcattattatcagctaagctctttctgtgtatttccagtccttattcatcattgcttacaacaattcactttatacagtgctggtctttatatccttttttctcattgtttttatttagtttttgagacaaatgacaatagagctcataatgtacctttgaaagtgaaagccataacatggcatgaaagtgatgtttaaatactttgcttcatcctgggatttgaaaacggaaggaagataggctctagaaataagagggaattcagcatttatacttttaaggcaaaaattatgattaaaagtttacatagtaggaagtctcatctttaactgctatattggtgtgtttactgggtcacagagaaaatatcatgttcttttgggtagaatattgaaatggaacttggtccctatgagatctagattccaggcacaatttcatcaaaggatggtgaaaaaattattttgctttgtaggaaggaataacctgcaaaatctttgagtcttggaaggtcctgttttttaaaaaatgaaaggtaatttactgtgaaaagaaacagttcctttttctttccttccttttttttttttttttttcagactgggtcttgctctgttgcccaggctggagtggtgcaatctcggctcactacaacttctgtctcccaggctcaaacaatcctcccgcctcagcctcccgactagctgggactacaggctcattccgccacacccagcttttttttttttttttttttgtatttttggcagaaatgaggtttcaccatgttgcccaggctggtctcaaactcctgagctcaggcagtccatccgcctcagcctcccaaagtgctgagattacaagtatgagccactttgcccagctcttttttttgggtgggtggggaacagtctccctctgttgtgcaggctggagtgcagtggtacaatcacagcttagctcattgcagcctcaacttcctgggctcaaatgatcctccggcctcagcctcccaagtagctggatgcacaccattatgcctagctaatttttttatttttagcagaaacaaagtctcactatgttgcccaggctggtctcagactcctgggctcaagcaattcttccacctcggactacaaagtgccaggattaaaacatgagccaccatgcttggccaaaaagaaacaatttttttttcccccaagacggagtctcgctctgttgcccaggctggagcgcagtggcacgatcttggctcactgcaagctcagcctcccgggttcacgccattctcctgcctcagcctcccaagtaccagggactacaggcacccgccgccatgccctgctaattttttgtggtttttttgtttgtttgtttgttttttggttttttttttttttttagtagagacggggtttcaccatgttagccaggatggtctggatttcctgacctcgatatctacccgcctcggcctcccaaagtgctgggattacaggcgtgagccaccgcgcccggcctttcttttttttttttgagacggagttttactctgtcacccaggctggagtgaagtggctcaatcttggcccactgcagcctctgccctctgggttcaagcgattcccctgcctcagcctcctgagtagctgggattataggcgcctgccaccacgcctgtctaatttttgcatttttagtacagacgggattttgccatgttggccaggttagtctcgaactcctgacctcaggtcatccacccgccgtggcctcccatactgctaggattacaggcatgagccaccacgcccggccagaaacaatctaagaacctatttttgaatacagtatacttaatgagaagaaaaaaaggagtggtgagatgaatagattttaaggtttttttgtttttgtttttgttttttttaagatggagtctcactcttgtcgcccaggctggagtgcagtggcgcaatctcagctcactgcaacctccgcctcccagattcaagcgattctcctgcctcagccccctgagtagctgggattacaggcgcctgccaccacgcctggctaatttttgtagttttagtagagacgtggtttggccatgttggccaggctggtctctaactcctgacctcaattgatctgtccgcctcagcctcccaaagtgctgggataacaggcgtgagccaccacgtccggctgattttaagtttttaatctcagcacttgagtccaggaggtggagcccagaatcgcttgagccggagatggaggttgcagtgagccaagattgtgccactgcactccagcctggatgacagagccagactctatctcaaaaaaagaaaaaaaaaagattttaagtttttatatggggtagttatcagtttgtatgttttttataatttattctagatgttcttctgcattttttgaggaagagagatcagcattaaaacagaaacggcagaaaataaggctcttacaacaaaggaaagttgcagatgtttcacaattcaaagatctcccagatgaaattcctttgcctctggttattggaacgaaagttacaggtaagtgaaaacaagctaattactcttttgacttgtaatttttaatcaaggtaatcttttttgtttctttggttcttattttatttcatttttaattaccaagaaatatttacaatagacatcgttaaccctcaccctatccctatccctcaactctctctgagcctggttgatgctcagggatggagtaggggttctgtagtacacatcacttgatattttttttccttagtgactttgatttttcactagaatgtgtttacacgtacacatgggacaaaattctgaaggtgtaaataacccagataatctctattcgagaaatggcttttaaatttagaaagcttaaactgtagctctgtgcaatttactatagaagttactctttcttcatgcatgaaatctattttttaaagtaattgggaaaaagtgtattggttcaaagtaacatctactacaatataaactaaagccaactgctacaaagatgaaatttaataatctattggagtaagtatagctatgtattattttaaagttttttttttttttttttttctttttgagactgagtctccctctgtcacctaggctggagtgcacctaggctggatcttggctcactgtggcctcgacctcccgggctcaagcaatcctcctgcctcagtttcccaaagtgcgggattacaggcatgaatcaccacacctggccgtaaattttttttatttttaattattctatattttccttctacattgtttgttttcctttcctaactagccttgtctggttagttcacaaataccattgttctcgtggactttgggtctagaaatagtccatttctaatgattgaataaaactaaattattcactagtctgctcaacattttataggggtgtaaattttgtccgttttatagatgtgattctgtgtactcatggagagaaagtgcaaaatctcaggtttaagttaatccttaattacttggtgaaggcaaattacaatatatgtaatacaagaaataaggagttaagtggatagaataggctagtaattgtactgagtaattgtacttcaaccattgaaaaatggttggagtaattcgagaatagtttttggagggaagggaacctggagttacatatttatatcatttttcctggctataaaagtggtacttgtttccattatattgtaaaaacgattaagatgaaaggtagaaaatagagaagagactgaatcatgcatatgaaatgcaaacacagtttatctaggagagactagatttggtaataaatgagtgtatattgacaactcactgtgtaatcaacagattatagatgatatgatctctgtcttaaaactagtctggaagtagaggtggaaatgggatgagatgggtagacagcatatttgaaaaatgtttagttgtaaaaactccatataaataactacagcaataaagtctagtataagtactaatgctgacatactgatttatgccagagaaatgctgacgtgaagagtgactctcagactcattaggaaatccttagaaattcattgttttagaattttaagaactggtgatattatttgacaagactgaaaatcttaggtagtgtttttatgtaagtactcttgttacagtggagaataggttagacaggctatagcaaaatgtgagaaaattactagagctgttttgtgtgttgtgttttttatttttgtttttgttttttgagacaaagtcttgctctgttgcccaggctggagtgcagtggtgtgatctcggctcactacaacctccacctccagggttcaagcaattctcctgcctcagcttcctgagtaactgggattaccggcacccgccaccacgcctggctaatttttgtaatttttttagtagagatgagattccaccaagttggccaggctggttggtctcaaactcccaacctcaagtgatcttctgtccacctcggcctcccaaagtgttgggattacaggcgtgagccgctgcacccagcctagagctattttttctttttttctttttttttttttttttttctgagacggagtcttgctctgttgccaggctggagtgcagtgcctcagtctcggctcactgcagcctctgcctcccaggttcaagcgattctcctgcatcagcctcccgagtagctgggactgcaggtgcacgccaccacacccgacatattttgtatttttagtagagacggggtttcaccatattggtcaggctggtctcgaactcctgacctcataatccacccgcctcggcctcccaaagtgctgggattacaggtgtgagccaccgcacccagcctagcctagagcttttttaaagcaatgttttacattttctctttgggctagtgcaggggtcagcaaacttacggcctataggccaaatctaggctgccacctatttatgcatagtttgtgagctaagaatactttttatatttgtaagtggttgaaaaaaatcaaaagaataatgatatgttgtgacttatggaaattatatcaagttcacagggcctccttaaggagtaaacatgctctaaataagttcataactgaaacagaccagcccctacaaaatataaaagcaagtgtgatgggatcgaaaagatctgccagtaattttttttgtctacaagaaaaaaattcaacaccctgtgtagcatacaataaaaaaattgctgtacttgtggggaaaaaaagactattccataagtcaataaaaaagccatcaatagagatagactctgagatgactcagatgttgggattagcagacagtgacttcaaaatagctatcataagacatgttcgtgaacttaaatgtaaatataaatataatgaacagagaaaatctgagtgaataaatggacattttttcagataaagaaaatgaatttagaactgaaaagtataatatttgaaaagaaaaacttctgaatgaacttaaaagcaaattggaaacactaaaagactgggtcggtgaacttgagaatgttatcagtagaaattatccaagtatgaaaacaggtaggaaaaaaatgaaaaaaaaaaatagaccctcagatccctctgagacaatattaagcaagataacatatgtgtaattgtagtccccgtaaaaacaggagagaggggacattattttatgtgccgatgcacataaaaaatattagatgaaacaaaagctgaaatttttccaaaaatatagatctaagatactctgaaccccaagcaggatacccacatatacacaaaacccatcattagacacaatacagaaaatcttcagagaaactcttaaaagcagtcacagaaaaacagcatattatgtaagaggagcactgatatggatggcagccaacttcatatcagaaaaaatgctagaagtaatgccaaaaaagttcttcagactgaaaggaacttttttacattacatgatatcttatgtaaactggaatctacggaaaggaccatagagcaccagaaatgaataaatgaataaaatgaaattattgtgttgccaagttcttaaattttatgtaagaacacacagtattaatttagtagaaagtaatgttaaggccaggcgtagtgggtcatgcctgtaatcccagcattttgggaggccaaggcaagtggatcacttgaggccaggagttgcagcctgaccaacatggtgaaaccctgtctctactaaaaatacaaaaattagctgggaatagtgatgtacgcctgtaatcctagctacttgggaggctgaggcatgagaatcacttgaacccaggaggcggaggttgcagtgagccgagattgcgccactgcactccagcctgggtgacagagtgagactccgtctcaaagaaaaaaaaaaaaaaaaagtaatgttgagagggagcattgtagttcctagcccattgtggctcaaaaactttagtatgcatcagaatcacctggagggcttgataaaacatattgctgggctctacctctgagtttctgattcagaaggtctgggatagggcctgggaatttgcatgtctgacaagtttcaaagtaatgctgctggtttgggaactgcctttttaaaaaaaagaagaagaagaaaacaaatgcaaagaggtatagttaaaaagtcaaaagagaatttgattttttaaatattgaatttggccaggtacagtggctcatgcctatcatcccagcactttgggaggctgaggcaagccactcacctgagcccaggagtttgagaccagcctggcaacatggtgaaacactgtttctacaaaaaatacaaaaattggtcaggtgtgttgtgctcctgtagttccagttccttggaaggctgagatgggaggattaccttagtctcaactgcagtgagcagtgattataccacagcactccagcctggacagagtgagaccttgtctcaaaaaaaaaaaaaaaaaaaaaattacctaattaaaaaaaaaagatggcaggaaagaagggacagggaacaacaaaaaacccaaatgggataaatagaaaatagcaaggtggtagacttaagtctggccatcctattgttgtattaaatgccaatgaactataaacacttctgccaagcacactggctcacacctctaatcccagcactttgggggaggccaaggcacgaggatcacttaagcacaggagtttgagactagcctgggctacatagtgtgttggggtgatcagacccaacaccaggtcgtgggggtgatgatgtccagctgaatcaaaggattgagaaaaagacagtttgagaaagaaagtgggaccagggacccatcgcgattgtggaggctgtgaaggccccaagctctgggaccctacactgtttattggtaatccaacaaagaaacaggtggtgagaatgtgggggtcaaaaaggcaggcacatgatctacagctgtgacggcttagcctttatatagaacatgttctgctacttgagataatgggaatacaatcaatctaggagcctaggagggctagaagcaaggagccagcaagtctagacacattccaggggacattatgtcagacatgcaagccctgcctcagcttttttcctaacactcagctttttcccaccatagtgagaccctgtctctacaaacattaaaaaaaaaaaaaaaaaaaaggtcaagcatggtagtgggcacctgtagtcccagctactcaggacgctgagacgatcgcttgagcacaggagttcaaggctacagtgagctatgatcatgccactgcactccagtttgggtgacacagctagactctgtctcaaaaaaaaaaaaaaaagccacttcaattaaaaagtaatgattggctgggcatggtggctcatgcctgtaatcccagcactttggcaggccgaggcaggcagatcacttgaggtcaggagttcaagaccagcctggccaacatggtgaaaccccgtctccactaaaaacacaaaactagccaggcatggtggcacgtgcctgtaatcccagctactcaggaggctgaggcaggagaatcacttgaacctgggaggtagaagttgcagcgagccaagatctcacccactgtactctgcactctagtctgtgcaacagtgagactctgtctcaaaaaaaaaaaaaaaaagttaagataatgagaacggattaaaaaaaagtaagactcatctatatgctgtcttcaagagttatacttaaatataaaatcatagacaggttgaaagcaaaaagatgaaaaagatatgcagtgcaaatagtaactgtaagaaagctaaagtggctattttaacatcagagaaaaacaggcatcaagacagtattgtcagaagtatttcataatgataaaaatggccagttcagaaagatataccaatcctaatattatgtatgtatattactatatacctaacaataaagcttcaaaatacttgaaagcaacagttgagataactaaagaaagaaatagacaaatccacaatcatagttgtagattttaacacctcacttccagtaattaataggtagaagaagccaaaaaatgttaatacacatatagaggatctcaacaacactatcagtcatcttgatctaaataatatgtttagaacaatacactcaactgcagaatacatattatttacataggcaaatggcttgtttatcgacatataccatatactggcccattaaaaatgtcaatacattttgaaagattgaaatcatatagagaatttctctgaccacaatagaatttaattaaacatattccttctttagaaaatattttagtaaacaaagagtagtagatttttcctcaaaaacaagagccaaaagaattaaaaagtcactctattagggattttgctgtaggaacaaagaatctggcaggtaaaaagtgactggactttgtgattgtcagatacagagttagaagcacaagagttttgacagatgcactgcgtattcaaagtaatggaaaatttgaatagtagagaagtttggaaaaatgtctagacatgatactttagctacagtatatagaaagttgtttgagacgtcatacttaagccacagttgtttacccctggagaaatgagagtgttaaaaaagatattaaaatcattgatttgttaagaaattataagaatctgaactatcctaaaagtaatctttgtaaaatgaacgataattccaggttatctgggattttctgtaggttatctaaaggagtaaatggaaaagaaataaaaaagattttatttatcaaataaatttttcaaaaaacagaaatgaagagaataggaaaaaagtacatacatacacaaaccttttttttttttttttttttttttttgagacagagtcttgctctgtcttccaggctggagtgcagtggtactatcctggctcactgcagtctctacctctctacctcttgggctcaagcaatcctcccacctcagcctccagggactacaggcacatgccaccatgcctggctaatttttttgtatgtttttgtagagatggggtttcaccatgttgcacagactggtcttgaactcctgagctccagcgatccaccctcttgggcctcccaaagtgagccaccacgcccagcctactttaattctttgaacatatttataacagctgcttttttaagtctttgctaaatatctctctcaatttcttactgtacttttcttaagagccatgctttcctacttctttacatgtctagtaatttttggtggaaaacttgatatttcagataatatattgtagcaactatgtattctaattttttggagagttgttggatttgctttaataacttggctatgcaaatactgatgtctctgcttcattttttattcttatatttattattattattaaacttgatttccaaagagttacccctgtgtctgcatataatttagtggtcagggctgggtgcggtggctcacgcctgtaatcccaacactttgggagtctgaggcgggcggatcacctgatgtcaggagtttgtgaccagcctggccagcatgtgacaccctgtctctactaaaaatacaaaaaaaaattagccgggtgtggtggcgggcacttgtaatcccagctactcaggaggctgaggcaggagaatcacttgaacccgggaggtggaggttgcagtgagcgagatcgtgccactgcattccatcctgggcaacggagcgagactcccatctcaaaataataataataatttagtggtcacctaatgatttgaacagaggttatgctcaaacatcttgatcgggaaaagcctcacattgatttatatgtgagttggggaatgtaaatacaaagttgctgctagttttcaagtcatccttagcttttactttttgccagactattggatcttccccctccatttgcatagtaacccagttagccagggatggtagagagcttatttccgcccttttatggctctctagtttccatgatctccctgttaaatttctggctgtctttcatgaccagtcaaaattctggctggttttcgtgaccaaccctgaactaataaaaccattctcatcgaccacgttggtggtagtagtgggtgtgtgaataacctcgtgcaaagaggccactgagtccccctgccctaacctgaagctctagcacttcttcaacaataaacgtttcttgttttctacatttgatccatttccagtaccctggaatggttgtttttcacaatctcattcaggtttgtacttgttttttgtggagaggaattaccagcctcttcatgccaccataactagtagtccttttctatgcttatatttgtttactcagcttcattatttacatcttctgtatccatgtttacttttcccttaaaggatctgtcagaaactgagagagattttagtcctctacagttgtgtttttatcaattgatccttttattttaaacagtcttgcattgtgtatttctgtgttctattaaaatgttgtgtattatactttttggttagtataaaatgtattactttgcccagtttacagccatcaatgctgttgttcttaaattttttactcatgctggatgtttgtttggatttctctgatgttattttaggctggacttaaataatagtgacacagttcatctgtgtcatcagttccaagactactagttttggtgattcactagaaagactcagaatactcagcacatgtactcatgggtaagatttgttacagtgaaggacacaaaacaaaattggcaaaagaataaggtgcttggggcaaagtccagaggaaaccacgtgcaagttttcaaaagtcctctcccaatagagtcatgcaagacttttaattctcccagaaacaagttgtcacaatgcttataagtgttgtctaccagggaagctcattagagactcagtgaccagagttctactgggggctgagtatgtaggcatcttttgcctagtacatactaaaattccagtcttccagagggaaagcaggtgtccagcattaaccacatcgtttgcacaatctagacacagtaaaaccaccattattaattagggaacagtgggaacacttccgaaatccaagttcccagataccagacaaaggccaaccttgcaaggaggttttcctaagtatagcagcatcaggcctgcagtattaacttctttaattattttctacacaacatctttgtctttttttttaaattgaactactcctggtgcttcactcatgagtataatgaccaaagttcttttgttgttttttttgcagttaaatgatttaaaatatttttctcttaatttgggagtaatataattttattcaaatatgaaattagggatcatcatttatagtttttgtttttgtttcaaaaattctttgttgtttctctaagccaaaaataaagtgtgtgcttgttttgaaactctaatagacaaaatactgtactatgatttaaattacatgcttggaacagttttatatttgactattctttgtatctcccacacatcataatgcctttgttcttttctcagcacgattacgtggtgttcatgatggtttgttcactggacaaatagatgctgtggatactcttaatgctacttatagagtaacttttgataggacagggcttggaacccataccatccctgactatgaagttctcgtaagtagtatttcataatacatttgtgttttatgcctgttaaatgtgttatatagagtttttttagaaatcgtattttatgatagaatcaagactttatctcacagaggaagagatccttaggggaccccagccctatctgctagacccctggttcggatctatacttaagtcttccatttgccaggaactagcatttctctgttggaccttaacgacacagcactttagtataaccaaactgatgagtcctgactaaataaccttggagaagaagctacataacattttcattgcagctgttaggttaaagtatagtcctcttgcaaaattgtttttaaagtatagtaacatcttgtacttatttgttctcctgttttatcttcagaggcatgcaaggtgggtgttaattaccttcacttttgcatgatgaaactcagacataagtacaattgcgtaatttattcaaggctctagatctggtttcctattaggctgagactagaattgagatctttttttttttttttttttgagacggagtcttgctctgtcgcccaggctggagtgcagtggtgtgatctcggctcactgcaacctctgcctagaatatacatacatacatacatacatacatatatacataatatatatacacacacatatatatgtatgtctttgtaaatatatttcctaaaagaaatatatatatatatatatatatatctccttagtgcagaaatacaatattgcttgatatctctccgcaataggagagaaagaaaattagaactaaatgtagaacagagtacactgctcttaagtttttacattaaaggatgaaagctttaaactctcctttcaaaaaaagtaaattggccaggcgcggttgctcacacctataatcccagcactttgggaggctgagatgggcggatcacctgatgtcaggagttcaagaccagcctggccaacatggtgaaaccccatctctactaaaaatacaaaaattagctgggtggggtagcacatgtctgtaatcccagctacttgggaggctgaggcaggagaattgcttgaacccaggaggtggaggctgcagtgatccgagatcgcgccattgcactccagtttggtcaacaagagtaaaactcggtctcaaaaaaaaaaaaaagtaaattgcttctctgtttcattaatttaactgtttttatgagatcacccaaatatttctccctggctaaataagagttgatttttaattgtagggtatattcagacagtctaaatgcagataaccaaatgtggccatagaaaactttaatattaatctttgattctctgaactattttgaccccccccctttttttttatttctttttttcttctggaggttcatccttttggcagcaaagtagtgttttcatactctgtttcaagttctagcctttgatctgtatagactaatatgctactctataaataattaaatatataagtaataaattctatatgaatcatagaatatgcgtgaatatatatctcaagctgaaatacaatgattataaagcttaaatgattggtaaatttctttaagttttgtgaattattctgttttctcagagtaatgaacctcatgagacaatgccaattgctgcctttggacaaaaacagcggccttctcgattttttatgaccccaccacggttacattatactcctcctctccagtcaccaattatagtaagtatattttagaaatatcaataatttaattgatttttatgaaggtgaactatgttcttaagaaatacacatctattacagcaacttcaaagtatgcacactattttgaattgaaaatattaaataaaataaatagttgcttcatctccagaaataatttcctttttattggattttaatataatattaattataacagaattttctctttttctaaaaataagatacttcctggccgggcgcagtggctcacgcctgtaatcccagcactttgggaggctgaggcaggcggatcacgaggtcaggagttcgagaccaacctgatcaacatggtgaaacgccgtctctgctaaaaatacaaaaattagctgggcgtggtggcgcgcgcctgtaatcccagctgctcgggaggctgaggcaggagaatcgcttgaacccaggagtcagagattgcagtgagccgagatcacaagtggcaacagagcgagactccgtctaaaaaaaaataaaaataaaaaaataagatacttcctctgaatagtcaatgattaaataattcctttttattcccataggataatgatcctttattaggacagtcgccgtggagaagtaaaatttctggctctgacactgaaacattaggtggttttccagtagaatttcttatccaagtggtaagaattgttctgaatatcttggctgtttgtttaaaaactcaatgccttttatgttattaaagttgaaaatttttctagggccgtgtaggtttatcaccgtgtaggttttaagagctgctatttccaacaaagcctgaaaataaaagttataaaaaccaaaaaagacttaaagatctttcttcttgagctttgtcttgtgtctgagttcttattattctgctattttaagggctcaaacattcttgcatatgttctgtgaaattctgaatgtttggctgttaataacttgggtaactatgaaggcttttatttagtaacctcagcatattctgccatcatcagtcagttcaacagttatgatgtcctggctagcttatatggttagaagaaattttatttcttttcagagactagaaacaggtattcacctgctaagtacttagtgattagacactaagaaatctaagcctaaactgaactaagtgtagaagtattatattggaaaatttccttatagctggactcttaaaaatgtagtgagtttgaaaattagattaaataaattttttagtttgaatcatagtctaataatgtttcatttcctttttggaaaatgaaaactactttggcttgggatagaaatgatctttattttcatttgtttatttatttattcattttgagactgagtcttgctctgttgcccaggctggagtgcagtgggtcagtctgggctcactgcaacctctacctcctggattcaagcttttctcctgcttcagcctcctgagtagctgggattacaggcatgcaccactatgcccggctaattttttttgtaattttaatagagatggggtttcactgtgctggccaggctggtctccagttcctaacttcaagtgatccccccaccttggcctcccaaagtgctgggattagaggtgtgagctactgcacctggctgatatgatctttataaataaaaatgtttataacataatccatgaaaatattcacagtgttcttttgcagttgatgttattttgaggaaaggtcttgtcagttgtgtgtctgtatatagcattctgtgttcctcaatcacatttttttatttaatatttatttatttatttgtttatttattttatttgagacagagtctcactctgtctcccaggctggagtgcagtggcacgatctcagctcactgtagcctctacctcccgggttccagtggaatcacctcagcctcccaagttgctgggattacaggcgcacgccaccacacccagctaattttttgtatttttagtagagacggggtttcaccatgttggccaggctggtctcaaactcctgacctcacatgatcgccctcggcctcccaaagtgctggaattgcaggcatgagcgactgcacctggcctatttatttatttatttgtttgtttgagacaaagtcttgctctgttgtccaggctggagtacaggggtgccattatggctcactgcagccttaacctccagtctcaggcagtcctcccacctcagcctcccaagtagctgagactgcaggcatgtaccaccactcccagctaatatattttttattggttttgtagagatggagtctcactatgttacctaggctggtcttgaactcctgggctcaaatgttcctcccaccttggctttccaaagtgctaagattacaggcttgagtcaccatgcccagccaatgatatattgttagttatccttgcaatataaaatttcttatacctttggcttctcaaggcagatggatattttatatgaaagattgaaaatgtgataagagcaaagacttattcttttcacaaagaagacacttgtttttaattttttcttttaaatagtagaagtaaaaacaaagctaatatgttatatttgaacaggtgttgtgtgtgtgagagagtttgagagagatcaataagcaaagggagccagaagctaagtactactacactatgtctaaatatcactatgtgatatttttatcgatccttgttatatttgatttttaattcaatacactttatttttttagaccaattttaggttcatagcaaaattgagaagaagatacagatatttcccatatacttcctgaccccacacatgtgtagtctccccctattatctcccagcagatggtacatttgttacagtcagtgaactttcattaacacatcatttcacctaaagaccatagttcacattaatgtatttaaagatgtggaacattttaagagttttgacaaatgtataatatcatgtatccaccattatgtatcatatagagtagttttgctgccctaaaaatcttctgtgtttcacctttttatctcttcccctgagcccctggaaatcactgatctttttactgtttccatagttttatcttttgcagactgtcatatatttgaagtcatacagtatatagcctttttatattggtttctttcacttactagtatacatttaagtttctttcatgtctattcgtggcttgatagctcatttctttttagcattgagtaatattacattgtcgggatgtaccacagtttatttactcattgacaaactgaaagacatcttggttgctttcaaattttggcaattatgaataaaggtgccataaacatctgtgtgcaggtttttgtgtggccgtaagttttcagctcctttgggtaaataccaaggagtgtaattgctggttcatatggtaagagtatgcttagttatataagaaactgacaagctgtgttctaaagtggctgtaccattttgcattcccagcagcagtgaatgggatttcctgttgctccacatcctcgttagcatttggtgttgtcagtgttctggattttggccattctaataggtttgttgtggtatcttattatttaaatttgcatttccctgatgacatatacatttcctcattgaccatcttttcatatgcttatctgccatctgtatatcttctttggtgaggtgtctgttaaggtctttggctcattttttaatccaattgtttgttttcttattgttgggttttaagagttctttgtatattttggaaagcagttccttatcggatgtatattttacaaatattttctcccagtctgtggcttgtcttttcattctctttacaatgtctttaaccaaacagaagtttttaattttaatgaagttcagctcatcatttcattcttacatggatcatgcccttgatgtcatatctaaagttggttgtcacaaaaccaaagtcatctagattttttttcctgtgttactttctaggagttttatagttttggattttacatctatgtttgtgattccctttgtgaaaggtgtaaggtttttgtctagattcatttttttgttgtttgtttgtggatgtccagttgttgcagcaccatttgttgaagacttgacttttctccactgttgcccatttgttgcgcaactgcctttgcccatttgttgaagataattgactatgtggatttatttctgggctctctattctgttccattgatctattttattttattctttgccactaccacactgtcttgattactgtaggtttatagtatgttttgaagttgaatagtgtcagtccttcaactttgttcttctacttcaatattgtgttggctatagtaggtcttttgcctttcaatatagactttagaatcattttgtcaatatccataaaacaactcgctgggattttgacttgtattgaattgaatttatagatcaagttgagaagaactggtatcttgacagtgttgtgtcttcttatccatgaacatgaaatatctcttatttatttagttctttgatttctttcatcagagttttgctcacataggtcttgtacatatttgttggatttatacttaagtatttcattttggggggtgttaaggtaaatgatactgtgtttttaatttcacatcataattgtttattgtttgacaaagcaattgacttttgtatgttaactttgtatcctgcaactttgctgtagtcacttattagttccagggattttttttttttctcatttctttcagattgtctacgtagacagtcatgtcacccgcctaaaacagatagttgtttttttccttcccaattctacctttaatttctctttcttatcttattgcattagctaggacttccagtatgatgttgaaaagagtgataagagaggacattgttgccttcttcctgatcttagtgggaaaacttctagtttctcaccattaagtatgatattagacatgaggtttttttgtagattttttttttttttatcaggttgaggacgttgtctattcctagcttactgagagtttttatcatgaatgagtgttgaattttgtcaaatactttgcctctatcaatctgatcatatttttcttctttagcctactgatgtgatggattatattaattaattttcaaacattgaatcagccttgcatacttcaggtaaatctcacttggggccgggtgcggtggctcacgcctgtaatcccagcactttgggaggccgaggcaggcagatcacgaggtcaggagatcgagaccatcctggctaacatggtgaaaccccgtctctactaaaaatacaaaaaaattagccaggcgtggtggccagtgcctgtagtcccagttactcgggaggctgagacaggagactggcgtgaacctgggaggcggagcttgcagtgagccgagttcgtgccactgcactccggcctgggtgacagagcaagacactgtctcaaaaaaaaaaaaaaaaaaaaaaaaaaaaaaaaaactcatttggccgtgatcttaaattcttttatacatcattggattcaatttgctaatattttattgaggatttttgcatctgtgtttatgaaagatactgatctatagtttttttcttttcatgtttggacaggggatctatgttgcccaggctaggcgcagactcctgggttcaagtgatcctcccacttcagcctcccagtagctaggactatgagtacattccattgtgcctggcttatagttttctttcactgtgtctttgtcagattttggtattaaggtaatgctaaccttggagaagagttaggaagtatttcctctgcttctatcctctaaaacataacagaggttgggtataatttcttcctcaaatgtttagtagaattccttagtgaacccatctgggcctggtgctatctgttttggaaggttaattattgactcaatttatttagtagatataagcctattcagagccttccatttttttcttgtgcaaatttagaaatttcaaggagtttatctttttaaagtccataggatctgtagtgatgcccctttttcatttctgaaattaataatttgtgtcctctctcttttttcttagcctagctagaggcttatcagtatcattgatctttttaaacaaccagcttttggttttgttgatttttttctattttctgttttcaattttattgatttctgctctagtttatattattctgattactttgtatttaatttcctattttttttttttagtttcctaaggtggaagcttaaattactgattttaagtcttctttactaatatatgcattcgatactacaagtttcccactaagcactgctttggctgcatcacacaaattttgacaagttgtctttttatttttatctagttcagaatattttttcatttcttcttttagattgcttttttgactcgtattatttagacatatcttcggattttacagctttctttgttattgatttctagtagaagttcattgtggtgtaagagcatacattgtatgatttctattgttttaattttgttaaggtatgttttgtggcccagaatgagctcttcatgaattttccgcacgaccttgagtagaaagtatattctatggttgttggatgaagtagtctatagataccaattatatccagttaattgatggtattgttgagtttatgtccttgctgattttctgcccattgaatctgttcatttctgatagaggggtatcaaaatctccaactataatggtggattgatctatttgtcaatagttaatcattttgcctcatgttttgatgttctgttattaggcatataaatattaagtattgttggccgggtgtggtggctcacccctgtaatcccagccctttgggaagcttaggcgggcagatcacttgaggtcaggaattcgagaccagcctggccaatgtggtgaaaccccgtctctactaaaaatacaaaattagctaggtgtggtggcagacacctgtaatcccagctacttgggaggctgagacaggagaattgcttgaacccaggaggcgtgagctgacattgcaacactgccctctggcctgggtgacagagcaagactctgtctcaaaaaaaaaaaaaaaattattatgtcttcttggaacattgacccctttctcattatgtaatgccttttttttttttttttttttttttttttttgttgagacagagtcttgctctgtcacccttggctggagtgcagtggcgtgatctcggctcactgcaagctccacatcccaggttcatgccattctcctgcctcagtctcctgagtagctgggactacaggtgcccgccaccatgcccggctaatttttttgtatttttagtagagacggggtttcaccgtgttagccaggacagtctcgatctcctgaccttgtgatccgctcgcatcagcctcccaaagtgctgggattacaggtgtgagccaccacacccagccataatgcccctttttattcctgacaccttttcttgctctggagtcagctttgtctgaaattgatataactgctcctgctttcttttgattagtgttagcatggcatattctttatccatttactttttttttttttttttgagacaaagtcttgctctgtcacccaggcagcctctgcctcctgggttcaaatgattctcatgcctcagcctcccaagtagctaggattacatgcgtcctccaccacatctggctaatattagtatttttagtagagacaggttttcaccatgttggccaggctggtctggaactcctgaccacaagaaatctgcctgcctcagcctcccaaagtgctggaattacaagtgtcagccactgagactagccctgttttgtttgtttgtttgtttgtttgtttgtttgtttgtttttgagaacagggtctccctctgtagcctaggctggagtgcggtggctcactacagcctcaacctcctggacttaagcaatcctcccacctcagcctcccaagtagctgggactacaggcacaagacaccacacctgctaatttttgtattttttgtatagacatggggtgtcagtgtaccccaggctggtcttgaactccttggctcaagcgatgggacccacctcggcctcccaaagtactgggattataggcatgagccaccacacctggccttcatccatttacttttaatctatctgtgtctttatgtttaaagtagatttcaaagtggttgttgatgtagttggattatcatatagtaataaatatctaccgtgtttattactatgttctatttgttgctcatattctttatttctatttttatattccactctttttttgtgttttatggtttactttatataattccatttttctctgctttcttagcatataggttatacttttttttcttttagctttctttaatggttgccctagagtttacattatatacttttacaactaatccatatccactttcaaataacactgtacagcttcatgggtagtgctagtacctgataataacaaaataatcctaattcatccctcctttcctttgtatcattgctctcattattttatttatacctaagcatgcataagcatatatacacataatcatatataatcaaatatgctgttgctgttattattttgaacaaactgttatctgttggaacaattaggaataaggaaaataaaagtttgtattttaccttcaacgtattctttctttgatacatttcctttatttatatctgagtttctgacatataaaattttctttttctttaaagaacatcatttaacatttctggccaggtgtggtggctcacgcctgtgatcctagcactttgggaggctgaggtgggtagatcacttgaggtcaggagttcgagaccagcctggccaacatggtgaaaccccgtctctactaaaaatacaaaaattagccgggcctggtggcatttatagtcccagctacttgggaggctgaggcacgagaatcgcttggacctgggaggtggaggctgcagggagccaaaatcgctccattgcactccagcctgggcaacagagcaagattccgtctcagaaaaaaagaaaaaaatcatttcttacaaggcagtcctactggcgacagattttctcaagtttttttctctgagaaagtatttttctttcacttaaaaaaaattttattttattggccgggtgcggtggctcatgcctgtaatcccagcactttgggaggccaggtgggcagatcacgaggtcaggagatccagaccatcctgactaacatggtgaaaccctgtctctactaaaaatacaaaaaattagctgggcatggtggtgggcgcctgtagtcccagctactcgggaggctgaggcaggagactgttgtgaacccaggaggcggagcttgcagtgagccaagatcgcaccactgcactccagcctgggtgacagagcgagactctgtctcaaaaaaatatatatatatatatatttattttatttattattgtagagataaggtctggcggtgtttctcaggctgctgcacaactcctgggcttaagcagtcctccctcttggccttccaaagtgctgagattacaggcgtgagctatgatgcccagtcctgttttacttttgaatgataatttcatagggtgcagaggtttagattgccagattttttttctcaacgcaagatatttcactccagtctcctcttgcttgcctggtttctaagaagaagtcagatgaagttcttatctttgctcctctatcggtaaagtgttttctttcaggatttttttttccttttttttagtatgtagagatggggttttgccatgttgtccaggctggtctcgagctgctaggctcaagcagtctgcccgccttagcctcccaaagtgctgggattagaggtgtgagccaccatagctggaccagaatttttctttatcttggattttctgtagtttgaatatgatatgtgtaaatctagaggtttttgtggtgtttcttctgcttggtattctctgagattcttagatctttgctttggtatttgacattaaattggggaaattctcattcattatatttcagatagttcttcctttttttctctctttcctctccttgtatttccattaatgcataagttataccttttgtagttgtcccacaatccttggacattctgtgctgattttttcagtctttgttctctttgttttttagttttggaagttcctattaatatatcctcttctgagataactgttgtggaagaaaaaaaagaaaaataaataatatatcctcaagctcgagaaattttcatctctttgcttgcattgcccatctgttcttgcatgctattttatccattagaggccttagcttattactcatagttctttcaaatttcaacatccctgccatatctaaggctggtttttatgcttgctttgtctcttcaaactatgtttttttttgcctcctggcgtaccttgtaattttttcttaattgccaaacatgatgtactatgtaaaaggaactgtgtcagcctgagcctctggactatgaacttcacaaatgcacctcagtttttcctcctcttatgtggtacggggtggctagagtgggctggggttgggtttttctcttcccccaggtcagtaagcctctgataaaaccctagcatgttagcttctggttaaatagtttttcctgagggcaggccttgctaagaacagaatgctccatcttaattcaaaatcgttagttttccttccccttgcaggaagcaagagggagtatttctgcagtattcactaagaaccagattaagcccctggaagtaaaactcacaaagtatgcttttcaaaaaagcctcctaactgggtcccgtagagtaaatgcttaatgcacctaccacatatattacagttcagttttccctacccaagcactggttcctagaggtttttgctcatgggtttctgctccagtaaattgtgattctacatacttgcctttcattctttccaattttgtgaacagtttgccttggccctcaattttcttagagatctaagaagtgtcgttgacttttttttttttttttttttttgagacagagtctcgctctgtcgcccaggcaagagtgtagtggcacgatctcagctcactgcaagctccgccttccgggttcacgccattcttctgcctcagcctcccgagtagctgggactacagtcaccctccactacgcccggctaattttttgtatttttagtagagatggggtttcaccgtgttagccaggatggtctcgatctcctgacctcgtgatccgcccgtctcgtcctcccaaagtgctgggattacaggcgtgagccaccgcgcctggccaagtgtcattgatttttttaagtatgtcagctttttacctggtgttaggatggagtagcaccttcccagcttcttatatcccagactgtaaactgaaagtctatgtatttgattttagtacttaatttaaaatttataatctatatgtaaagcctagttaaaatactacttccactattattttaagatacttaagaggtaaaaataaaagttattttatgtccctaccttttatagtatgtgaggttttataaaactctcagttttgctcttaagtgaagttgatattttgatttttttgctgttccaaatgtattttttcttatgacaaaataaacattaaaaatgttttgccgccaggcacagtggttcacacctacaatcccagcactttaggtggccaagctgggaggattggaagtctaggagttcaagacaagcctgggcaacatagacaaggattgagtctaggagttgaagacaagcctgggcaacatagtgagaccccatctgtacaaaaaaatacaaaaattagccaggtgtggtgatacgcccctgtagtccctactactcaggagtctgaggtgggaagatcacttgagcccaggaggttgaggctgcagtgagccatgatcacgctactgcactcagcctgggtagctataagctaccacacccggccttattatttctttctttcttttttttcttttttgaaacagaatcttactctgttgcccaggctggagtgcagtggtgtgatcttagctcattgcagactctgcttcctgggttcatgtgattctcctgcctcagccttctgagtagccaggattacaggtgcctgccatcatgccggctaaattttgtatttttagtagagatggggttttaccatgttggccaggttggtctcaaactcctgacctcaggtgatccacccaccttggcctcccaaagtgctgggattacaggcgtgagccaccgtacccggccctttttatttatttctaagagataaccctttttttggccaggcatgatggcttatgcctgtatgtaatcccagcactttgggaggctgaggctaatggatcacctgaggtcaggaagttcaagaccagcctggccaacatggtaaaacctcatctctactaaaaatacaaaaattatccaggcgtggtggtgcgagcctgtagtcccagctactcgggagcctgaggcatgaggattccttgaacctgggaggtgaagccaagatcatgcagttgcgttctagcctgggcgacagagcaagattccatctccaaaaaaaagagagatacatttttttctttctttctttctcttttttttttttttttgagacagggtttcagtcactttgtcacccaggctgagtgcagtggcatgatcacagatcactacagcctcaaacccctgggctcaagcaatcctcccgcctcagcctcctgagtagctgggactacaggtgggcgccaccacacttggctaattttttactttttcatagagatggggtcttgctgtgttgcccaggctggtctcaaactcctggactcaagtgatcctcccacctctgcctcccaaagtcctgggattataggtgtgagccactgtgcccagctgggatttcttttttgagagggtgtttcgctcttgtcccccaggctggagttcagtggcgccactttgctcactgcagcctctgcctcccgggttcaagcgattctcctgcctcagcctgccgagtagctggaactacaggtgtccaccaccacgcactgctaatttttgtatttttagtagagacggggttttactatgttggccaggttggtctcaaactcctgacctcaggtgatccacccgcctcccaaagtgctgggattataggcgtgagctaccacacctggcctggatttcttttttttaagcaacgtaactacaataccatcattacatctataaaaatttaaatgtcaatatcaaatattcagttggtattcagatttttcagttgttttttaaatgttgagtgccttttttctccatgcaacttattgaagaaactggattatttatccatacagtctcccacagtctcgattttttgactaaatccttgtgggattatttaacatgttctttgtatcttaacgtaaattgaaaattatttctagaggtttgacggatttaggttttttggttggctgattgtttttatgtgactacttttacaggtggttttgtgttcttttgataggagacattcattcattcattcatttatttatttatttatttatttatttatttatttattttgagatggggtcttgctctgttgcccaggctggagtgcggtggcatgatttcagttcactgcatcctccacctcccaggctcaaagttctcccacctcagcctcctgagtaactgggactacagatgcaagccaccaaacccagctaattttgtttattttttgtggagatgaggtctcaaactcctagactcacgatcccagctacttgggaagctgagggtggtcacaaactcttgggcttaagtgatcttcccgccttggcctcccaaagtactgggattacaggtgtgagccactgcatctctgacctaattattttttaatgttagctgccattgattatcaatgcttagatccattcattcaataagatttcagacttgctctcactgtgttatttcttcttcctaagtatcattgtaactcatggattttaacatttggctttagttcatttcagttattgttcttactggtctgcaaattgccctattttggaccagtgaaagcttgttcagattgactccttagtccttttgacatgtcctagttacaatggatttttaaaataatatttgcttgtcggtttaatcagatatataaaatacagtgctatgacgctgagtgtggtgactcatgtctgtaatcccagcagtttgggaggccaagatgggcagatcacttgaggtcaggagttcgagaccagtctggccagcatggtgaaaccctgtctctactaaaaatacaaaaatggttgggtgccctggctcatgcctgtaatcccagcactttgggaggccaaggtgagtggatcatctgaggtcaggagttcaagaccagcctggccaacatggcaaaaccccatctctactaaagatacaaaaattagttgggcatggtggcgggtgcctgtaatcccagctactcgggaggctgaggcaggagaattgcttgagcctgggaggcggaggttgccgtgagccaagatcacgccattgcactccagcctgggcagcagagcaagactccgtctccaaaaaaaaaaaaaaattacaaaaattagtcaggcatggttgcgtgtgcctgtaatccctgctactcgggaggctgagttgagaattgcttgaactgggaggcagaggttgcagtgagccaagactgtgccactgcactccagcctgggtgacagagggagactctgtctcagaaaaaaaaaccaaaacaatgctatgctatatatatatgttgaaacactaaaatctattgctgaagtatcttactaaaatattggaaatttaatgtctaaccaatatacctaaatgcctctgtttattctaaaatatttcttctttgtctgtagaccagattatcaaaaattctcatgattaaaaaggaacatatcaagaaattaagggaaatgaacacagaagcagaaaaattggtaagaatttctctttttttttcttcatttgcttgtctaattttaaaatagtgagaccatctatatctaatgatttaaaaatatctatggaaggaaaccttcagataaatattatttttaaatcctcatttgcatgaggtccacacctgtagtccaccttcttgggaggctgaagcaaaaggattgcttgagtctagagtcagagactgcagtgagctatgattctaccactacagtctagcctgggtgatagcgagaccctgtctcagtaaatgaatgaatacaggaatacatacatacatacaacagtaaatcttcattgctatcactatctcttgttatacagaacatatgctaagtaaattggcagtgcattgccccagacctcattatgccattgactgtacagttgaataggattaatggatatattaggttctttcagcagtttgcatgagtctagaattgctcagatacctgtgaccaaggaagttgtaatggcaggttataaaaaatgtttcagaataagtaagtcaggaaatatctatgttgtcatctttaggttatcttgacaacgtttatatcctaatttattatctaatgagttcaaaaaatgagagccaattttattcataagataattaccagaagtctttttttttttttttctgagatggaattttgctcgtcgcccaggctggagtgcaatggtgcaatctcggctcactgcaacctccacctcccgggttcaagtgattcgcctgcctcagcctctcaagtagctaggattacaggcgcacaccaccacgaccagctaatttttgtatttttagtagagacggggtttcgccatgttggccaggctgctctggaactcctgacctcaggtgatccacccacctcgggattacaggtgtgagccacagcacccagccagccacagcacccggcccagagttttttaaaaagctgtttatgtaggcactattcactaagaaagtctttgaattgtaatgaaattcacatcttgcttaaggatatgtaggatggcaaataggttttatctcatgtactatctccagtttattgaaaatgactgtatagaagtctgaaagggagggctctgactgtgctcaaggggcaaagtgctgtgactgatgatcagtgtctgttgtaagtgcaggaatgggaatagtggcactgggaatctctggaatgaaatgttataagggtataggtgtggatacagttaggtatctacagctgcaaaagtagatacctaagtgaataaagaacaatcctcttttaggattatagaattttttttatccaaaaattactgaatttttaagaccaaaaatgtcaggtgatttcagcgtaagatcatactgctctctttagcagtacaggtattaaaacttgggtttatttcccagtttaactcatttaagcataacatgaaattagtattatcagatacacaagccatccgaaaatgaaaaggattagctatagcatattgccattacatatcttaaacatagaaatgtatgtgcgtgcttctttcctactggactctaattcttggtttccatcagttctacttctgccctttatattcgatgccttttcagtgctcttccaccccacttctgtttttctctggtcaccttatcatctcttctatctttatgtataaatgaattatttccctttaatatcactagttaggactgttttcttctaagttccatgctttaaagcactgggcttgcctttgcccagttaatcttatctgctttcaaatagagacctattttgggttgtttcgcaaaccaaggagatgtaggcttcagtgtaaaacgaatttgtattcccagagaccgttttgatgttggcttggcttcttagcatatgagaactctgtagaagtaatctagttggcttgatatgttttattatttgttttatttatgtaaaaatagtttccctataaaaattcaaatattatgaaatgatttaatgagtcaaactgtagttctttataatgccttctccataaatagtattaagttagcatatgttataaatatgtttatttatatgtttaccatatggatttctttttctgtgcatatactaaaaattattttcatgcaaaatggaattaaattatgatatattggcttatcttttaaaatgattgtattgtaccataatttaaacaacttcctgttaacatatttatttccagcattttattaatataatgctaatatttttgtgcatttgtttgtgtctatctgtaggataaattttagaaagtaaaatgaaagatttaatgaaagttaatttaaagatggtaggctgaacaaatttttttcatatcctttataattgcacatagaatatgaggtacaaaaagaagtaaacagaaaaaatgaagcagtctgcttaacaatgtctatgagatttcgaaattttttctggcatgtttttaaatgaaacagaaaccatagctacaagaggccctagatccagagttggcaaatatgatgaagtgcagaagtgagattagtattttaaaaggcaattaattcaaggtctttctccttgttccccttcttcatctcagtgacagaactcaaacgtggcatttactcaagttaaatggagagaaagaagcacttctctaaagaatttgaatgtactatttggggaaagttaaggtttttttctgcttttggtaagagtagactaggtaatttggattaaccttcctgctgtaaataactgtttcctctggaataaaatattaaaataacctgcttgaagaacactggagcattaacaaggcattaagaaggcctggcacagtggctcatacctgtaatcccagcactttgggaggccaaggcgagtggatcacttgaggtcacgagttcaagacaagcctggccaacatggcaaaaccctgtctctactgaaaataaaaaaaattagctgggtgtgataggtgtgcacctgtaatcccagctacttgggaggctgaggcaggagagtcgcttgaacccacgaagcagacattgcagtgagccaagattgtgccactgtactctagcctgggcaacagagcgagactctgtctcaaaaaaaaaaaaaaagaaagaaaacaaacaacaaggcattaaggaattataggatctgggaaaagaaggaaagaagtaagggggaacctgatgttcagggttgctttttccttggggacttctgcaagttccagaaaagctagctgagaagctaagtggcattcttgaaaggcttaagtgggttggaggccaaaattagagtccagagacccaccaagggttgggagaagttggcaaactttaagtcctctttggaggaatatagcatttttataggcctcaaattatttctataaatttttatatatagtatctaaaactcaatttaaattcaagacacaataggagacacaataaccctaaggaaaaaagaaaatcaactgtagacagtaggtagactagacaatggagtttttagaaatatattttaaatgcttaatttgttaaaagagatgagacaaaattgagaattttagaagagaactggaaacaacaataaaaaagaccaaatgaaaactataaactctagcaatcaaaattaagaactcggtggatacaaccacagcagattagaaacagctaaagagagagctagtaatttaaaatagatcagaagaaaatatcccgaatgaaacatgaagataaaaatgagtggaaaatttagaagagaagagacgataaataggaaatacagtgaggaaggtctaatgtgtaacggaatagcagaaggaaaaagaaagaatgggacaaaagcagtattttaaaagataatgactaaaggcgttccaaaaccgtcaaaaggcaacaagccacagataaattcctatcaaccccaatgagataaataaattgatagtgacttttagacacattatctttttttttttttttttttttgagacagagtctcgctctgtcacccaggctggagtgcagtggcacaatctcagctcactgcaagctccgactcccagattcacaccattctcctgccttagcctcccaagtagctgggactacaggcgcctgccaccacacccagctaattttttgtattttttttttttttttagtagagacggggtttcaccatgttggccaggatggtctcgatctcctgacctcatgatccaccagccttggcctcccaaagtgctgggattacaggcgtgagccaccgcgcccgacctaggcacgttatcttaaaactgctgaaactaaacacaaagtgaaaaaatgttagagtacccagggcaggatgggagtggggagtatgtacaaacgagcaaccaacaatttgtctgagagctaccatctccacagaaacaatagaagacagaagataatggaatgacatcttcacagggctgaaacaaaataactaccaacctagatttccataaccagtgaaaatgccttcaaggataaagttacaaggacagttgtagacaaatttatggactttcttaccagaatacctacattaaaggaaatactaaagtttttgtttaagcagaagaaaaaacttgaagtttgtaaaagaaacatgaagattcagggaatgaagaaacaacaaaaagggtaaatatgtggattaatctaagtgacacattaaataactcttgtggcacttaaagtatagagagaattatacaattgtctgttggtcagggtaggggtgtatatacatataggcctagataaatcaaagatggatgacattttaatctctaacctattaaaataatagtaaaagatgaatatttatcaagctaattagggggaagtaggtgggaaatggaacaataaaaatgtttaattggggctgggtataatggctcatgccattggattgcttgaggccaggagtttgagactagcctggccaacatagccaaaccccgtttctagtaaaaatacaaaaattagccaggcgtggtggcacacagctataatcccagctacgcaggaggctgaggcaggagaatcacttgaacccaggaagcagagagaggttgcagtgagagcccagaccacgccactgcactccagcctggccagcagagcaagactgagtctcaaaaaaaaaaaatttttgttttttagaaaaattagccaggcatggtatagttccagctcctcaggagactgatgggggaggattgcttgagcccagaagtttgaggctgtggtgagctaggatggtaccgctgaactccagtctgggtgacagagtgagaccctgtttcttggggggggggaaaaaagacaagtatgtgactggcagaactaagaaactttaacaaaacactgtattggtgaggatgtagacaagtaggcattcttacacataaattagtacatcttttatgaagggtgtagcaattcttatgcctcagtctcctgtgtccaatcatatttctataccactgtccatatgctttgtgaacctaagcacaaaaattgacagtttattttgtattcttcattctgaagactctggcgtcacataaaattataaccaaataaatgtgtatgccttttttcctattaatctctcttttgtcagtgattttcagtgagccttcagatggtgaaggggagttccctctggcctctacaggtgctttggcaatatctatcaagatttaaaatgctcaaatcctttgatttagcagttgcactcctggaaacttctacacttatgtttgcctttgtccaaaatgactacatgttcattgcagcatgtttgcaagatctgaaggttagaaacaacctgaatgttcatcaagaaggagcatgtttatacactttaggtgggaatataagttaattgaagtctttttggaaggtagcttggccatactgacgggccagaaattttacttctagagtatcattcagaagatgcgcatacaaggatgttcatcacagcattgttgtaatagcaaaaaattgtaaatggttaaatgaatatctgtagaggactagtcaaataaatccatacccttgatcatgaactgctaaatctgatattttccatcttgtcccttataagctcatatttttacagactgtttgccttcaacatgaacctgtaagccacacaagaaaatctttcattactttgtgatcatacctggttttttatcagaatgtattagttatttctaatggttcaaatgcctcaccttattcatacaagcctaattgaatgtcatatttttgacttgtttttattttatttatttattttttgagacggagtcttgctttgtcacccaggctggagtggagaggcacgatctcggctcactgcaacgtctgcctcccaggttcaagcgattctcctgcctcagcctcccgagtagctgggattacaggcatgcgccaccgcgcccggctaattttttatatttttggtagagacggggtttcaccatgttggccaggctagtctttaactcctggcctcaagtgatctaccctcctccacctccaaaagtaatttttaggccaggcacggtggctcacgcctgtaatcccagcactttgggaggctgaggtgggtggatcacttgaggtcaggagttcgagattagcctggccaacatggtgaaaccccacctctagtaaaaatacaaaacttagcccggcgcaggtagcctgcacctgtaatcccagctattcgggaggctgaggcaggagaatcacttgaaccttggaggtggaggttgcagtaagccgagattgtgccactgcactccagcctgggcgacagagcaagactccatctcaaaaaataataataatttttaattgtatgtgtatatgtgtaaaatgaatatacttttctttaaaaaattaccattcttattgagtttcatgtgtgtttttctttctttgtatttattttttaatgtataaatacctatagaatatatactattgggtttttttgaggaggggaccttttttttttttttttttttttgagacggagtctcgctctgttgcccaggctggagtgcagtgctgtaatcttggcttactgcaacctctacctcctgggtttaagcgattctcctgcctcaacctcccaagtagctgggattacaggcacgcaccaccacgcccagctaattttgtgtatttttagtagagatggggtttcaccatgttggccaggctggtctcgaactcctgacctcaagtgatctgcccgccttggcctcccaaagtgcagggattacaggcctgaaccaccatgcccggccaagggcagacatttttaaataaattttatactatgtaacattctgcttttcactgtatagtatcagtaaatatagatcactctcttcaatcctagtgttagaagatctttaaattgttagcaatctgataggtgaaatataaatctcattgttttattttgtatttctaaggctactagtggaattaagcatctttttgtattttaattggccatttatattaacaaaattatttgtttcgcatgttaccatagtacagaaaatttaaattttgatgtagtcaaatacagttgaccctcaaacaacatgggggttaggggtgcaacccccgccagcagtcaaaaatccgcatataccttttgactcccctaaaacttaactactaatagcctactgttgaccaggagctttactgataacctaaatagtagatgaacacatatcttctatatgcattatatactgtatccttacataaagtaagctagagaaaaggaaatgttaagaaaatcataaggtaaagaaaacatattcattattcattaagcgggagtagatcataaaggttttcatccttgtcatcttcacgttgagtaggctgaggagaaggaggaagtggaggggttggttttgctgtctcaggtggcagaggcagaagaggtagaggagatggaagggaaggcaggagaagcaggcacactgctgtaacttttgaaaaagtctgcatctatacgatctggtaggctgttgcaaaaattaattttaaaaaaagtctgcatataagtaatgtaagtggacctgcaccattcaaacctgtgttgtctgagggtcagctctatatcagcctgttcctttttctggtatttgtaacttgtttaaaatagcttctttacctcttattcataaacatattctcctgtcttctcatgatacttttatagtttcttttaatatttagaccttcagtacatcctaaaattttgtgaatgatttgagtacagagagcttttttcctcaaatagataattgttccaatttattaatagttcatcctttcccactgatttgaaaggccagctttactatatacaaaatttccaaacaatatacatatattcgtacacacacaaacatatgtgccaggcatacatatacatatgtgttggaattcagtatagactggccaccattctctcccattggtgtatttgtctcccatgtcaataccatactgtttgataactaccagtacaagtccctccatttgtctttctctttcaaaattggtttggtcattcttgtacatttattcttctatattaaccctttattatttagatgtttaagaagataagggaaatattttccatcattgggagatactcaaaaagataaagactttgagaacagcttcaaaaaagggagctcaaaaaatatttttagaagttggagatataaccagatgataattttgacaggaagtatatatctgtttagtgttggaattttttttatggttcattagttacatcacccccttttcttttttttttttgaaacagagtctcgctctgtcgcccaggctggagtgcagtggcgcgatctcagttcactgcaagctccacctcgcgggttcatgccattctcctgcctcagcctcccgagtagctgggactgcaggcacctgccaccacacccagctaattttttgtatttttagtagagacggggtttcaccgtgttagccaggatggtctcgatctcctgacctcgtgatccacccgcctcagcctcccaaagtgctgggattacaggcgtgagccaccgcacccggcctatatcaccccattttgtaatgcattagccatctcccaatttcatacattttgatgtatactgtatatgtaaaccctttgtacatctttaattcattaaaatgttgaacacaaaagatgaagatagagacttttgacaccctcaaattcgctgtaagagatagagcttttaatgattttgattttgattaactagttctgagtctgcaaaagtatacacttttccccgagaagaggcttgatcaaatacttagttataatttatgttacactatatcctcagtaacccccaattcccaacaaggaaatgaaattaaattcagcatgtcctgcattatccctgcattcttatagaaaatctttcggatgatccagtggttttaacttcacaaaaactgaggtttacgaataggaagcaattcaggaagcaccaatggtaaactaaaagtaggatgtcctggatatgattccaggcctatgtggaaattatcccttccctactcccactgtggcattccctcccctctttctcttttactgcttcagatctatagtagcagaggaattctaactgatgcaaactggcttcagatcccacaaggttaccacttactggctgcggtacatgggcctcatatgtaaaatggagacaataagcaataatatcttctttctcatggggttattgtgaggattcaatgaaatcctttaaaaacacttagaacattagccaggcatagtggcacatgcctgtagtccaagctacttgggaggctgagacaggaggatcctttgagtccaggagtttgaggctgcactgagttatgatcatgccactgcagtcctgcctgggcaacagagtgagaccctgtctctaaaaaacaaaacaggccaggcgcggtggctcacacctgtaatcccagcacttagggaggccaaggcaggcagatcacttgaggtcaggagttcgagaccagcctggccaacatgatgaaaccccatctccactaaaagtacaacaattagccaggtgtgatggcacgcacctgtagtcccacctacttgagaggctgaggcagaaggattgcttgagcttaggaggcagaggttgtagtgagcggagatcacgtcattgcactccagcctgggtgacgggagtgaaaccctgtctcaaaaaaaaaaaaaaaaaaacttagaacaagctgggtgtggtggcacatgctatagtcacagctacttgggaggctgaggcaggaggatggcttcaggccaggagttcgagtctagcctgggcaacatagcaagacgccatcccaaaaacaacaacaacaaaaccactcttagtgcatggcacgttagtcagctctatttagtacatctgttgtcatcattaagtaatcagcacatcattaatagtgtgtgctgttaagtcatttaacttttctaggcctcagttttctcctctgtaaaatggtatggcttaactagatgacctctgaggtttctgttagctcagtctataattctgtgatttggaacctatataagtagttcctccctaggtctaggaaagttttctttccctacctatacttactagaaggagcgattttgcttccttagtgcataacaacgtgctttctcagaaatcctctgaaaaaagaaatgttaaattttccttgactagagaggtttcattgccagcatttttagcaggaatgaaatggagagtataatttattggaagtattgtgaagagagggaaggaaatggcatcaaagtccattaacacttgttggtaaggagcatatatggaatgatgacacaataaaaagttaatatccattgagcatcttctatgtgggaagcactgtgctagcatgtattatctcatttaatctttgcaacaaccccactagatagatattcttataatccccattttgcagttgaggaacatgaggcacagagagattaagaaacttccttaacatcacacagctagatgatgatagaggtggaatttgaacatatataatctgattctaatacccacgctcttaaaccattatgctatactgaattgattccaggtacagcgtcaattgatttaaataactagaatgctttaaatgaggacatacggtttaacaactaacaatcctatgaaaaagttgaaagacgaatataacgaacattgcttacacatttatcaattaacattttgctccatttaatttatctctatagaagatctccttttcaaaaaagcaaatggcagacatcatgatgctccaataaacaaggacaatctcctaaataacaatgccattatcacagacaagactataacaattaaaacagacaaatttaataacctttagtttgctttttagataagtcaaatctccttttagatcattgaaattgcattgctaaaaaacaaactcttaccaagatctgatttttttctcttctcagaaatcatattccatgcccatcagcattgaatttcagcggagatatgcaacaattgttctggagcttgaacagctgaacaaggacctaaacaaagttttgcataaagttcaacagtattgctatgaggtaagtgatatgtatagatttccctccatatttgtatttgaagcttaatccttttactttcacactttagaaaatccataccaagccaatatcttcataaagtcctttagcagaactgtattatataaagtttcttactcctcccagcatcagtgttgaagagtgctttatacacagaaagctgtcaattctgagttttttggttcaagatacaaataaggccctccaaaaaaatttggaaaaatccagaaaactaattactcttaattccactaccccagaaaccaaattttgttgttgtcattgttttttcttcttctttatttatttatttattttttttgagacagggtctagctctgttgaccaggctggagtacagtgatgcaatcttgcaatcttggcgaactacagcctcaacttcccaggctcaagctatcccccaacctcagcctcctgagtagctggaaccacaggtgcacgacatgcccagtttattttttatagagatgaagtctcgctatgttgctcaggctggtctcaaactcgtgggctcaagcgatcctcctaccttggccttccaaagtactgagatataggtgtgagccactgtgcccagccccaaagaccaaattttgctttatttcttcttagtcttttttggttgtttttttgtttttgttttttaaacaatacctgctttttctcacaaagttctgatcatgctggccatacaattttgttgccttctcttttaaaccttaaattagcattagaactatgaattcttgaatttcaaatacatagataacagggttgtttgtgaattttcattcacatgtgatcatatgagagtggttcaacagtttcatccaaaatttgagtttcctactacagggtaagaattaaaatgattcagttgagtttaaaatgctcctgaatttgcatactttgaggttgtgtgtttccaggaaagccacctctatttgtgatatcagattcttttttttttttttttgagacagagtcttactctgttgcccaggctggagtgcagtggcacaatctcggctcactggaacctctgcctcccaggttcaagcaattctcctgcctcagccttctgagtagctaggattacagctgtgcaccaccatgcccggctaatttttttgtatttttagtagagatggggtttcaccatattataggccaggctggtctcgaactcctgacctcaagtgatccgccctcctcggcctcccaaagtgcttggattagagacatgagccactgtgcccagctgtgataccagattttttttttttttttttttttgagacagagtttcgcccttgttgcccaggctggagtgcagtggcatcatctcggcccactgcaacctctgcctcccaggttcaagtgattctcctgcctcagcctcccgagtagctgggattacaggcatgcattaccacgcccaggtaattttgtatttttagtagagacagggtttctccatgttgatgaggctggtctcaaactcccgacctcaggtgatccgcctgcctcagcctcccaaagtgctgggattacaggcatgagtcaccgcgcccagcaatatcagatttttaaacagttggcttattttcctgatagttgtcagtcatccacataacaatatgcattgtattagtaaatagattttctcccctggactagcaattattcacaagacatgcagactatgcagtccaggatgacacataacaaagctgatggtacatgcagaaacgggttgctcatcaatctttttgtagtacccaaggccatttgtgataggctcctttcctaatgaagtaaagtgatttaatcttctcaaagctcttatggaactacaatatagattttaaaataagaacatatcagagagaacaccatgactaagcaattctacttctcaatatataccaaaaagatacatcaacatgtatttaccaaaatacatatactagaatgttcatagcctcactgttccttatagccagaaatcacaaagtacccaaatacccatcagtactacaatcaactaataaacatggtataattacacaatggaaatgctacccagcaatgagaatgaatgaactcgactacaactcagtgccatagatggatctcacaaacacaatgtggaacaaataaagtcagacacgccgggtgcggtggctcacgcctgtaatcccagcactttgggaggccaaggcaggcggatcacgaggtcaggagatcgagaccatcctggctaacacggtgaaaacctgtctctactaaaaatacaaaaaaaattagctgggcgtggtggcgggcgcctgtagtcccagctactcgggaggctgaggcaggagaatggcgtgaacccaggaggcggagcttgcagtgagccgagattgcgccattgcactccagcctgggcaacagagcgagactcagtctcaagaaaaaataaataaataaataaataaagtcagacacaagagaatatataatgtatgattacatttttataaagctcaaaagctaacctctgatgctagaagtcaggatggtgattaccctgagggaggtggtactggaagatggcattatcagggggtctggggcattggtaatattctggttcttaatctagttgctgacttctcaggcatgtttgatttgtgaaaactcattaacctgtacactttacgatttgtgtacttttatgtatttatgtatgcttcaatttaaattttagaaaagtattaaaggatacagttattcattgaagcattattggtaattaaaaaatattagaaataaacataaatgcccacacatagggaactgactatttatggtacatccacacaattgaatactatgctgctgtaagagaggaagttctctatttactgacacagagtgatttccaggatatgttattagatgcaaaaagcaaatacgaaaatacacatacatattccaaagtataacctttggagtaggaaataagtggaaatacaatgtatatgtatcagcttaatttttcaaaaggaagcagaaaggatacattagaaactaatttgggaatggggtaggagttggtgagcaagaaggaatgacatttttctgagtgtttgtttccccaacaaatacaagtaaatgcaaacagaaataaatgaacctaactatatttcaaaggagtgacataaacttactgaaggggataaaaactgattcagatagcttgaacatagcataggttgagcatcccaagtctgaaatgctccaaagtccaaaattttttgagtgccaaagtgaaactcaaaggaaatgctccctggagcagtttggattttggagttttgtatttgggattctcaaccggtaagtataatgcaaatattctaaaattttaaaaaatcctaaatccaaaacacttctggtcccaagcattttggataagggatactcaacttatattttgactgtatacctttagtctgaaccaaaatttaaataaacattgaactctagttagtagaattttttctcttggtggcatgcatagcagtcctgaaactctttttttttttttttttttttgagacggattttcgctcttgtccaccaggctggagtacaggggcgcaatctcggttcactgcaacctctgcctccggggttcaagcgattctcctgcctcagcctccccagtagctatgattacaggcatgtaccaccatgcccagctaatttttatatttttagtagagacatgttggccaggctggtcttgaactcctgacctcaggtgatccacccacctcggcctcccaaagtactgggattacaggcatgagccaccacacccagcagcagttctgaaactcttactgtgtactctaggactgagcaaagaagcaaataagtatattgaacctgggaggcagaggttgcagtgagctgagatcgcaccactgcactccagcctgggcaacagagtgagactgtctcaaaaaaaaaaaaaaaaaatttaggataacgcgagccaggtttctcactgttgaagaaggcagttatgaagagggggaagactagagtgaaccctgtggcattagatgggaatagggggaatcagtatgaattcatggtttattttatctttatgctatatgtataagtgagtgtatatgtctgctgagagagccaaaagcaaagacaccctaatagcaaagaacacactagacccagatcttggtctcttatctctgttctccaatttaaaaaagcaggacttcttgaaaaagagactgattccagacctgaggcagagaaagaagatgagcccggcccaccttattatgccaaggaagtaaaatgtgcccccaaattacggggacgtgtcaaaaagggccagcttgacagggttcccactggccaaatctgggacaatttgagcttcagaataaataaatatagtaagagattataacccatagaataaaagttatgtcagtatgggttcatactgatactagttcattttttaagggaaactactttgtagtaaaatgccaactaataaatatagaagcagtgttaagagtgagaaaaacaccattttgcaaccatcatagtaataattgatatagacaagaatcatcaacagatgctaaaattggtaggtaaaagtttgatgacaaataggatgtttacatagcctcaaagtatctcttcacaactacttagtacttacaaaaaggaaatcctttactgtagggaaatctggcagacacttaacttaccaattgatcaaagagaacatcaccagtaatgggacaggtcaacatcacgtgccttctaataaagatgccagagaactcagcaccacatttgtagtatttctgcccaaaaatgcataacttcagtctaatcataaggaaacaaacaaacccacattgggggatattacacaaaataattggctcgtactcttcaaaaataccaaggaaatacaaactggagtgattagaggtaatgaggcacagtgtttgcaacttattcttaaattagtaacgggaagaattatacattcacagagatcaaatggcagatcaaatgtagtaaaacataaacagtaaatctgagtaaatgttatcaagagttctttgttttattcttttaactttttttagaagtttgaaattatatcaaaattaaaaattacaaaaaatagaaaatcagaaactgttaaaggaaaaaaacttctaaggtaagagtaccactttagttttaaatgctagttttataaaaattaaaatctgaaaagagggcacaaacacatacagaaataatcatggcttctcgaacatgcgtctcatgcttcaatcatctgtattcagcttgctccagaccaggggctccagcctgcagatcagccaacagatatgagacgcaggtgtgaggaagaagcacaggaaattgttcggcatgcaaattcctcaacaggacagccctgcgttgaaaatgaaaatctgacagacttaatttccaggcttacagctattttgttacaaattaaggtaaatcttagagaaaatattttcttaatttgacacaaagcaacccacgctaatttgttgctaagaaattaattcattgattatatcaggtattttatgactatatttgagctataatgcaattaaattttgaaatttttttccctttagtgtctagcagaaggaggagacctgaattcctttgaattcaaatcacttacagactcattaaatgatatcaagagtacaatagacgcttctaatatcaggtaattcgttaggtatactctaatcattttaatgtgaagttcatagtaattttcagtccaggttttaagaattatgcatatttgtgaagtactcatatattattatccgttaaatatatttgtaagagcttttcacttatatccagcctatggacagaatagaaatttcacatggattttgtatataaagaaatcaggacatatatttaggtttggggtcagcatggaggttgagcttagaggtagagcttccccagtcagtgagagactcatcttctccttccagccccccgtggctcctttgcttctttagagcatatttgttcaactactactgaagtagaattatggctaatatattagaggagatttattccttccctaagatttatcatagctgtttcctaactaaaattcaggtcttcttttaaaaatttttttcttaattttttgaaataaagtagttaaccatgtttcttctttctttagttgctttcagaataatgtagaaatccatgttgcacatattcagagtggcctgagccagatgggaaacttacatgcctttgcagcaaataacaccaacagagactgagtaaagatttcattattccaactgcacgggacattgtttttgagaagttcttttcctttatataggcttccaacaccaaataacctaactgctggaaaacaagggaaatttaaatctccaaataaggcattttaatagactgtactgcttcttaaaccagcattgctgaccagcattatatttatttttcttttattattcagatgcagtagcattgcttatgttacatatgtttatattcacaaatatttttaaactgaaatatctgaacataatataatttcgtggaagaatacattgaccattttttttaatgtgcatgaattcaccgcaacacatgcagacaactgctgcaatggagagtatgaagaaacctggtctttttattcatgtcggtggcagtgtggaaattccatccagaaaattacaactccacttgatttagttgatcaccatctcagtcttcaaaagataacatcatgaggtgtgggaagtcctagttttaaggaaaccactgaaatatagatgggaaatgtggactttacaagtatatgttatatatacttgcaatgtgacatggttctgtagatcattttataataataaatattttaatttatcataacatataaaagaaacctttgttgtttgttgaaagaaaatgaaggaacagggggaaaaaaggtgcaaaatgctaaatttctaaaaatggatttggcatgtcttcccatcagttcaggtcaaaagtgcattgttgtgagatttattaaaaaaaaaatgataacacactattttcatatttttttgtttatttgcacaacttttaaaccagattactggttaaaatccaacagtacacaatttataaagtaaaaagattttataaggaaaacaaatataataaccagtgctgtgaaatgcagaagaaaggcttgttttggttgtttttcttttttaggaaaacgctgcctaaaatgttaatcttgtaaaaagtatgtatttggaattttcttcgttttaatagaatattataaactcaaaatataaatttttttcaaatttggagtttaagatatagctgtagaggtggttttaattcctttagatgtctcataaaatgagactttttatatgttaatgtataataaaactgaaacaagattattttccatttgaaatttttgtatagtttaaaaaggcttccgtattctttgttggtattgtgccactgcagaactttagtgcagagtttatatttagctaaactgttatgttaattaagaaatgcataaatcttctattcttaatatttgtaattctaaataaattgatctatgaaaattattattttc

SEQ ID NO: 286 - DNA, 77735 bp, Homo sapiens
  source 1..77735: mol_type = genomic DNA; note = NC_000007.14:c87476722-87398988 ABCB4 [organism=Homo sapiens] [GeneID=5244] [chromosome=7]
aagggagatgtttttatcctcattttacatataaggaaacaggcctagagaaatgagcacagtgtccaaagtcacatagttaataagatgtgaagctctgagtttgaaagtctccggtttcaaagccatgaaacttatggctccccgttttagacacttccttttgggaagagtgtggaggaattaatcagaaagaagaaagtcatactcaaataggtggtaggagcagagacaattcaatacagacagaagtcttagatgagagcagtgagccagggcactggactgggactcaggaggcttcccctagactctggttccaccgatgcagcctcaggcaggacttcacctctctgggcatccgtttcttcatatgttaaacatacggggttttaattagatgatcgctgaagacccctctagccctaaaactctgtgtctcttaagtgctaagagggcaccaacagcgttcctcctccccaaggagcataatgtgatggttcctgccggccctggctgactctcgccgtccttggagataattgggttcagtgccacctggaccagaactggggatgcggaagcaagaggcgagtctattgctctctctcggtcctgggccgccctgtgattgttgggcgtccggaaactgtctcccctatgggtttaaaaacaaaactgagcgcccatggggtgtgacagtcatctgcaggggcttgggtggcccatcaggcgaggctttctcggcacccgaggctccagcctgatctcggtcttatcctgcgaccgggctggttctggcgggtcgccagggtgggcggcggccccagccgggcgccccggcggcaagagcggcaggctgcgcccctggcccgcgcctagcctggggagagagctgggcgggcggcgggagctgctctcgcgggccgcggccctcgccctggctgcaacggtaggcgtttcccgggccggacgcgcgtggggggcgggggcgggggcgggggcgaggccgcggcgagcaaagtccaggcccctctgctgcagcgcccgcgcgtccagaggccctgccagacacgcgcgaggttcgaggtgagagaggtccgggcgcgtctggcctcgaagggagacccgggacgtggggcgcggggcgggagtggccggacctccacccagtgcccccgggccccgcgactcgtgcgccgggccgccggagagggtgtacttggttctgaggctgtggtttctcctcaggctgagatggatcttgaggcggcaaagaacggaacagcctggcgccccacgagcgcggagggcgactttgaactgggcatcagcaggtacatccccagcagccactggcttttccgttacacgccaatcagcaggactaagttcacccttggaaagaagttgtaaaaatcggttgatgcctttgaagacctttgttttggaggcttctttgaagggtcttgcatccggttctgaccttggagcaaacgtgttgtgtggcctcaaagaatgtcactgaggctccttttggaacagattcaggaagaaaaggctgtcttgaaaagtgctcccttccctttgtgcaggggggattcaatgaatatctgcattgtataacattcattgtattacgtaactcttgaaacttttacaaatgactttcatatacatcatctgattgttcagacttaaagggtgtcagacatctgctgttgatggctgtgctttttgaacaagggcagtgaagcaaaaactccctcccctcctgcccatcccctgttatgtctcttcctccttgtcttacccctccccctcctctcatcgccaggcttatttgtatttctcctttctgggaggataggtggggagggggaacttctgtacatccgaatcagttttgttcaagtggtagggggaagcagcgcttcctttgccttcatgtctttctcggttcccctggcccttgttaaactcacttcacaggctttatgagcggggcagaagttcccagtcaatggcgtgtgtctttgtttcctctttcactgtgggaatagtgaatcattttcgcctttagcctgaaatagtttatgaggctattacggtctctgagttcataccaggctacccagaaaaaattgacctgtgtcaagtgatcacccagagggacaaatttatcagtctctgtagtttgtcctcaagctgctaggggcttgattagctaactgaaaacatgcctacctgatgcttaaactgaagcattattttagcctgttaatgtggttgtgcagtaaccttgctgtatttcttctaagcaccattgtattttttcatagaaaatttagttttgccatgtagaattgaaaaagtgatagatggtgttacttccaatggaagtacttacacacgcaatagaaaaatatggttttcatcagctggctgtttaggcagggattgactgtgagtctattaatagatggcattttcatgaagaagtctatttatgtattgcactggcttaacatttgatgcgtgtgcaaaggagctattcctacaaaaggtgtagtaacacttcagaacccaggaaagtcctcagaggggaagcccacagcttctgctggaaagaagaaagcagctcaaaagagaaatacagaaagttaacaataagttaagaccacatgattatgaaatcaaatgtagtgaaactaatttttataaaagcagaccaaagataatatatttaaaggaagttaagcctgcttcaatcaaattagttatattcttgttctaattatgttgctattgcccatggcacattcttttgaacatatttagtggcagatgtttgtccagtgattttagtcaatactttacataatttggaatcatcttatgagtaaaactttatcatttacctggataaatgcatcatatttatgtaaaaatcatcatatatatataaatcatcatacacacacacacacacacactccctcatagagtttatattatagtacggaggacagacataaataatgtacatactaaataagtaaaccacagccaatgttagaaggtaattaacgccatggaaaaaagcattaatccaggttaaggggatcaggagtacaaaaggggagtactttgtaattttaagtagggtggttagggtagatcttattttaaaggtaatatttgagcaaagacttgaaagaaatgagaggagacagctgtgtgggtatctaaggggagagcattcccggaaaaggtaactggcaatgcaaagaccctgagtcaggtacatgtttggtgagttcatggaacagcagagagtccaggctggttggagcagagtaagcaggtttgggagtagggatgtggtcagagaggaaataagcaaacagatcgtgtaggacctcagaggttaatgcaaggattttggcttttattgtaagaaaaaggaaagccattgtaggtttttgagcaaagaagtagtgtatggcttggcattttgaaataattactctgactgctagttgaagatagactgaagcggcataggtggaagtggagagactaggcaggaggctgccctactggtgacagcaatgaaactggtgataagtggttaaattctagatgtactttgaatgtatcaccaacaagattgcctgacaccactctccacaatccttcagaagaatagacattcctaattttaaatcatgattttttttaattttagaaaacaaataacttaattgacttagcgacactgttagcatacttatctttcctgtgtatgtgagctctgtaaggcaggcgaccatttcttatgtatccatgtatctttgtagtaccttcgacagttacttttgtgcttgctatgtttgttgaactgaataattttgacattttgtgaacatcactcttatatttgaaaatataatagttgaatattgtaactaaacatatttatgttcaattgattgtaaaacattttgtaacagttttaaattgaagcaattctattttttacagcaaacaaaaaaggaaaaaaacgaagacagtgaaaatgattggagtattaacattggtaagctgtgaaatgttaaatgtgaataatcctaccttttattcaaatttgaggtattgaatcaattacctttaaagcaaatactttaagattgtctagctaggcgagctgactcatacttgtaatcccagcactttgggagactgaggtgggagggttgcttgagcacaagagtttgagaccagcctggacaacatagtgagatctcatctctacaaaataataaaaataaaaatcttaaaaaatagcatatgtcatggcatgaacctgtagtcccagctacttgggaggctgaggcaggagggtcttaggagtctgaggctgcagtgagttatgatcacaccactgcactccagcctgggtggcagagcaagaccctgtctcaaaaacaacgacaacaaaaaactgtctgcagacagcaataaattgtccttgctgcacctgtgctgtataagtttggcttattatagtcaatgacccacattcttaagatggatgattttttaaaaagtagagacaggctggcgatgacaccggacagagctaactggtgtgcaaggaaagtgaaaatgggaattgtgttagtagcacaatgcaaactcaacaatttcaagaaaatgcatttctgcatttgcttcacagacccccaccccaaatttagcttaaaataagcttgcatttcaagaaagtaattgttaagtacataaattttaatttaaggaatctacattcacatttggtttccaaaaaattggctaaatagggggtaactattaggaattctgattatgcttaaaacagttttcggtgcttttctgttggtacaagacaagacaatatttttggaagaagtctcctcatctggttttcatttgaaatatgtcttacagaggcagctcaagaaagcatttgcccatttttggtaaatatgacgtgtttcaaactgtgacagccattatttggtagcaaagaagttagaattaagtgtcatgtcagctgaaatccaacttagtaattaaatggataaaaagacaccaaaacatccacactctcaaacactgctgcatacttctcatgtaaccaaaagcccctattcattgtcttctctcctctttttttatttgtttaaaaagcctcagtaagggcaatttaaaaaaaaattagcactttggagaataaattgtttatcaaatgaaagctggttttatttatttttttagaagtttttttttctttatttttttaaatttgtttaaattatactttaagttctagggtacatgtgcataacgtgcaggtttgttacatatgtatacatgtgccatgttggtgtgctgcacccattaacttgtcatttacattaggtatatctcctaatgctatccctcccccatccccccaccccacaataggccccggtgtgtgatgttccccttcctgtgtccaagtgttctcattgttcagttcccacctgtgagtgagaacatgaggtgtttggttttttgtccttgcgatagtttgctgaggatggtttccagcttcatccatgtccctacaaaggacatgaactcatcattttttatggctgcatagtattccatggtgtatatgtgccacattttcttaatccagtctatcattgttggacatttgggttggttccaagtctttgctattgtgaatagtgctgcaataaacatacttgtgcatgtgtctgtatagcagcatgatttatattcctttgggtatatacctagtaatgggatggctgggtcaaatgatatttctagttctagatccttgaggaatcaccacactgtcttccacaatggttgaactagtttacagtcccaccaatagtgtaaaagtgttcctatttctccacatcctctccagcacctgttgtttcctgactttttaatgattgccattctaactggtgtgagatggtatctcattgtggttttgatttgcatttctctgatggccagtgatcatgagcattttttcatgtgtctattggctgcataaatgtcttcttttgaggagtgtctgttcatatccttcacccacttgttggtggggttgtttttttcttgtaaatttgtttgagttctttgtagattctggatactagccctttgtcagatgagtagattgcaaaaattttctcccattctgtaggttgccagttcactctaatgatagtttcttttgctgtgcagaagctctttagtttaattagatcccatttttgtcaattttggcttttgttgcctttgcttttggtgttttagacatgaactccttgaccatgcctatgtcctgaatggtattgcctaggttttcttctagggtttttatggttttaggtctaacatgtaagtctttaatccatcttgaattaatgtttgtataaggtgtaaggaagggatccagtttcagctttctacatatggctagccagttttcccagcaccatttgttaaatagggaatccttttcccatttcttgtttttgtcaggtttgtcaaagatcagatagttgtagatgtatggtattatttctgagggctctgttctgttccattggtctatatctctgttttggtaccagtaccatgctgttttggttactgtagccttgtagtatagtttgaagtcaggtagcatgatgcctccagctttgttcttttagcttaggattgacttgccaatgcaggctcttttttggttccatattaactttaaagtagttttttccaattctatgaagaaagtcattggtagcttgatggggatggcattgaatctataaattaccttgggcagtatggccattttcacgatattgattcttcctatccatgagcatggaatgttcttccatttgtttgtgtcctcttttatttcgttgagcagtggtttgtagttctccttgaagaggtccttcacatcccttgtaagttggattcctaggtattttattctctttgaagcaattgtgaatgggagttcactcatgatttggctctctgtctgttattgatgtataagaatgcttgtgatttttgcacattgattttgtatcctgagactttgctgaagttgcttatcagcttaaggaggctttgggctgagacaatggggttttctagatatacagtcatgtcatctgcaaacagggacagttttacttcctcttttcctaattgaataccctttctttctttcttctgcctgattgccctggccagaacttccaacactatgttgaataggagtggtgagagagggcatcctgtcttgtgccaattttcaaagggaatgcttccagtttttcccattcagtatgatattggctatgggtttgtcataaatagctcttattatgtttagatacctcccatcaatacctaatttattgagagtttttagcatgaatggctgttgaattttgtcaaaggccttttctgcatctattgagataataatgtggtttttttctttggttctgtttatatgctgtattacgtttattgatttgtgtatgttgaaccagccttgcatcccaggggtgaagcccacttgatcatggtggataagctttttgatgtgctgctggattcggtttgccagtattttattttattttattttattttattttattttatttatttattttttgagacggagttgcgctgtttcgcccaggccggactgtagtggcgctatctgggctcactgcaagctgcgcctcccgggttcacgccattctcctgcctcagcctctcgagtagctgagactacaggtccccaccaccacgcctggctagtttttgtatttttagtagagacagggtttcaccatgttagccaggatggtcttgatctcttgaccttgtgatccgcccgcctcagcctcccaaagtgctgcgattataggcgtgagccaccgcgcccacggtttgccagtattttattgaggatttttgcattgatgttcgtcagggatattggtctaaaattctctttttttgttgtgactctgccaggctttggtatcaggatgatgctggcctcataaaatgagttagggaggattccctctttttctattgattggaatagtttcagaaggaatggtaccagttcctccttgtacctctggtagaattcggctgtgattctgtctggtcctggactttttttggttggtaagctattaatttcagagcccgttattggtctattcagagattcaacttcttcctggtttagtcttgggagggtgtatgtgttgaggaatttatccatttcttctagattttctagtttatttatgtaggggtgtttacagtattctctgatggtagtttgtatttctgtgatatcagtggtgatatcccctttatcattttttattgcgtctatttgattcttctctcttttcttctttattggtcttgctagcagtcaatcaattttgttgatcttttcaaaaaaccagctcctggattcattgactttttgaagggttttttatgtctctatctccttcagttctgctctgatcttagttatttcttgccttctgctagcttttgaatgtgtttgctcatgcttctctagttcttttaattgtgatgttagggtgtcaattttacacctttcctgctttctcttgtgggcatttagtgctattaatttccctctacccactgctttaaatgtgtcccagagattctggtatgttgtgtctttgttctcattggtttcaaagaacatctttatttctgccttcatttcgttatgtgcccagtagtcgttcaggagcaggttgttcagtttccatgtagttgagcggttttgagtgagtttcttaatcctgagttctagtttgattgcactgtggtctgagacacagtttgttataatttctgttcttttacatttgctgaggagtgctttacttccaactacgtggtcaattttggagtaagtgcagtgtggtgctgagaagaatgtatattctgttgatttggggtggagagttctgtagatgtctattaggtccacttggtgcagagctgagttcaattcctggatatccttgttaacttctgtctcgttgatctgtctaatgctgatagtggggtcttaaagtctcccattattattgtgtgggagtctctttgtaggtatctaaggacttgctttatgaatcttggtgctcctgtattgggtgaatatatatatttaggatagttagttcttcttgttgaattgatccgtttaccattatgtaatggccttctttgtctcttttgatctttgttggtttaaattctgttttatcagagactaggattgcaatccctgcctttttttgttttccatttgcttggtagatcttcctccatccctttcttttgagcctatgtgtgtctctgcacgtgagatgggtttcctgaatacagcacactgatgggtcttgactctttatccagtttgccagtctgtgtcttttaattggagcatttagcccatttaaatttaaggttaatatagttatgtgtggatttgatcctgtcattatgattttagctggttattttgctcattagttgatgcagtttcttcctagccttgatggtctttacaatttggtatgtttttgcagtgactggtactggctgttcctttccacgtttagtgcttccttcaggacctcttttagggcaggcctggtggtaacaaaatctctcagcatttgcttgtctgtaaagtattttatttctccttcgcttatgaagcttagtttggctggatgtgaaattctgggttgaaaattcttttctttaagaatgttgaatattggccccctctctcttctggcttgtagagtttctgccgagagatcagctgttagtctgatgggcttccctttgtgggtaacctgacctttctctctgcatgctcttaacattttttccttcatttcaactttggcgaatctgacaattatgtttcttggagttgctgttctcgaggagtatctttgtggtgttctctgtatttcctgaatttgaatgttggcctgccttgctagattggggaagttctcctggataatatcctgcagagtgttttccaacttggttccattaatcctgtcactttcaggtacaccaatcacacatagatttggtcttttcacatagtcccatatttcttggaggctttgcttgtttctttttattcttttttctctaaactcctcttcttgtttcatttcattcatttgatcttcaatcactgataccctttcttccacttgatcgaattggctactgaagcttgtgctttcgtcacatagttcttgtgccatggttttcagctccatcaggtcctttaaggacttctctgcatcggttattctagttagccattcatctattcttttttctaggtttttaacttctttgccatgggttcgaacttccgtctttagctcagagaagtttgatcatctgtagccttcttctctcaactcatcaaagtcattctccgtcctgctttgttccattgctggtgaggagctgcattcctttggaggaggagaggcgctctgatttttagaattttcagtttttctgttctgttttttccccatctttgtggttttatctacctttggtttttgatgatggtgacgtacagatgggttttggcgtggatgtcctttctgtttgttagttttccttctaacagtcaggaccctcagccgcaggtctgttggagtttgctggaggtccactccagaccctgttttcctgggtatcagcagcggaggctgcagaacagcgaatattgatgaacagcgaatgttgctgcctgattgttcctctggaagtttcgtctcagagggctgcccggccatgtgaggtgtcagtctgcccctactgggtggtgcctcccagttaggctactcgggggtcagggacccacttgagaaggcagtctgtccattctcagatctcaaatgctgtgctgggagaaccactactctcttgaaacctgtcagacagggacatttaagtctgcagaggtttctgctgccttttgttcagctatgccctacccctagaggcagagtctacagaggcaggcaggtctctttgagctgtggtgggctccacccagttcctggccgctttgtttacctactcaagagcttcctggccgctttgtttacctactcaagtctcagctatggagggcacccttcccccagcctcgctgccaccttgcagattgatttcagactgctgtgctagcaatgagcgaggcttcgtgggtgtgggaccctctgagccaggcgtgggatgtaatctcctgatgtgccgtttgctaagaccattggaaaagcgcagtattagggtgagagtgacccgattttccaggtgccgtctgtcacagctttgcttggctaggaaagggaattccctgacctcttgtgcttctcgggtgaggggatgcttccccctgctttggctcatgctcggtgcgctgcacctactgtcctgcacccactgtccgacaagccgcagtgagatgaacctggggcctcagtaggaaatgcagaaatcacctgttatctgtgtcacttgcactgggagctgttgactggagctgttcctaatcagctatcttggaaccgcctctgaaagctggttttaatgcataggttttaaatctgcctcctacagaaaatacaatcctacaaaccttaatgtaggaacagaaattttcatttgaatttagaagttttagcttaagttaaacttaaatttaatatttattttcacctcttactagatatcttaatagatattttttgtcctgaaagaggttgaggataaaactgtgctctaacaggagttagaaatatattattttctggaaaatcactgaaaacaaacctaggtttacttaggatgttgctgtgaaattcacctcgttttaaatttatgcttagaggctgtaaaattgtattcaattaatatgaaaacatttaaaatgctttttaatgttaacaacctgaccctgtgcttttaactatagctgacagactcaagtgttctgttttccttttcccagaaccactaaaaatgaacctttgggacactggtccctttgtgacaattttagggacccagctccattggctcttgactttacctgctcccattgttttatccaagctctgcctggtttctgaccctttgtctctttcggttctcttgcttgccctgtgtgtttgatgatggagtttgtccctgtccctgaaaccttgcctgaactcctggaaatctttgagaatggtgtacacacatatccactttccaccatgtgcctctaacctcagcctcacccgggttattgacccagtctgacctagcttcagccctcaaaggctccactgtgccaagcctggctcatcaccctctctcccaataactgttctttgtccccaaaaggggctgaggtggggggaatgggcagagtaaagcattttaaaagagaggagagaaaaaaaagataggaagctatagaaatggaaatgtaagatgaggaaaatgtagtctagaaggcagaggaggaaagaagaacaaagagaaagagagccataaatgggtcaatcaaaaacagaaagaaaaggtgagaaatggaagaggactaataagacagtaacaaagtcctttgaagtgttagaacactgaactgctggttagttcttgagggttgtgcacttcactgtgacaactggtatcacccttcccctctgtaggtagtactgtgtccaagattcttggtgtggcccaccagcgcaggccttctatctctctccaacatcctctcccacactttgtactgtgcccttcaggaattccactgccaggggttacttaagcattccatgtagtttctagttaccttcttattctaagcctaaattcttcctacttcttttacactcgccgattcttctccagcgaactccctcttacccttcaaggttctgcatacttggcaggtgacactggtgaaaactaaatttttaaaaaaggttctgcataaggatctccataggcaagacttccctaaggtgcatatatagacacactgtaatgtttattgtgcttcactactgagttgcctttttaaagctaacttaaaccttctaaagggatcttatctcaaaactcagagcatctattttcctctattttaaattctccctctgaaatattctgaatgcttttttaaaggatgtggtgtgtgtgtgtgtgtgtgtgtgtgtgtgtttaaacttaatgtctttccctagccgttctttattaccacaggagctctgggatatcaaataatatttcttaaacctttatcccttttgattgtatagtaattatttattcaaatcagataccaattaaacataattagattgatttcttcacagaatacaaaataaacagaatcatgaaattaagttgttaatgatttgaaggcctccttttctaagacattcatttacaactcttaaaaaagtactgactttaaataaaaatccaaagaatatataattatggaagaggagaaattccattccacagctaagtattattttatttcctttttttagtttcgatactccgattggcaggataaattgtttatgtcgctgggtaccatcatggccatagctcacggatcaggtctccccctcatgatgatagtatttggagagatgactgacaaatttgttgatactgcaggaaacttctcctttccaggtaagcatttctttaccttttaaaaaaatccatagcatttctttaactgggtaaaaatttgggagttgattttgctattcattaccatcttatttaatgatttggatatctggttgactccagatatcatagaaggagttgtaaaattctcagaaaattgttcaaatactcgtttaaatttaaagaaatatgtgtattgttgtttgacttttaatacaggtgaaggaaatacacaggaagcttctaaataaagtaaggaagtcactctacttgagaacagtggaaatgtaatgagagtatctctatgcagtatccatcccattagtaattgctgatgagtttcaaagcacatcagttaaacatggcagtacttcttagctgtgtttagcttgtagatctgtttctgggttttcttttcttctctccccttcaccttaaaaaaaattatacccattttctgtctctaattttggatcaaccagattgactggaacttgagatggcatttcactaaagagtgaatggattcaatacgtcccttggaactcacccaaaggactatgattactgaagagccaagtgtcccataagttaatgttatcaatacgagaggccctgacaatagcattacagtggggctccaatagacatggttattttcatagtaacgaaattcaacatagaaaggaaaattttcatgctttctaccaagcctgaagcctcttttctctaagagaccttgtgggcactgggctggagaagactgagtgaagctttactgttgcacagatggtagaatattttcaaaacactggtaaaggaaaggcagctttcttagcaaagatatgtaagaaaaattactctatcatttagacagcattgaataagaatttacagtgttcactgactgagaactacatatttagttactattgtaggccttacgtgtaatttcctaagagaataggattgtttaattaatacagcagaatatgtttacataaatattgataaatattaatgccttttaaaaatccagtaaaagcatcctttgaatatttaaagcaaactcctataaaagtttatttatttattctcaagtaatatagtttctgaaaaaaacctctttataataaaaataacaataatggtgatttttcattgtgcttactatgtgctaggtcctatgctgagcactttacatacattattccactttaccctcacaagaacaatactacacagtaggtaatgttatcttctgtgatagatggcaaaaccaaggcttggagagggcaaataacttttccatagttacactgctggtctttctgccatccaaaccatgcttattatcatatatagtatagtgtcaatatagatgattcggaaaaaaaagtgcttgggaaagttttaaatggattgcttatttgtgactagtgaccaaaactttaacataaacattgtgaagttgtggtaggacagatagtttaaaaagtctttaaagaggctgggtgttggtggttcacacctgtaatcccagcactttgggaggccaaggtggtggcaattaagttttgagtttgggagttcgagaccagcctgaccattgtggagaaaccccatctctactaaaaatacaaaattagccaggcatggtggctcatgcctgtaatcccagctactctggaggctgaggcagaggaatcgcttgaacccagggggcggaggttgccattgcactacagcctgggcaacaagagcaaaactccgtctcaagaaaaaaaaagtctttaaagaaatgggagaggtaggaattttctattgtgtatttgttttcctagaaaatctacagatctacaacatattaattttgtatacatatagagcaggatgatgcccatattaagacacctcagttaaaaatctatttcttatggaatactacacacctataaaaaatacgaaatcaccagctacttgggaagctgaggctggagagttgcttgaacccaggaggtggaggttgtagtgagccgagatggtgccactgcactccagcctgggcgacagtgcaagaccttgtctcaaaataaataaataaataaataaataaataaataaataaataaatacaaaattgtgtcctttccagcaacatggatacagctggaggcaattatcctaagcaaattaacacaagaatagaaaaccaaatactgcatattctcacttataagtgggagctaagcattgggtaacacattgacataaagatgagaacaatagacactgagatctactagagaggggagggagggcagcaagtgttgaaaaaccaaatactaggtattatgctcactacctgggtgacaggatcattcatatcccaaacctcagcatcacacagtatccccatgtaacagaactgcacatataccccctgaatctaaaataaaaattgaaattattttaaaaagaaaagaaaaaagaaatgcagactcccaggccacatctggacccactgaattagcaatggtattttagcaagacatttccttccccacagtgaatcagagatgcatttatgcacattaatactcaagggtctattaaatggtctgaccttccagatgcggagctgggtttctcacccatccctttagtagcaggacaatgactgtataggaacttacaccagctgcctttgatttccatcttatttcatctggaaaaaaaaaatcaaagaaactacaaagacgtttctccaactcctgaattgtcagcaccatatctccactgcccctactttgaaattatctttgggtttcacatttcctgatcttcaaaccataaagcaccatttattagagcaccaatggaatatttttgtggaataagacccaactttatctgttcatgtatggtctagcacctcttttcaagtgtcgcagatattatctcttggtgactcacattagccttccagcgaagcacttatatgtccataaaatatctgtgaaataatgtagagaaactgatgattacttctagggagagaaagtgagtggctttgaaaatgggtgggtgtgatgtctccctgtattctcgcttgtaactgttgacgtatacacctttaccaagaaaaaataaatttaaagtaaaaaaaaaattttaaatggcttctacacagggttaaaaaaatcagattaacagatgaatggaaaaataagatatggtagatacatacaatggaatattattcagccttttgaagggaaataacttctgacatatgctatgtcatagatgaaccttgaggacatgacgctaaatgaaatgagccactcaaaaaaagataaatactgttcgattctacttttatgaggtatctagagtaaaattcataagaacgcaagtggaatggtggttaataggggttgtggggaggagcagtggggagctgttgtttaatgggtatagaatttcaattttgcaagttgaaaaagttctggaggttggctggacaacagtgtgaatatacttaacagtactgaactgtacacttaaaaatagttaacatggtaaactttatgtaaggtattttatcacaattaaaatttttaaagtcagattaaagcaatgcaattcacttatcacacatcatttctcttttggaccaattttattagttctgtttttgtttttactaataccagaataattcccaactttcttatttggagcagtttgcttttttttttttttttaacttgtgcctaattatgaaactgaatggctttaagctggacatggcagagaggtgccaaattcaaggtctctctggggaatggcacaagcaagtcacttacagaactgtggttgacacagagataaactcgcgagagttgccaactttgttttggtagcctccgaattataaacactcctgttatgatgcttggtaccctgtagccatgtttctcattaggcttactggatgctatggagtatttagatggaaagttcctcaaatgttatgaatttccagcatccactctttggtcgtttgtaaaaataatattctcatacctcttagaagacaatgaaatctttaaaggatactcactctaaatccagactgcttattgatgtgttgagagttgtagagtttaacaaaaatcatgggggttgggaacagatagagtgaggtacttagctgaggttccagcttatctcttagagatgtttacttagtctattctttagaattgttggatgcttggacaaccagacttaataggagccaaatgagaaaggcatgttagaagaaaaaaaggttcatattacaagagggtctgacaatgacttattgtgagcaaagctcgtccttgtcaacagaataaagccactccatgacagggttgttccctcacaatgagtcagttgtgcagaaagtatgcacacaacattctgcatccaaaacattaaggacggagttggagaaaacagtttttctgcagagtgtcaaggacttgatatcttttatgctgtctctgtgactataatagtctagaaaattctgcgggaaaatagctgcaccctgattgtccttgcattgcctcttgtttgaggggaaaaatgccattttgagcccccaagatatcttcataactgtccatagtgcctagggtgcctgaacaaacaccagctctttattttataatgaatagttctatgtgttaaaagaagtcctaggcaacatttaaaaataactaaaagtacataattggattgtttgtaacacaaagaaaggagagatgcttgaggtgatggatacctctctttcttcccctttgaaaaaaaaagaagtcttgggcagaatccgggaaggcagacattgatttactttgagactcaaaagtgaaaatgaagactatgtttccctatctaatccttaatgtatacactgcttattcagacccttcacccataagctgtgtgaccatgagcaagtctcttaacctctataatccttactgttctcatctttgagaggtaagcatcaatttactgatagaattaagtgagatgatttgtgtaaagtgtctggaacatagtaaatgatcaataaatattgggacaaactagctataagaacttggaaatgaaacaacccactctgtctcttcatctgtaaaatggataggttatataggtactctctaaaatgaacaggcagcttcaggagttccccagttccttactacgggaggcattcaggtggactggggtgtaagttctccatcctggcatattagaatcaaccagggtactttttcttttttgagacagggtcttgctctgttgcccaggctagagtgcagtgaagtgatcatagctcactccagccttgagctcctgggctcaagtaatcctcctgcttcagtctcctgtgtagctgggactacaggcacctgccaccatgcccggccaactttttgtaaaggtggatttcaccacgttgcccaggctggtctcaaactcctggcctcaagtgatcctcccgcctcagcctcccaaagtgctgtaattataggtgtgagccaccgggcctggcggggggcactttataaaaatgtgatgctctggactcaaccagagattctggctgcattgggcttgagtggagcctgaacatctgtaattcttaagctccccatgtaattctaatgcacagacagcgttaagtaccaccaagccaaatgaccatgtagatatcgtttatgagactgaagcagaataggtagcatctgacaagaccaggagtaggctcttttcagatctagcaggccatgacttttcaggcaacacaccaacatatgtttagttcacctttgtcccaggcagcagaaactctgagtttccccggggactctggagctcctcaggttactaacccagcactagatttccattcttgagactctgagaaaggagcgggtccaatctggaacgctcatagattctttcctaggagggagagtcaatttgagttggtatctgtgttagtccattttgtgttgctaggaaggaatacctgagactgggtaatttatgaagaaaatatgtttatttggctcatggttcagcaggctgtaaaagtatggtacccacatctgtttggggcttctggcaaagcctcaggaagcttttactcagtgagggaaggtgaatggggagcagatgtgtcacatggagagagagggagcaggagggagaggccaggctctctttaacaaccagctgtcacatgaactgagtgagaactcgctcattatctcagggagggcaccaagccattcatgtgggatctgtccccttgacccaaacacctcccatcaggccccacctccaacactgaggatcacatttcaacgtgagatttggagggaacaaatatccaaaccatatcagtatccttattgagagaatttaaaagtttgaggtaggtgttgaaagagaggaaaaacttatttaagatttcacccaatttttcagttcagggaaataaaaaaaccacaatgatttttacaaatgccacagctttagaatagcttgcctgcctctagttccaaatactcttccaatttgccctatttaaaacttcaggatggaaatgaacacacagaaaggaactgataagatgaaaagtaaaatagggtatgaatcttcaaggttctgatagcttataaagagctagattaataatcggaaatttcactgtgaacatcagtagaaattataatcctgggggaaagatgatgctgcagttggggccagatgcctggtaattgatcctgacagtagtttgagttttaaataagtttcaaccttatctttctttggaaaaagataaggaggatacacagcaccacgaaaacacgaaaacacgacccctgggctatttacacatggcaaaggaacaaagagaccaatttctctcctaggaccatggaaaatgagaaatatgtaccctgatgtgttttctcaacaatgctgtggtgatattttatcctattattttgtgaatgcagtagatgtaggctgtttcttattttttcatttgtcttttctaaaaaataaaaataagtcattgtcacatgaataaatcagtatagtatagtgttacgagcataggccaaattgcctgggctgactttcagctctgccacttactagctgtatgacattgagtaagttactttatttatctgtgcctccatttcctattctataaaatggggtttgtgaaatagtctcacctcataagataattaaatgaattaacacacctaaagtattcagagcagtgcctggtatttaataaatgctcaataaacattagctattattaaaacatggaaatcaggaaagatacattgacattttatcaaattagctcaaattaatagacaatagatttctttccaattaatactgcttcaaaaaatactagaatacagcagtgctggtaaacaagaggtggaatgcaggatgttcactaattgccagtgatcactgacatgcctttgagcaactaagttatcttccctgtctagtttttcctcctttgcgatggatgtaacttagcctttcccttacttatgtcatatgagacatgtaaagaaaaaacacacagatataaaaataaaatttattgaagttctataaagtgctttgagccaccaaaaaaaaaaaatgcctcttaaatcctgtgttttctattttaaatatttcttattccctcctctgtcttctgtgtgttttgtggcttccttgtctcttcagtggctcctctgtgcctccttagaaggctgctttgctaaaggctgagaccgccaggatgggggaaagacctgggagggcttatcttcccctttcttggcccttaatgtccagtacctaaacccttgggctctttacttgagtaaagtgaaaagaatgcacttaagtgtgcaaagaaaagtgttttttaaagagaaacttaacaatagcatcttctagctttcatacatttaaattattaacagatttttaaaaacctggcaatgcctattaatagtttgatcttttaacatgttttattttattttttaatttagtgaacttttccttgtcgctgctaaatccaggcaaaattctggaagaagaaatgactaggtaactcatatatatggtctacttttttaaagtttcatttgaagataatttccaattacagagttataagaatatacaaataacgtgtactctttacccagattcacctattattatcatttttgctcccaaatcccaatttaaagtaagatgcacacatcatggccctttactgcagtatgactcctaagaataaggatattttcttacataatcacagtacagctattagcttcagtaaatttcagtacttttatctaatataacatctatattccaattttgtcatttgatccaataatgtcatttatggcattttctcctccttctagtttctcaatagaaatctctaaagcctgtaagcatgatgtttgtatgtctgcatagcagtgttgctgattgtaacgagtgctgtctgtatgctaaaaggcctgaaaggtgtctatctggaagcagtttataaaattagataataaaaatttgaaagtattgatatgtacttattattttttaaaatactaactttctactaatttggtaaaacattccaaattcgtttgaattcatgacattttatcatatctttttttaaaatatttcaaattctgacaaataggaacaaagttttttggttctttttataaagaatgtggaaaaatcaatatggaaagggcgatttcacatgttcaatctgcttattactatatttgcaatatgtaaatagtagtgaacttttcagtacaataagatatacaagtctagaatataattattaaagaggagttaaattgtatccacaagttatcaatatcagttaaaaacaaatcattaacttttttgcagttaacaacaaaaatttatccattttctttggctaacagttcaagtaaatagatttgccatcatggagctcatcactttataatttaaaaaaagaaaaatgtaatgtctgtttgttataatgtcctatacagtttttgttttaagtttagtaaattgattaatttccagttctgaaaatttctcctgaaagagatgaataaaggatggtagggtgggggtggtggctcatgctataatcccagcactttgggaggcggaggtgagcagatcacttgaggtcaggagttcgagaccagcctggccaacatggtgaaaccccatctccactaaaaatacaaaaattagccaggtatggtggtgcatgcctgtaatcccagctactcgggaggctgaggcaggagaatcacttgaatccaggaggcggaggttgcagtgagctgagatggtgccactgcactccagcctgggtgacagagtgagactcagtttcagaaaagaaaagaaaagaaaaaagaaaagagaaggtatttaatagagcctttctcttttttttcagatatgcatattactactcaggattgggtgctggagttcttgttgctgcctatatacaagtttcattttggactttggcagctggtcgacagatcaggaaaattaggcagaagttttttcatgctattctacgacaggaaataggatggtttgacatcaacgacaccactgaactcaatacgcggctaacagagtaggtacattgttaatgtcacactttcatatagaaattaattactgtgtgaaaatatgtcaaggaaagattttaaatgaaaaatgttactagattgagcatctgatctatattagaaatcgatcatctggcagccatgtctagcagcatctatagcctatgccattgcatgttggctttcccccaaggtgcatagtaggtttatttgaggactgaattcacatcttatacctgtttatttctcatggaactttctactgcaggacgtgacaggtgctagactgtcagtaaagatggttgaatcaatgaatagatgattgaattaatttacaaagagacttgctttagtaattgtcaactcttcacttattcaacaaatatttgagggtgtttcatgtgcgaagtaccattctgtgtgttcgtaatatatcagtgaacaaagcacagatctctgtccttttggtgcttacattccagtagagggagatagatgataaactttcctgactgggagtcctggcaaaggcatcctgagcaaataagtcaaaaaaaaaaaaaaaaaaaagggaaaagcaagacatttagggccttgtaaacctccacaaagacttcaagacttcagctttcacccagtgaaatggcagccgctggaagtttctgagctgaggagtagcatggtcagacttgcattttcaaagcatcccactggctgctgtgttgagaatagacttggttgggaatagggacaagagtagaagcaaagatctcttccctattacttccctataagaagaaatgcagtaatacttccctactactgttgcttattattgttgcaatgttcttcttaattcttgcttttaaacagatacatttttatgctcaaaatgttaatgcttctctcataggattgactcatttaatagtatcaacttaatgatactaacttattagaagcattgatcaatcctgaatttcttcctttgtgcggtgtttaggtggggaagatgttattcaagaggctaagactctgaaagaggcttgcagtcagtgaacaaattttacttgtctatgtgtttgttggatgtctacttcatctttctaactgaaacctcctgcctgtaaccacttaggtgtgatcttttttagtgacatctccaaaatcagtgaaggaattggtgacaaggttggaatgttctttcaagcagtagccacgttttttgcaggattcatagtgggattcatcagaggatggaagctcacccttgtgataatggccatcagccctattctaggactctctgcagccgtttgggcaaaggtatgtgaaagctgggcctttttatgtgtgttaacccctgcacacagtaatctttaatatgcagaagtctcgtacttgtacctgttcaggtctacattaaatgtcagttgaaactacatccagtaacatggtgttaatatgatgctttcataaggaaattaatttttaacataattcaaaatgtcacaggctgggtgtggtgactcattcctgtatcccagcactttgggaggccaaggtacataaatcacttgaggtcaggagttccagaccagcctggacaacatggcaaaactctgtctctactaaaaatatgaaaaactagccttgcgtggtggtgcatgactgtaatcccagctacttgggaggctgagacaggagaatcgctgaactcaggaggtggaggtcgcagtgagcccagatcatgccacttcactccagcttgggtgacagagtaagacttcatctcaaaaaaaaaaaaaattcacagttcttacttcgattacccttagttaaggaagtgcaactttaaaatataacatttccctcaaattattgcatgaacataaaaattttaaatagagtttgtatttgttctatttgttttaatcattacctgtgatggttaagtggcactctgccagttttgcctggcaataaaatacacaaaatgtattctactttagccaacacttcagagttgagaaattttactggcaatttttgctcatcctgacgttgatgatttacacagtgaactacctgtatctcttttgttttgattcttcctttgcttttctcctgaaacatcttgtttggctatcttattattcagcagaatgcccatgaggaggtctggaagtattgtttttatagtaattaaaaattgtgacacaagtccaaagtgggtggatcacgaggtcaggagattgagaccatcctggctaacacagtgaaaccctgtctctactaaaaatacaaataattagccaggcgtggtggtgtgcacttgtagtcccagctactcgggaggctgaggcagaagaatcacttgaaactgggaggcagaggttacagtgagccgagatcgtgccactgcactccagtctgggcaacagagtgagaccccgtctcaaaaaaaaaaaaaaaaaaaattgtgacacaataaagttaagaatggtaaattctttcaaagcagtaaagttttattttattttaccttacaactaacaaagaaaaacagtagatgtggaacttgacagtgttcccaagagtgctatttagagaattatgtgtggattttcttttttcctgagtactcttggggagcctatcaccagggtgggtcagatatagcctttgagggatgtggacgcagccattggatccagaacactggcatttgctacatgactttaatatttgttaaaggagagggtttgggaagaaaaagtaggttaaagggttgaccagagtgcctttaaacttttctccctatacaaaagtgatcactgtttcttttctgtccagatactctcggcatttagtgacaaagaactagctgcttatgcaaaagcaggcgccgtggcagaagaggctctgggggccatcaggactgtgatagctttcgggggccagaacaaagagctggaaaggtcaggaaggttctttagccactggtttaaggaatgtgtttttacattttgttgcttcttctttgtggtatgtgttttttaccttccctttcctaatattaacccttctcgcataaattataagcaccctttactgatggctatagttgaatgtcagactctaaagcaagattcttaatcatttatgttccatggactcttttggctatgtgataatacaaatggactcccttgtttttaaatgcataaaccaaaatatgctagccctttgggaagccaaggcaggagggtagctggaatccaggagctcaagaccagcctgggcaatgtagtaagaccctggctctacaattttttttttttttaataagctgagtgtggtggtgtgcacctgtggtcccagctactcaggaggctgaggcaggagaatcccttgagcccagaatgtcaagggtgcagtgagctgaactccagcctggatgatagagtgagcctctatcacaaaaaaagagtaaaaattttttaaaaaccaaaaaataaataaataaaagccccaaaaaacaaaataagtagggttacaaaggaaaataattatattaaaaatacttatcaaaatattttttattttattttactccttaatgactatgaactggaatatagaagagaaaaacctgagaaaacatcgacttcctagttatagcccagaattctttgtagggccttgtgggtcctccataacaatgaggcagggcttcccacccaggcctctggcattcaactttaatgatccaggataagcctggaaaattgaccagtatctggaggcatgttgcaaactcttctctgaaaaaattatcaaggcatgattgacatatgaaaagctgtgtatacatctttagtgtgtatatctcaatgagtttggggataagaatacacctatgaaaaaggctattctgctctacttaaatgaaaataattacttagggttttatttaaataacaatatcccctactgtagttgaagtatgattccatataaagtattttctttggctattctatgggactcttgatactcacaactcttggatataaaaattctctggaaattctctagcattaaaaacaaagtttcccttattccccccatttaattttctacttttctattccttaatccctcttcaaagccaacatgtttctgatcctctaacctcttccttttttctctctcactgctgcttcctgtacataatagtccacacagaccacactaaccctcagttggacctcaggatgtcagtgtaatctgtgccgctccattagccccggtaagcgagccacctaagcaaaggtaattacagtgtgtccgctgctgtcactggagctgtgtgtcacactgggcagatgcaagtcttcctgccacgccttgaggctcagccacacaggagaaatcacagcgctagctgtggcctgctggctacccccagagatgcagctgtgctctatgaatgcagcccccaaccagaggaaagcaccctgaagacctgggtgctttacgcaataaaaaagacaaaccttctgatggcagaatatgttttttaaaagactaatgaattctcatgttttatttggttcaacactaaaactggtgttgctgtgttttgttttttgtttttttttgtcacaaagaaaaatatcctagtttgtgtgatattttcccctcgaagtgtcattgcatacccattggatttttctttaaatttcagggagcccaaattaaattttacataccctctgggtctagtatgaaaaagtagatttgatttaacttgatgaaaaaaaattgtaatttaacagaatcattctagatattttaaactttatatcaaatgccagcagccagtaataatgcatttgaattatgattcaaagatatgatagtaatagaatgagcaaaactcaggaagagataaaagttgaacacaatgatactaatataatagtaagagaaatgatcaggcttgctaactatgaaccagctactgtactactttctacaattatctaccaacctcacaattatcttgcaaattaggcattattaaatccatttttcatatatgaaactaaagtctggaaaaattgaataagaactcatattccataagtagtgactaccttataacctgtatctagcttgacagatgaaggtcagcctgatttttaaaaaagtcaaagagagaagcctatgtttatgtacaacaacatgtaaaattttcatccctcacccagtggacaatagagggacgattttcttttctccagagaagagacattgaccagagttaagaatctaactgtttatgagttccagtgacatttacaatcaattctggtttggcttggtttctctcattccctcttaaccctgacttgtgatattgccgtgaaggtgatggagaagctcttccatatcccagggtgagccctcaattctggaataaccacaggaatgttggttggcttggaatggatgaagggaaatggaaccgggccagtaaagagaaggcttggatctgttctaggcctggctgatcctgaattagttcaattcccaaagatctgggtctcaccatgggttcattaccttgactgactttgttacttaaacctccaactatataggagccgagtgtgactcggactatggattgttattcttaattataatgttttccctctcatttttctggtaggtatcagaaacatttagaaaatgccaaagagattggaattaaaaaagctatttcagcaaacatttccatgggtattgccttcctgttaatatatgcatcatatgcactggccttctggtatggatccactctagtcatatcaaaagaatatactattggaaatgcaatgacagtaagtagttctcctaacatttatgaagaatatgaaaatcttatttctccatctaccttctcttttctttgatatcgctcctttttgaaagatgaacatgattataggtttttgtttttggtgaatctttccactgtccagtgggcagagctgactttctagtatatacaagtcataattatgagtgtggataagaaaatagcatgtggttagaccatttgtgaaacatatacaatgtataaaaggaaataaaaatgggatgaatttaggaataaacaaatatggatgggagccatcctccctctgccgttgagttttattgtataagaaagtaagcatcattattacagaataggtcattgcacaagaaaatgttacatttatatcacttaaaacaatcagctctctgaaatacaagaagagatgttatgttagtttgtttttatttatcaaaatgaagatagcttcattttatgattgttaaaataatatatactaattttacaaaggattaggatacagaatttttaaaattaaaattacttacaatctaataatttatattctcttgatgataatttttggcatatatcttccaggtcattttctatatatatacacattgttttctttcaaaactgggatcatactatgtatatctttttgtaaccacatttatgaactaccaatattttgtgaccatcttttcatgtcagagactcagaacaatatgtaactatttaaatagaaatcttttaacatctgtacttccctatcttgctaaaatgaggatactgagcataatttggccctttgatgatgacttggggtcattatgaaagtgaatattttcagaatgctttatgcagtggtatcttcagacttcattgagaggttgtgggtgttcgacttggtgagccctcattaatgctgagtctaatttttctcacttccatcttctctctggcagtcggtttggaagcttgctaccctttcttcacttcctcatttactattgatgttttatgaagaagggaggttgaatcctgacaaccgttcacctttggtgatgagtttgtcctctatggccttaatttcctcatttgtagtatgtggataatgacacctatccggtagggctgagattgctatccccagagggagcccaagcaaagccctctgcatagagggcagggactctattgcattaaccttatggcaactattttggtcaacattatttttctttcttactggtccttatctgtattgcagatgggggatagatatttaactgatatttgagttatgggtaacatgaagtgttgctgtgttttgagaaaagccaaattatatgtagaagttttaccatgccctgagagaaaaaaataatttatcttcacttatgtttttctcagttaagttatgctaataatctggattcctgaagctgtattctgagcttctttatatcaattcattttcctagtgaaaaaatactgtgaagggaaatgtgttaagtgttgtatgctacagtacagaataactgtgtaaaggaattgctaaccagtgcacactggagtgattttatgttttatgatgtgcaaactgttactttttatgttaaaaatctttaaaaatatatgtgacatggtgctttttaggagcattacatagggccaaaatctgccatgttttatattgaaccgtctatgtaattccatgcatagttagagaaaatcatataggatggaataataatactgactgaaaatgtttctttctggtggcatttgtgagtgagtcaatgaaataggtttgaaaaatctttttaactctgtatgtattcaggagaacaataggtagtttgagaaaatagacccactcaggcaataaaatgctatattagccttgcaaatgttgctcttccacaaaaaaaaaaggaaaggataaacctaaacttaatcctttatgtactatgttacatatacatcacattttagataataatgaatgccagaatgtgacttaaacttttcctcatgttattttgctcaggtttttttttcaatcctaattggagctttcagtgttggccaggctgccccatgtattgatgcttttgccaatgcaagaggagcagcatatgtgatctttgatattattgataatgtaagtcatttattattttagtgccaaaagaagtctttgagcttgtataattaaatctggctttagtttgcatatttttgaatcaactacattgaataagttgtactgactaaagtgacatttaattatatgaaatgaatgacctgttagtaataaatgaaagaaaatacctcttattaatattttttaaatgtatctttagataatataataatactgatctcattttggaaaaggacatctgcactagtgcagagcaaagacgtttctcttcctagtttttatctttttcactttcatgttgtagccagactgagaatcttatgatttctatatgggatggggggtagataaattatcggtgggaccaaaattgacagtatattttgctgtgggttccccctctccaaaaaattatcactgcatgtttggtatgattttaaataaactacattaaataaactgactacagtgaaaaagaaaaagttttgacgtaaaaaagtaagtcactgcattcaaatattgcaaggtagctaagtgaaatttgatcatttaatctaagcaatttcctttttcattgatccaagtcgtgagaaaagtgctcagtttctgattgtattaaaagtttacattatttctaaataactgctataatcaaccattcaatcttctcaattcaatctattacatttattatttaggaatgagctaattttcactaaatgctgaaatacttggctataatatatatcaattatagcatatttttgttattgcacttgtataaatatgcatatctgaccatttagaaaatttatgaggatatgccaaaaacttaaagggaaatattatatgaaatgagatgaatatctcttacgtacttttcaggaaaacactattttctgaaaaggagtatttctttaaacagcacacatacatatacacacaatcttcatcttgggtttttcttatgtaaaggggattgtgacattccaggtcctatttttggaatttgctgaatcatattccttaaaaatgcaacttgtttgtgctatgatggaatagtcattacattttgttttatttagaatcctaaaattgacagtttttcagagagaggacacaaaccagacagcatcaaagggaatttggagttcaatgatgttcacttttcttacccttctcgagctaacgtcaaggtactgtaagtaatatttataggaattcctaactgaggttgattgttgaatcattttaaagaataaagtctctattattttgatacttatgtgccttttcctttgggggttatattcccttatttgatacttttttttcaaatttcaaactgaatcgaattattcccattttagggctttgttgtgaagtgtgttcttttttctcattttccttacagatcttgaagggcctcaacctgaaggtgcagagtgggcagacggtggccctggttggaagtagtggctgtgggaagagcacaacggtccagctgatacagaggctctatgaccctgatgagggcacagtaagtgggaagaaccaagctttccagagtgggaagctggatacaaattggccctttgaaattggtttttcagtaacaaatttgcgtgtgaatccagttttggtaaaaagcctacaaaatggcaatgccgatggataatgccttcacacccttgggctggtttcacaaatgcattaaataaaagtcataaaagctgtggaagctggacaaagctctcctctgttctgactaagctttcataacacattaaattactgcaaagcagtctacaaaccactgagaggattactttcaatgagttagagtttggtcaaacatactccatatagcaattgttgggaacaattgatgacaattagggtcaccagatattttaggacagcaattaaattcatccaagacagttgagttttcttaaacttaggaatatctaagggggaaagtgggatggtctcttaagaaactagtctcttgagaaaattctagaaacacagagacagtaatagcctagggtatgtttttttgccatttaaaagttttgctataaatttgaatttacagaaaattgtaactagagaactcacagatccttcacccagatttagattgtttatattttgacccacttgctttatcatcttctctttctccgtgtgtgtgtgtatgtgtgtgtttatgtgtgtgtgtgtgtattatgtatacccttatacttcagaatacattcctaaaaaggacattctcttagattaccacaaaacaatgattaaaaatcagtaaatttaacattaatgcaatatacaagtccacgagctatattcagaatttcctcagttgtcccaattttagagcattgagtttatctgatattaaaatggattataattcaataattgtgaaaacagaagattataaggtaaaaagtaaaaataatggcatgccaaaaccaaaaatcataaaaaggcattgggacagaacagagatctccagaattaatacataattttctacaatacatggaactatttatttaatttaataaaattaatattattggaaaaatctgatattactatgggggaacataggcccattctcatttactaaagtaaactctgggttggttcaagtgtaaatattttctttattttttaaaaagaacctggtaaaataccaaccattgagaattaaattattattgaaacaactgacatttttaaagaaagcatatgttaacagaaaaaaaagatcttcagaaattctataactcagagatattcactgttaacatcatgatttaacaattttcttaccactgaaataatagaaaaaaatgcccagtggcataattgattaattcagttgttccttaagcctctttccaataaaaaccaataaaactatgatgaaagaaagcaataaaggcctgacatggtggctaatgcttgtgatctcagcactttgggagattgaggtgggaggttcacttgaggccaggagtttgagatcatcctgggcaactaatgagaatctgtctctacaaaatattttttaaaatagccaggcctggtggtgtgcacccatagtcctagctacttgggaggctgaggcaggaggatcacttgagcccaggagttcaaggctgcagtgagctattgttgcaccaatggttgcaccactatgctcctccaaagcctgagtgacagaatgaaactctgtctctaaatttaaaaaaaaaaaaggacaaaaataatgaattggaacaaaagatttattatatatggaaaaagtattatatttattattagagaagttaatatgaatatatgaaggtaaccctgctcattatgaacatgcgactctctggaatatataaagatttgtaaaaagtttcaagaaatggtcaactttataaatgtatacaaatgaaaacagatataagctatcacctcatacctattaattggaagaaaacagattaaaatgataaaacccagtgctagtaaattacaatgaaacagatatatttatatattcctgttgacaatgtaagttattaaaatgttttaagataattatttagccttttattaacaagcaacaaatgcccagcaaatccagtcattgtacatgtaagcaattgttgtcaagggagaaaaaataaatcataatcttcaacttagtaattctctactcttgcaataaatattgaagtaagtcaaatatttaagaagaaaggaagtaaattaaagcatgtaaaaaatagcaaaacatgggccaggcgcagtggctcatgcctgtaatcctgtaatcccagcactttgggaggccaaggcgggcggtcacgaggtcaggagatcaagatcatcctggctaacatggtgaaacaccgtctctactaaaaatacagaaaattagccgggcatggtggtgggtgcctgtagtcccagctactctcgaggctgaggcaggagaacagtgtgaacccgggaggtggagcttgcagtgagtggagatgggccactgcactccagcctgggcgacagagcgagactccatttcaaaaaaaaagcagaacaccataagctatcaaaattatatgtagaccaggaaggtaagtgtgcatttttatttaaatttaatattggaacataaaaataatggtatgccaaaaacataaaacccaaaattgtttatggcaaataatccttccacgaaaaaactgtatatatgaaaataaatatcaggagagagcataagctttttatttttgttcttgcatattgctgtttatttctaattattatttctaaacactgaaccaagttaaatattaggtaggatgtttttcatgaatggtcctgatacttcagctattaaatggttaaatacttaataggaaatatttctttctttcagattaacattgatgggcaggatattaggaactttaatgtaaactatctgagggaaatcattggtgtggtgagtcaggagccggtgctgttttccaccacaattgctgaaaatatttgttatggccgtggaaatgtaaccatggatgagataaagaaagctgtcaaagaggccaacgcctatgagtttatcatgaaattaccacaggtaaagcctctgataaagtagttgtccttgaaattagaatttcacctcataggactgagtttattcttcaaaggtttagctaataatgtttgagatgcaagattgtccaactttgctagataagtcccctgaatgactcagttaggggttaaaggattatagcatggtagatgattaatataaaattttatacagcatgtgtcagttttttataattcagaattcatttatcttatcatactttatgatacattaaaatagttaagacaaagctccatgttgtctttatgtagttctatagaattcctagcctttttaaatttaagttacttcaagagctgatccatgttttctgtgttagaaatttgacaccctggttggagagagaggggcccagctgagtggtgggcagaagcagaggatcgccattgcacgtgccctggttcgcaaccccaagatccttctgctggatgaggccacgtcagcattggacacagaaagtgaagctgaggtacaggcagctctggataaggtcagtagactctaaaaagctgaaggaccaccacattgaaacctattgaagattcttgccagtgcttccggagtctgggctgagaaacagaaacatagcaaatggagctacctcatggagctgtattgatttctcctttctgtcaggttacattgtcttcagagacaggtgaagggtactgacttgttttgaccatggtgcagtgagcccagatccaggtctttataacaagccatttagctttgtttatttcttgcacatgggctattgcaagactacttttgaccaaaagtagtcatgttaaaatatatatatttttaaatccggttacccagacactggtccagctgaaaactaattcagaatactcaccctattttgtaggcagtgacatcatctttatctattcatgtaggtgaccaggtgcttttctggaaataaagttcaactctgtacttgtctaagcatataaataaacaattcattttaagggtgctgagttcatctgtccagctcagatatttctaagtctctcattagcatttttactaagctgaagtgtcacaggaaagaccttatcttggtacacttttgggggtaatgctgatgtcatctgtattaacaacacaatgtaaataccagagtcagatgacaccatagaaattagtttcaaacacataaatatcataaatatatttgatttaagacagttcagtaataatatgtgcaagttccttaaggaattctatctgaaccacctcttacaatttaagagacaagctgcacgaaccttattttctcaggaaaatttatatctgaatcctaagttaacctaattcccttttatgctgtaaactgtagttaattaatgcctcatggtttatcagcttaatatcttgactctttttgttgttttttaagacagggtcttgctctgtcacccagcgtggagtgcagtcgtgtgattatggctccctgcagcctccacctcctgggctcaagccatccttccacctcagcctcctgagtagctgggactgcaggtgtgcgccaccacacctagctaatttttgtatttttggtagagatgggtttttgccatgttgcccaggctggtctcaaactcctgagttcaagtgatcatcctgcctcaacctcccaaagtgctaggatttatagatgtgagccactgcacctaaccaatatcttgacttattttatataatttaataatgattaataacacaataataattattccttacaaattcttgcactgaattatactgcttttgtgtatattaaatcatgatattaaggagtcaaaatataatgcatatgagactggtatatggttggttattctgaagttacttaaagcagtacatcataaagtaatacatgcataagttattctaacttaaaaatataattagacattcatgtattggcatagactttttagagtaaagtcgggtagaatgagagatatatttaccaaaaaatcaaaaacaaaaaagagtcctattcagccctggagtctaggttccaatcatttccaggatacagatattcaatatacaatatagttcttgctgtgctaaaagaatagaattattggagatgaccagtatgtattgtttttcataatatgacctctgccagaaaaactgtgatcttgcaagttttagtacgtatttggacaagtcaattcattcaattttagctgtttcttcgtgttctataggatcatagcacactcctcagttgataaccttttttatatttactttaaaaatagctgatgaactactcataattttttaaagtctccaggaaaagccattagcagcttagggtgatggttaagagcacaggctttgatgctaggctgggattggagtcctggctctgttcttttctagctgtgtccttgggcacgttaactaacctctctaagcctgagacatctctgaagtaataggggaagaggggacagaaatagtatcataggattatttaaagaataaccaagatactgcatgtaaagttattagcacatgcctagcacatatgaaacacttgatattgttggctgctgctattattatggtgattagcattaccaggattattattattattattttttggttgctaaattggttacctattgctatgtaagaaactatcttgagtccacgcttaaaacaattcagtgtattggctgagtagatcctctgttctttccacctgagcacatggctgcatttacctggagggctggcttcattaaaatggtccatggtggcctcactcacacgctggctgttggctggccatctcaattctccatgtgacttctcacactcatacaataggctaacctggcttccttatatgaaagtttcagggcagtgtacccagagagcaaagactaatgtgtgaagtgtccagaggattagactccagaactcatcttgttggtcacagcaagtcataggctagcccagatttgaggagataacagactgtgcctcttaatgggtgagcagtaaaaaatctgtgaccatattgaatcttctaaagcatgccctctgtcacaattatttacatttcttccacatgcaaaagaaggtcacctcttcctcagaccctcaaaatgttcatacagtgatagcatctggctcaaagaccagtatctgaagatctgcatgtggtctaatacagatgagggtcttcattttcagctcatcttgacccacagacctatgaaaaagacaagttatcatcaacacatactctcaacatagagtggcggtgcagggacaggataatcatagcagatactcattcaaaaaggatgagaacagaaagctcatagcagtccttggccatagcaattctgacatgcagccaattaccccactactccagggaaatgggatgtttcttgattaaggcctgattctgctccccaggagtgggttccctagtccattgttctctttagttccagggtcttttaccttccctctaagagggctttcctttttcataagaaatgatctgtatctgcagctgagtggatttctttgcatgtttctgcccatagaaatttggggcccttttcattttgtatttttttcagtctcttttagactaagctgaaggactgtcttaaagactttgtgagtttacttagaatctagctgtcatttactcaagccccagaagttatgcctatatattttattttgagacaggctcctctcttctttgggctgcaagtgaacctgccatcagaaaactcttaaatagtttttaaggctttttttttttttgtagctgaaagtgtccactaggctctgcctaaaatctttcagagatttttgctaaaaatcttacacctacacactctgatttttgccctaattttattggatgactaacaacttcattttccaactgagtactggggtctgctttattgtcttaaattctccttgtaaccaagtagctcattctttagctgatcattctcttcccaaacctcattgtacacagctaggggaatccacttgtctctcctatagtctgtctagagatgtctgaaatctcctcagccagatgtacaggttcattaagtaaaatgtctttcttccaagtcactgcaggaaatatttttgtcaaattttccaaggttacataatgaaggtactccttttctatcctctaatagcaatttctttactcttgtttcagtctccactaacaatattatcaccttcctttcaaccaccacctaccactcaatcccaaagccaatgtcacatgttttaggtttttggttacagcagcataccaatctaattactaatttctgtatcagttgttttaagccaagaatttagtgacttaaaatacaacttttattgcccacaaatttgtgggttggtaaagtggtttttctgttggttttgcctagtcttatttcagctcagggtcacctgggctggaatattcaaagtggcctcactcatgtgcctggcagttggggatggctgttgcctaaggcaggttgcttttcctccctgaagccagttatccttcaggaggctagagaaacttcctttcactgcggttccagggtaacatccgaagatggcaaacagacgagctgtgtgagatcccttgaggcctgggctccagaaattgtagaaatcaatttctttacattttctttgtcaaaacaagttacagggcctgcccagatatgaggaggcagagaaattggctccacttctgtataggagaagctgcaaagtgtttgtggccatattaatctgccatagttgctatgaaaacagtttataatctgcactaattggctccacactgcaaggtaattatgctaatatttttacagacaataaaccatacctttaaagataaaccctttattactatgtccccaaagaagataccaatcaatcagttagccagtcactctaacttacaatccaactctctttttaatgatgaaaagttgaatttcataaattgtagtcttgcctctgaggaccataaggatgtatcactattatatctactgttatttctactcaattacccatcctggaagaataatatttttattttgtggatcctttatacattgatcaggccttccttgtgtggcaacagcttactgtagttacctacttatttttatgccttctctttcctaggaagaataaaccaccccaggaggcagaattaataaaaagattcatatttgaatctcttcaacagcccagtgccttgcacatagtagaggctaaataaatatttactaaattgactatgatggcccagctcattgagaaaatatgtctacattaaaataattttttttttgagacggagtctcgctctgtctccaggctggagtgcagtggtgtgatcttggctcactgcaacctccgcttcccgggttcaggcaattctcctgcctcagcctcctgagtatctgggactacagtcacatgcaaccacgcccagctaatttctgtatttttagtagagatggggtttccccatgttggccaggatggtctcaatgtcttgatctcgtgattcgcctgcctcggcctcccaaagttctgggattacaggtgtgagccaccgcgcccggccctaaaataaattttaatagtgatgaccatattagcttttgactctacagatagcaactatttgtcaaaataaataaaatgctattaaatataagatcttgaagaaagatataacagcagattttgtattttgactcttttaaagaaaggcaatacagtttcatacctacatgcacactcctgatcatggtgttatcatagaagaacaggaaaagaaacaaaatggtggccaggtgtggtggctcacgcctgtaatcccacaactttgggatgctgaggctggcggatcacgaggtcaggagattgagaccatcctggccaacatggtgaaaccctgtctctattaaaatccaaaaaaaaaaaaaaaaaaaaattagccaggtgtggtggtgggcacttgtagtcccagctactggggaagctgaggcagggtaatcgcttgatcccaggaggtggaggttgcataagccaagatcatgccactgcattccagcctggcaacagagcaagactccatctcaaaaaaaaaaaagaatgaaaacggtgattttatggtgatttttataaaaagattccaaaaggtttcattctgatgctgttttaccaaagttccagaaaggctagtagattagtcctccctttgtttaggcccacctttcatccctgaacatcccaaattagtcaaaggtctaaatttcataatagctggtgtccctaaatctaggatatttatttatcaatgtcctgtcatcatcagggtgtctgggagctctgaaaaaaaaaaaaaaaaaaacaacaacaattttttgtgtcaaagctctactttggccaacttctcttggtcaaaggtgacagttgcttacttctaaattgatgaacacgtactttatttcttttacatagcaatcattcactcatacatctgattccaattcctttgtgtatatatgttgacatatcatcaacctattatcatcatcatgataatatagtcattgttagcaatttattcatcactgttagcatcatgaatataattacagtaatcaaattattttgtatatgccttattatatatggactaaacccagcttccatataagtaaatatttgtgagtgcttctttggggcttatatactaaaaatcaaataatagtcttaaatgttgtccaagagagctgtgttctagcctctctctctttccagtgatgtttctcttttatatttacttaaaaacaattgattcatctggatttattttaatgtaaggactaaagtagaaataccacattactttattaaatggctgcacaattgtcccaataccatttattgtataattcaccttttctttaccaataggtagtaccatatttattgtaattaaattcttagatggtttatgtctatttctggactctccatttggttctattgatcaaattacccattcacgtgctggtttttcctaggttttactattttaattgctgtagctttttatatgctaatatctgttagagatatttccttctcattactcctctcattaacttctttttcagaattttcatggctatttttaaaaaattgagatacaaacacatgccataaaattcaccctttaaaaatatacaattccggggtttttagaatattcacaaggttgtacaaccatcactgctatcgaattccagaacattttcaccacctcattaagaaaccagtcactctgcattccaccctcactctagcccttggcaaccatgaatctaccttctgtctctatgaatttgcctactcttagatatctcatataaataaaatcataccatgtgtcatcttttgtgactggcttctttcacttagcacaatgttttcaaagttcatctatgttgtgatgtgaatcaaaatgcattctattttatggcctaacaatattccattatatggatataccacattttaaatctgtttgccaattgatgaatatttggattgtttccactttttgcctattatgaatctagcctctcatttttaatttatatgttaaccacttaggtgaattagactattctctaataaccatcctaatgatgtggtttgattgtctcagagtaggagtgatcttaagctattgggtaaaagggctaatgagtgtcagaaagagtagccattattaatgacataatatcaatacttttattggcattatccagggtttaaatgcccatttataaatccacccagcaaacatatgaggccactaaactagttagacaggtgatttgtagattttagcatgcataaaaatcacctagggcacttgttaaagagcagatttacttgccttactctagagattatgctttggatggcttttgaaccataattttaatagtcctgatcccaaggtacattttcacctaaactgcctgctttcagttcatcagaattagttaagatcaggctcttaaaaagagatcctacagcagtgctctggaaaaggctgtcacttggcaacaacttccctaaaatatttctggtgatgtctctagcattccatataacttagagctagggcttctcagacaagtgtgaaaacactgaagaaggatcaaacccttatttttcttaagtaaacactgacactaccataggtttctggagaaatcacccatcctcctactgaaggggttagccacttgtctggtcccaaactcgtctgactttaatttttcataaagagtgatgcctttgccataatcacgcagagatctggagtataaactactctctaatcatctacaaacagcattcatccaagtgcttaactgtgcatgttaattgacagtgtgccaatactgtaaccctgatgcaccacatttttgttcttttaggccagagaaggccggaccaccattgtgatagcacaccgactgtctacggtccgaaatgcagatgtcatcgctgggtttgaggatggagtaattgtggagcaaggaagccacagcgaactgatgaagaaggaaggggtgtacttcaaacttgtcaacatgcaggtacttgcttttcaggaattttttctgctatttgctcctcaatatagtgttctttaaatattaaaatatgatccagtgaatgctatactgagcaagaagaaacttcaacaagatgcctaaaagtgtatatctgagactttaaatcagaatctgtaaagaggtagcaggtgagaaaataggggaaagtgccaaaaacatcatggatatattccttaggacagattcctaattgcctggggaatgtggtcaaactaaaaggtcctttctaccataatgggatggtcagagttttgggagtcagaggacgagaaaagtgtttcgacttgtccgaggagccccggctctgagttatatggaatgccagagactttaccagaaacattttagggaagtcattgacaagtgaccgccttttccagagcactgctgtagggttccttttgaccagccaggatctctagtggttgagggaggtctcatgtgatctaaaattgtttcccagatgatcctaataagaccatcatcaagatttgtggctctaggaagtgaatagtttgtcttttaaaaggaaaaagcaggccaggtgcagtggctcatgcctgtaatcccagcactttgggaggctgaggtgggcagatcacctgaggtcaggagttcgagacgagcctggccaacattgtgaaacccccatctctactaaaaatacaaaaaattagctgggcatggtggtgcacgcctgtagtcccagctactttggaggctgaggcaggagaatcgcttgaatccgggaggtggagattgcaatgacctgagactacaccactgcactccagcctgagtgacagagcgagactctgtctcagagaaaaaagaaagaaaagagcactcattcattctagttcctaaaacaggttatattgataatgattggtttttcatattattaagacatgttattatactcagtcacttgagcaacattgcagaataaataacctaagaatattttattctatgaacgattctatttgtgaaagtatatacatttgctttgatacaactgtaattagcatgtacacacatatttttgttcttttttcttaacatttcagatatacgtcatccacatactattattttaatgggtgctcagaagttcattttattaatgtgtgaaattagtcatttttctaaagttagatatttggtctgtttccagtatttctctattctaaatattgccactgtgagcacaagtagatcaaaaaaggttgtcaaaattttgccttgctttctgacaagtaactcttctgagccttcgtttctacatttggaataccaaacctaccatgagaggttgctataagtttagaaaaataaacatctgaatacttgtgtactaaaaacaacctactgaaatgtttaaaagggtggattttgtgatatgttaattatatttttaaaaagctgtttttctttttttttttttaaaaaaaaaaagacctgacacaaattagatgatgataaatggtggttactaaaatttgcaaattcccccaaatgaaaataccaaatgaaatgacgaaaagttttataactcaggcttgcatgtgccagagggtgttctacagtggagggaatcaatgatagtgtctctgccgaatgctaccatatggcctagccaccataaagggtctttgtcatttcactagttaggaatgcataaaatgttactttaaatccattttagttttaatttcatgagtggttaccaagggtctgtgattttgcccataatgacatgttgaatcctcaagtgaaataaccacttggctgtcctattgccataagctcttgtaagaatgacctctgcttccatcaggacttggattgggagactgctaaagagatgcagacagctctgacctttctatatcaaattcccaagcttactttcttaggaaaagttgtacatttgaagactgaacagtcagtggtctggcatgatagaaatctgtcaccaactaggcaatagctttgagcaagtcatttaaccaaattgggttttgttatcctcacttgctaaatgagcaggggcttcaggtaagatgacctctgatatttctaccagctctggcattctgtgattctcagcccctttgaatagttccacctgggtacccccacatttcccatttctgatttgagttttgccctcccacttacttggtgaggctggagagatgagggaaagacccactgtgagcctgagagtcagcagatgctcaagctaatgcagtactcttttctcaagtttcaaagaccaacctggttttcattcacccttgttttggtattgtttctaacaagtatcactgcttttccattaggtagactgttggctcttagttgtttcttttaaatgtatcttaatttttttctgattataaaggtaatgcattctttttaaaaatcaagcatttttttaaaaaatccaaacattacattctagaaacttgaaagtcatcataagccaaatccctacaaacagccactgatagctatttcgtatttatttttcatctttgccagcctaaagagttaaacagtatcttcaaatttaactatttataagattgagcttatttctacatttttattggccatttatatttttcttcctctgtgaaagtatttgttcctgtattaggatatttttctgttgtgttgttcatgatattctcattgatttgtgagaactctttacataaaaagaaaatacactcttctcttgcgtgtattggagagatttttttttcctgctttgttcctttcaatttcactttgttgtatttggctgccataaagaagctttaaaatgtatgtaattaggttgtcagttttttcctccatgtcttcaggatttgaggttgttctccgaaaggatatttaccccatttcctttcagcattttttgttctgcttttttacaattaaatctttgagacaactgaagtatacctgggtggaagaaatgagggctattggttttaaatagatactttttaacacctggtggaaaagtggctatcttggcttggagctcaatgacctttcagctgaagcacccaacaccaactgagtgttttaggtaaggcacagaaaaaatattatgaaagagacaggtaatgttcatttggtcatagaaggaagctaaaatctgaatgggcttattggaagaactgtccattgagatggacctcttgatagcatggatgagattaccaaaagaggaaaagttctggggaggtattcatgagaggtggtctggtttgacttgccatgagctagatttttggggatccaggcttgggcaggtagtgggaagctggggatgattttgagctgccctttaggaaaataaatctggtagcagtgtgggaacagatggcagtgagaatgcaagggatcaattacaaagtctgcagcctaggttggtttttgttgagagatggtataaaactgattcagtaatgagcaaataaggaaatccaccaagcagaacatatcactgcaatgtggttcaaggcaatatataagcacatgggcagtgttctgtcagatgttgaatgagcaactggaaaactaagagatcatgattggctattgtatgtacagtaaggcactagccaaaggattgggttcagggcaggtcttgaagggaggagcaagaacaagacactactacaaggactaagaccctgaacaaactattaagatgtgtagttggacacatcttaatagtggaggaagcaaatagggaaccagtccaaagtccaactccagcagggcttgatgttccctcacccttactaggcagtgaactagaagtccttagatcagcacccccacccccattcccattaaaaagagaactgatctcacagccagcaatgaggctgagcctgcatgttgggtctcgttgtgtgcatgagagcaggactgtgaggaaggaagatgaccatactcagccagtcgaggaagacagttttacctcccgtgggtagtgaccaggccctttgattcagcttttcttgtttgtagctttaaaaacaagcccttgttagtgtttccatgtagtcttcttccctttcttggtggccatgacttgttccctggattattgcatattaagtaaattcctatataccttctggattacgaaaaatgtgtctttaaatttttagaaaatattcttatactccgattttcttattgttcaaattgaatttaacctttctatactttatagttttctagctatccttgattgagaagcagttaggaaatctgaaaatcttgatacatgtaatattccaaattgctttatgattctaaacttggaggttacatccatttggagacacacacacacacacacacacacacacacacacactttaatgtcttgatattctttcagacatcaggaagccagatccagtcagaagaatttgaactaaatgatgaaaaggctgccactagaatggccccaaatggctggaaatctcgcctatttaggcattctactcagaaaaaccttaaaaattcacaaatgtgtcagaagagccttgatgtggaaaccgatggacttgtaagttgtttttcacttaaattaagtcttttactttgtagttttgctacaattattgaaattcttagccttgcaaatatttttcaggcacagatgactgctactatgagccatactctttgtaaagaaaaaaattttcaaattttaaatgtatttgacaatgaattgaaatcagttccaattataaatgggttttcaagggaaaaaaaatccagaaatgtagtctttacgctgagatgcttaatattaaaattaaatttgacattcatctttgaggtccagaggtaataagactggtccaaaacgagaggccctgatatttgcatactctattgggtaggattacatttgattatctatattaggaaacccagaatagcatccgtttaagcaaattaagagtttttatttctgtttcacatgccaaaatcttagaggtgaaaaacccagggctagaacagtagctccacagtccccatagacacaagctcccttcatctttatctgcactaccctggcatcaggtttccatcctcagggtcacttatgatctaaggtggctcctgaagccctacctatcacatctgtggtccaagcaacaggaagaaacaaagaggttttccagaattcccacacaatactattacttataagtcattggtcataattcgatcacatggccatacttagcaatgagtatggaaaattcaattttttttttttgctgtatgcattgacattctaaattagattggaattctcttacttagaaaaagaggagaatggtgagaaatagcaacgttggatttaggagattattaactccagttaacaaataattttatttatttatttatttttaattttattttttgagacagggtcttgctgtgttgcccaggctgaagtgcagtggtgcaatcttggctcactgcaacctccacttcccgggctcaactgattgtcccacttcagcctccttagtagccgggactacaggtgtgtgccaccacacctggctaatttttctgtgctttttgtagagacgaggttttaccatgttgcccaggctggaacaaataattttattatacagagggaatccattccaaaaaaagatttccttatttcaagatatagttttgatatattttgatgttatttgttaatgaagactgagtttatttttactcttgtgttggcctgagaaaactaattctaccaataatttattgcatctgtttttatctgtgcatgctattactgcagaaattacaaggactctcttagaggtcttaatcttggtatatttatagaaagaagaataacaattgtaccattttggagcgtcattattataagtcagataagcaatttcccctcttttggctatgaaattatccacttttcatttcctcatttattttgagagttattttgctatctctttaaactccagtattttataggagcacgtctcttgaagaaatgcacagagaagagggggaggcaggaaatgctgcaatcaacaagattgtcccaagtaccatcatagggagaaaacaacatgccaaaggagagggagagattaagtctgattagagggacctgtttgtgtgctgaagagcagtaaccaaagaaaaagattcattcattatgctggagatagggacttaaagataatgttaactagggaggaaaaaaaaaaaccctgaaatacagaaaaaatgggtaatttgaaagaaggctcagtagaacctacttctatattctctgttttatagagatataaatataacctttctcagtgacctcaagtttttgggattccatagtcacctctgtctcaagtttaatgttaaactgcttctatcatcaaaacattctttatgagacctaaatcctgcatgcttggccagacatttaattaaacatttgctgagaatcttatatgtgccaggaattggactactttctaggaatataaagacataatctttaccttaaaaaaagttacatactagaaatggaaatatgtaaacaaaaaaatcacagacaagctaagctatgaaataagagaagtctgcacagggaaaagtgtggtaagagaaaaggaatgtaattaatttggttttgtgagttggaaatatggtacagaaaaggcaaggttttggggtgaggaggccaagcccatgttctccagttagtaatggtttcctacatttgcaaagatgtttatccatctactcaggtgtattgtctcatttgacccagatatcatccctgttagagaggcaggactgtatcataatatatgagaaaactgcagctcggcttatgtggtccagccatgactgtcacaccaatacagtgttgtgtaactccagagctggatgccaaggtatttgtgcccagatcctgctacctcgcagtctgctgaggccagaatagggacgggctaagcatcccatgaaggttatttcttggccgaacaacccatactcagcttatgatgtgtaatcagtaaacattgttaacatgttataatatactgtcctactctctagtagtttgcttgtcattctctgcacctagtttgcgagtcccttgagggcaatggccatgccttttctatgtctacagactctggtaactgttgtgtcatcaccagtttgccctgatgtttatatgttctaggaagcaaatgtgccaccagtgtcctttctgaaggtcctgaaactgaataaaacagaatggccctactttgtcgtgggaacagtatgtgccattgccaatggggggcttcagccggcattttcagtcatattctcagagatcatagcggtaagtttgcaaacaccacataacagcctgaattagatcaattcatcagctgctgcttctcccaacctcactgactggctccattctgggattaagcagccttaaattaaactaagccaaagtccttaaatcccttttgagaaaagctgtgagggaaaagataagtagcctttgaatcactctaagttatgatattaatgaaattataaaatgtaaaatcaatgaagaaggcattctaatgagctctcttcatttggtgaaactggtgtcagacaatgatccccaatctgtttgtgtagaaaagctggtacaagtcgcacagtgaggtggagagagagtggagcagggaggggttaaagtcatagagtttaataagagtccaggcactgggtatagactggcctcaccactcaatagctctcggtacctcagtttcttcatctatacaataaatctacctcataacatggctgaggattaagagattatataggtaactatctggaaagcatttaagagtgtgtgccttgtagtaagtattcaaaaagcgatagccaccccattttagcaatccttccaaggcttggggagtccaagactaagaaagaaaacatactagccaatcattcaattaattgggggatatttaaaggaagttatcacaaatataaagcctccatcaattccatgaaatccagaattcatattctacaatttcagtcaagctctaatgttattggagagactttgttgttgaggataaataattctccatcatgttacgagtttattatttttgtgatgttggacatcgatccacaattaagaccacaagccaaaaaataaataaattagaaaagatcctcctccaaatcttttaaagtttcaaaacaaagcaagctctggctctcttgcaattcaaggcaatgtggactatatattttggggcatctgtctgcctagtgctgctccaggcactggagatacagtggtacacaaataaaccaagttgtgccctcaaacagcggtttctgtcggggaagacatgcaatggacaaacaaaaaaataaccccacaaacatgtaacatgttgagggataacaagagttttaaaagatgggtagggtaatagagaggtgttagctgggggtgctgtttcagataggatgctcaggaaaggcccctctgggtggaagcctgatggaatgagaagtggagggctgggacagggaggagtcacagggagcaagggacatataggaagaggaacaaatgctaaaatgtgcaaccactcacagtccatatgcagtatgtcaacctatgttaacaaccatgcagtcagaaagtagaatagagattaccaggagctgggaggaggagggaatggggagtcagtgtaatggtatcaagtttgggaagtttgggaaggcgaaaagttctgtagatggatactggtgaaggttgcacaacaatgtgactgtacttaacgccactgaattatacacttaaaaatggttaaaatggtaaattttgtgttatgtatattttaccacaattaccaaaaccctacatatttgaagcctagttttaaacatgtgacactcaagccactatttatgagaggaatgaagaaggatcagttatgtaatccaagtgggcgttttaaatattcttttgtagatttttggaccaggcgatgatgcagtgaagcagcagaagtgcaacatattctctttgattttcttatttctgggaattatttctttttttactttcttccttcaggtaggtacccatgatttgcctttctcatcaagtttataatttaattagagaaattaaattaaacctaatggagcttccaaattcttacagtgaaataaattgcaaacatgattggcataaggctctgctggagggtagactccttatcagggggaagtgtgacttccctgtgtcctaacttatattacattacaagtttgccctcagcagacattcattaccaaggacaagagacctcagtttactgcagaacataagagtaacttaaattcaacaggttgggaactgggaaagtacagtccaatagcattctcttttctgttgttactctttatagaatatcaagtaacttctctgatcttttcctacttaattgatgaactatttgaaagaacataatattttgcattctaacgttgtagacctggccaaaataaactagtcaaactctctaattgtacttttctacccagttagacttctctgtaatttcttttgtctctttaacccagtgggcaccacataggcctttcgaatataatacaatccatcaagtcagcaaaatagtgtttcctagtcatgccagcatgcttctcttttattattgttgaaccaatggcaaagtaaaccaagttttttatttagaaatcattgccctactagacacaactcaatgatttgatccagccccagtccctggcatgctagggagtgcagctagaaaatgtgtttcaggggccgcaggaacagtgggctgatgcatagaacctgtagcaatccgccagcaaatggagggggagggcagtctggtcctggacaaggaacacctggggccgattcactgggtgcactgatcatctatccccctggcttagtaaacagttctgatgtgcactcccccgtgtgccctcggcacggctaccccaacactcacactgtggctggagactcacacgtcccagaagtaagcccacttctggatatctggactcctctccagtttggatgtggtaattagaaagtaggaaattgtcccaaagaggctggggaaggaagagtaccctgattgttccccaatctgagtgcaggtggagctgtgaccaggaaccagcatactcatttggatcttgtttctaaggtcatccttcctttacactgcatgagccaaaatgaattcgtgtgtaggactttgttacttctgtatttaactggtttattggaagtagtaggaacacactgaattttgtagttaaacacagtatctttgtcactgagatgttgtccttcaaagttttgaaaaataaacctatttagaatggtttagaagccagaactggacacctttaagatttttggcctttgattgtaatgcatactgatgattttgcagtacatgaatttgacgtgggggctttgaattcgtatttggtcctggacttttgttatttaaatagttaacatacaaataatgtaaaatcaatgtgaatataggcacctgtgtcagaatactagcaactgttacccacacaacgggcaggtttggtcacttggtgggtttcaacccaatgaccacatcaaggaggatttagcaaaggaattttataacttgtcacaagtgagaagctcacagagcttagttcccaaagcagtatctccccaagctggaggctgggtcaggttttataagcgtatggtaatgaagtgtgatctgattggatcttgcaatgaagtgatgccgggaagcaccatctgactggatcctgccatggggtggtgtcagagctcaatctgattgaatcctgcatcctgccatgtggtgtctgcttcttaattcagtccctgattcttgtttcggagcacttaggttcctgctatggttgcatgcttgattcatctggggctgctcaggttattaacatgacttgaggatccgtggcaactgtaaaacaactcataactttgctacataaaagttgaacatgattggtctggtgcaattacatacataaagatcaaaagagaccatagccttttttctcaaccagggtttcacgtttgggaaagctggcgagatcctcaccagaagactgcggtcaatggcttttaaagcaatgctaagacaggtaggagtgtgcgctggagaatgccttctgatctttcacatttcttccatattaagcttcttactgttcttattgttatgtcgatatgcatgttttccccccagggtattcacgcaaggatggggcagagtcctgcaaattgtcctggtccttcaagagctaaagacttctcatgttttttttgttttttttttgtttttgttttttttcatagaaataggctttatttgggtagctttggcttattctgtaaatatctctctccatgtagacactatcatttcgaagacctgtatctcttttctggatcctgtgcaggccctggtgagtccattgagactccaggatgtctttaaaccaagaaaaacctagttgatagcatttaatctcatgtaccacaatctaccatactaactgtaggtatcctcaaatgttaataattgagttttgtttatttcttatttgaggtctattttcacattaattcacttgtttgtttattcaaacattacttatcatgtaccagacactgtgctggtggctggtactgtataatccattatttgctctcctcgtaagttcacattctagtgcctgacataggaaaatatgcaaacatgaattatctatttttatagaaaatgcctaagagagggccagaatattatccattcaattgacaggaactgattacatttctgttcacaaatgggcacatagtaggtagtatattctgattaaatctgtctacaaatcctatttcagtatctcctaaactcttgctatgcaggaaaaattattttatgtgaaggtaaaagatgccatggatgagtagcttacaattaaaattaagtctcagacatgcttctttttttatccctgtggctaactggagatcagacacactttcaatcagtgtttaacaaaaaatcaaacaaaagcttggtgagaaaccagtgcttattttctcctgcctagaatctatcagaacaacatgtccaagacagctccaccaccctttatgagagacaacaccatatcagggcagaagtgtccatagtgaaagacctgatgattgggtgaatggaatgcctaccagcctcccagccttgggaggagctggcaaggagcatggcagccatctgggtgagccctgcccccctagaccagagatgccctccctgctaccacagagcagtcaggaagctgggttctgctagattctgggggtgtgtgctcagagcaaggccagggactctacactgcatatgaggtctcccctaaatttcctcagcattggagctttgggaggctttgtctggttttctttgcttgttttaattttgaactaacataaacgtgtattttatgccataggacatgagctggtttgatgaccataaaaacagtactggtgcactttctacaagacttgccacagatgctgcccaagtccaaggagtaggtagactgcactctacttgtagttttttacataacatggttttagataagcatgtagcatacccacacttgttaagatgcttccagctagaaatagcagaaagctcaaatcaaaactgctgtaaacaataagcagaagattaaacttcaaggttgattgacccactgccccctccagatttaatccagaatccaggttccctcattggctttggctttatcccaaggctgattccctgcagtcacaggatggctgctaatagtaattagaactacaggcttccttatttcccatccagtgaaagagagcacacacctctacctcaaccaccaaacaaaaaccctttgctgaaatctaatttgggctaatttgggtcacatgccccaccctgaaccactgtctccaggggatggtggtgttctgagtggcctacgtcccccacccctttagctgaggtgggttactttgcagctcactgcttccacacaacaggagaaggaggaatggatgcagagagctgactgcaatgttgctacagccacctttgttttctgagtggtacaacactaattcatccttatatgtgctttgtggtggatgtctcttaggacacgtaccctttgtaacaacagatggtctctttcccttttacacttttgaattaaatggtctttaaaattacccaggtacattggagttagtttcctctttgaacattgcatctatgaaaaaatacatgcacccccagtgcccatccacaaagcagagaagttgattacttggttctagaatgttggttcaggtgggcaggagaggaatgagagtgtaaaggcacaatgaagaaatgtctgcagagcctcatgagttaagcacaggtgttgtgggtttattgtaatgaaagtaagccaatgtagctcaggcatagaacccactcatcattctgaccaagaggctaaggctggagcgcatgcatttggagcttaaaactacagttgctttgtgctttttctctcccaggccacaggaaccaggttggctttaattgcacagaatatagctaaccttggaactggtattatcatatcatttatctacggttggcagttaaccctattgctattagcagttgttccaattattgctgtgtcaggaattgttgaaatgaaattgttggctggaaatgccaaaagagataaaaaagaactggaagctgctggaaaggtaggtcaaataagatttcaattggtgttaagtgttgtttttagacatgtgttttatttgaattatttatcatgatatgcaggctttaataattaaatgtttgtgcccactacaactaataattgtcaattgtgtatgaaatattttactgtattaatgtctagaacttaaatataaggtgattaacataaaacgttgagcctatagaaagcacttaacatagttatgataaagaacttctgaatattcaaagtgcatttcattttacttcatgtccaaatgctactgtttggacaaatgtcatccctgtttcacaaaccttcatgcagaagactgtaagtgaattgttcagggtcggacatgtgctggcatttaagagatcctcttctttttggctgtgatttctataattaagatggcagccaccagatggcagtaatgcctcaattttgtggttctcactataatggcaattgggcttaacatttacttgagccttactacgtgccagttattgtgctacatatttatatgcaccaatttattacatcttcacaataatcctataaggcaggcactattgttatcccaatttcagaaatacagaacctgagattcaaacagaagttagagatttggctgggatttaagttcaggtctagtttcaaagctcttacctctactatatggtctctttatatgtgtttaagtgtctaaatctacacataaacattttatttacaagtacatgcactgaaatgttcacatgtagattataaccatgaacattcttagtcttatttatgtaattattatcctttattgaaacatgaggaagtgaagcagataataaatataaattgtgatataggttttatagcattgcactttacaaagcccttttacaagcattactgcaactgaccttaactagttatgagaagtggaacagacagtatctctatagggaagaaggcgtcagagactgggtgagtgactagcttcagaggcaccatattaagagggaagattaacattcggactaaccatgtttccactaaaccaattatgtctggtgaaatcctttcttgtcctcttgtaatcagcatcagctgccgctgcatgcagcgttaggtataatagtatctccaggtttccatcagaattcactctcctcattttcacgctgcatcctctccaagacttggagcttgctaggacaatatgtggttcccaggacttgggaacccctgggtgtctagagttcttgaagattctcttggctgctggctgtgggtactttagggcatcatttccttgacttctgagtgtctcaactaactgctgaagaaacactgtgtagctctgtttcctcccctgcccctcaatcctgcttctttccacatttcatatgggagaatggtcagttggatggaatgaaaataaacttttcttagacaagttacatgatagaaaacatcttgaatctagttaatagtcttagctccattaattgttagaattttgtcagagtagagcaggtagaattgagcagtattgaaacaaaacaaaatcttgggttattagctttggtcttgctattcacagtgtgtgaggctggagaagatccccaacttctctagtcctcatgtcctaccttagtaaaatgagaaattgtaccagatactgccccaagttccttccagctaaaaccctgttattctaagcatcagagattgaataactcagactggccagtttaaatttttttagtagctactttaacctaatagggttatgaaatatgaaagattaaatatgaaatatgaaagattttaaatatgaaagattaaaaatgttttaaatgttaatatcagcagttcaatcatagtttaatattgtttactcagtcagcacttgcttaagagtcggaaagaaggttctagaaaaaccccaaatcactatttaaaaagaaacactctcatttacctgggtacagtttcatcatcattaaagtacaacagggtttgaggtattcccatcccaattttccaaaaagggcttggtagtgagggtgttggttactgggcagggagtggggagggaagactgcctcataaccatcttgacccagggcttgtctggtcactgagattaagggccctctgtgccacagctaacccgtaagggagttgatccatgactagaatgtcaagaggagtgtcaagtcattactggtttctccttgtgtaaattacacagcaggggtagcagaatagcattatggcttaggaacatggactccacatcagatagtctcagttggaattcttgctttgctacttattaactttagaacttaaggcaattcagttaacttctctgtgcctcggttctctcatctgtgtaaataggaatactatttccctttcaaggttgtgaggctaaatgagatcatattggtgaatgaggtaatacttggacatagtaaaagctcagtaatttttctctattcttgtaattgctatctgttatatctttattacaaatgaaaaatctatggttattcagtctcaagcatcacatatcttcctttcagctcattgcagaagctaagaactgaggtaaaaaaaaaagtcttaaagctgttaaaaacctaaaattaagatcttatgctccatgtgctgttggtttagatgactcaactacagaactaagatttagactaaatagctaagtcacagacaatcaacatttgtcaagggtggtttggctgtaagaatcagagaactgctctggctggtttgggtaaaagcgatttgatataaggacactccaaagtgcaagaaatacaggcagtttgtgtgtaactggctcttacagccacaggctctaatatctgagtcttcctatacatctattccattcctcggatgctgtatattcagaccagcttcttacacatacccaatgtgacatcagcctctgaagccccagggcctcacggttcaaacttgtgtccagggccaggaaaccaaatctgattgacccagattagtcagatgtctgactctgatttaatcacggatttaaagcatgctcatgttgttgacaattgggatctccttcccattgtgggtggacagcttttataagaagttatactcagggaggaaataattggcagctccaataggcccttagaaatcacagcctaatcctttcttttaggactctgccttgtgaagaaagccaggccacaaaggggttgtgactaaggccagtcatgtaactgcctggtggcaggctgggaatagaaccaggcccttggttcccaggccacagttcttgcccttagctgatcagccttcctgagcatacaaagacttgcctaccatacttagcacagccagaagtaccagttttgtcataaagctagtcttgaacagattatgcctttggtttttaatttaaaggaaattaaagcctatcaacgtaaccttcaggatacttttgacagagccctagggcttatttttcattatttcagaagtgaaaacaccacttctaatgaaggtctattctgtgttacagattgcaacagaggcaatagaaaatattaggacagttgtgtctttgacccaggaaagaaaatttgaatcaatgtatgttgaaaaattgtatggaccttacaggtaatgaaccatatgattcctgctaagaacctagtgctttcctaaggctgaattattgtcccaaaaagataataaaagctctgctgctccaaacaatgatatgactataagggtggccttttttcaacaattctgtcactgaaaataagtagctttttgatgtgactaggacacagaattatattttttacatcttatgcaaacaacaagaataggtctccaagacgtaaaagatatagagaattgcacagtctttggttatcagtgcaggcaacataaataacctatctgggtgacttaagacaaacattcctttaaggaattgctcaaacctttctttgcagtgtgtagactgaaccaaaagtgagacttgctattgggtatgttccagaggaaagtatttcatttgttctctgaatgaggaccagatccaacctactctgaagataaagaaacacagactatttcagtggtttatagttgagcaattcaagaaactcctaatggcaccatttgccactcatttccactgcagcctgattttataaatgagtatgttttaacacaaagttgaacacaacttagattacaattttgcagactggaacagtagttttgaacacttgcaaatttgaacagatatctttgaaagtctcaatttatgccatctcctcagttatgcacacttcatatgatactaaataacatgcagctacacctttgtgtccatttgttgtttgacataaaacatgtatgcaccattaatgatgacctgtttttaacttcaaggagggttaaggaagaatagaaaggtgaagctaattatgaacttggttataatttaaagattcaatagcttcacagaatgctcaagttttgtaacaccatgttcacagcacataagttaaaccatccaaattagtaatactttgaatttttccttttgccaaaaacaccctcatatttgagagtaactcaattatagttcttttggaggattcagaagccaataaagtatagcatgaagtcaaattagaaactgtacaaaataaattatatacaggggcggctggcaggatctagcttgggaaaggacttctggtgtatatctatgtaaacttcagggactcaacttttgtgaatctgaaacatgaattttaacctaacagagtacaattagttacaggaaacaacataatagtagtaaatcacattcagataattcaaacttaaattcagatcctgacattttaggtatttttgaaacaacaactatgcttaataggagttgaacattggagtcatcagatattaatatgtaataatatcagttatcatttgaggaaccactatgaactaggcactgtgctagacatttatatggtttttgtcaaaacaattctgcattacagtgattatttccatggtataaatgtttagagaagttatcatttacccaaactaatataactggaggtggaacttaaacccactcggccagacttagaagccgtgctctttccactacacagcgctaaaggaggctgaagagatggttacaagtatactgatttgcttttcaggaattctgtgcagaaggcacacatctatggaattacttttagtatctcacaagcatttatgtatttttcctatgccggttgttttcgatttggtgcatatctcattgtgaatggacatatgcgcttcagagatgttattctgtaagtagctttagaaatattaagattattctataataaggttttagtaggtttatgcaaaagtttagagtaggaaaaaaatgactcctgtgtccaaagatgaggtcagggatttaaatttaccacagtttccatcctggcaggcacagagatctgatcttgttaatactccaagtgcagtttcattttgcgggctacaattaagcttatgaaaatgatcagaaagcacagttttagttgtacatatgatcctggtcaggatgatgcaaattttctcattatagaatataggcagaaaaaatcataattagaaagttgctggtgaccatggactcaaaacagggttatatagcttactattatctacaaccaaaacatggcctggaaaacaagatgggaatacttgttggaagtctggcaaaggcactctctccctaaccaggcctgagatgagacagccctgccaacatttgcctctcagcctctcctttttccttggtttccaaggcaaactactggtctttctgtttgatgccttctttcataatgtgctcagcacattccattaggttgcaatctgggcttgaaagagggaagcaactctttttaagatcatttggtatgtttctgctctggtgggatgattttaaagcagtggtgaacagccatttttgaaacagggtcaagacaaaaaagcgaaagtgtgttaagagctgggttttttttttcatccaaaattaaaattaccatgaaaaaatgtatctatataatctttgtatcaggatcccagcaggaaacaaatggcacagcaaatgggttaattgatgagtttgctaaagggtctatttacaaaggcctggaaagtgttaaggtaagcagtacccaagaaggaagttaacaccccagcaatacccagctggaaactgctaccaccctaagcctaaaggcaagagaagggaaagatagccagaactcagcataggtgctttctgtggtctttgatggagggacagcaactgcacaagcaatctgacaagaaagaagccaaagaaacaaataccttggcctcactcccttccagcctccctatcctctgctgtgccttccattggccaaatcctatgaaaccagaggacaagaaaaccttttgattcagttcatgatagttggaatccccagacatggagtagggggatagaaggtagagatgggtaaaaagtgaggagtgattttgggggacaaatggaactagcagctggggattacaacttagagtacaactatttattgtataaaaaatattgagaacatttctgaaagtgaaaaccgttggaaagtcacattattcctgcttcctttcttttttaaaatcattgaaatgttaaattatggaaacctagaagacagctttaggcagtacagggaagctatgcagccacatgtgggttgttcatcactattttaaaacttagtttttggcaactcaccttttcgtcaagcatttaaaggaaagttttactatacctctcatcccagcccctaggtattaaaacccatttttaatatcttagctttagaaatttgaaggtgaaaacttaaagttctccattattagtagagaactcccactcctttctctggggtagtgctggtatcagaagtaaattgctttgtgaagttgtagatctcaggatctttagcccttcctaaaagttgtcataatcaatatccatctttaaagagcatataattagaaaatagaactttagtttaaggtgacttttttttccagagtgctgtcaatagttattttaacttttattttaggttcaggggtacatatgcatgttcgttaatacaggcaaactcatgtcatgggggtttggtgtacagaccatgtcatcacccagatactaagcataataactgatagcatagttattttaattgtaaataaaaagctatttctagtaaaagcttattttccctaataaaaattatttacagtgatgatgattatcatttgtgtggtagtacagaagaaaccacaaactggaagtcagggccagagctttatcagaaaaagcttacttggaactgatcaaggcccttacacactttgtgcttcaattccctcaactctaaaaagagtataaccagcaactaaaattagctgagctcacagatcagattcagttataagcctcttcttgaaagtaaaaacctttgggaagtcacagtagtcctaagaaattaggggctactatgcaaagggaagtcagaaagcaagtcgagaaaaggtaaaccctcaggaagtggatcttgcccctctcctagatttctcttgttactagaattttatgaaaatgtatgtcggggagaaaggggatgattaaggagtaaagggaaaaaatactggtaagcactatacctttagactttcaaacatcatggagttaattataaaagctaatttttgaattcctctacttctgtctagggtgttttctgcaattgtatttggtgcagtggctctaggacatgccagttcatttgctccagactatgctaaagctaagctgtctgcagcccacttattcatgctgtttgaaagacaacctctgattgacagctacagtgaagaggggctgaagcctgtaagttctctgatgcctgatgatgcttgatcaatttttccctaaggtttgctgtctgctagattatagctacaggataagtttgtgatgattacaccaacatgtgtttcatttaatttgtaatatttatatagctaatatttgggcaacttgactgacatttaaaaattttataggtggtttcaaggatcctgaagtttagcacatcaaaataaaaaaaaaagggaaaaccagatatattagaactgaatagtttccacaaaaatttagtcatttctacataaaggtataattctgccatgttaatgcaattagtaatttgactttaatcactttttataatagttaagatgtaattggtaagaagggcagttcgttcacaatgagagtaataatcctgtgctttattatctataaaggtaacttaaactcacatctgagtgttctttgtatgacacaagatgctacacgttgtaatatacaagcagctgtgtaggtaaagaggctaggacttaacacagtctttccaggactttcccaggtatttcatgttctgataaaattgctgtgcccagtgagtgagataaagaaagtgaacttaagaaactgccagggtttgccatcagggctgcccactgaaactttgggtagaaactgttgctaaatttccaagcctttagagtcttttggacactggcttgattccagcttcagaataagcagttgggaaagctaaatgaatatcttaaagaaatcagaaactaagttagataacaactcatggtaatgactttttgtctaatctcacctatacccctatctctcaccttcatttcacaccataataacttgctatcaatattaactggcaccagaactataccaaatatgaattttatgtttctctactacagtctttggtaaagtttccttgaaataatatttcttattccaataattatcaggccaattataatagcaacatttaaacatttattcaggataaatttgaaggaaatataacatttaatgaagtcgtgttcaactatcccacccgagcaaacgtgccagtgcttcaggggctgagcctggaggtgaagaaaggccagacactagccctggtgggcagcagtggctgtgggaagagcacggtggtccagctcctggagcggttctacgaccccttggcggggacagtggtgagcacatttccttataacttgattgaaggctatattttaattggcccaaccaatattgtcataatggaaaatattggacaaatgtagacctagaatcctgtttgatacaatgaccacattctataaaccccaactggcaccatatctgggaaatatatggggacaataggacagaatgtctggaattcagtctagctcagaaaatactgaatataagtttaatttttaccctgtcatgggcctttccagtcagtctgattgttctaagcaaatactgacttactggcttataaaggtgaactacagactcctgcccaaattcaaagctgacttccaaaacagggtgctacctgcttattgcctccccaccgctttcagttttgctgccttctcttaccttgaattctcggctctcgaactttgactttgatcctcaacctccagccctttcatatttggcttttgtcattgattttctagcatgtagccccgtggctctcttccttgagtgaagaccaactcttactgataatgcttgtatctgccataaccttgggacagcacccatgacagagccctgggagcctgtccccattagacagtcaccaaagtgttaagccttgtttcttttattaatagttgttaagcctaaatcagccttgttaagcctaatttagttgtttctctctggaaatcttctgctttgctattatagctattctgcaggtaacataggcaaaccagctcaccaaaactctgtaaatatggtgtgctgatacgatggtgggaatttttttctttattgagatcaagactagctggacttgtgtctattcctttgcctgtaagctttaccttacacgaggctgtattttcaagtacatattacaacacttccctaggagcaccatgcctcctgcctatagcaagtaaaacaaaaacaaaaccatcactgccagcaaaaataatcctcccaaagacactgccctttgtaacttgttccttttccatgggattcttgtccttagtgctatcagagaggtgagggaaagttaaggctagtagttttcagggaaaagagaggtagaggtaggaccagagtcaaccagcttttggggccctgcttctgatcagctttttcactgctgtgcatgggggaaggggaaatcaagtcaaggtgaagggttaggattattctggggacagcagacctgagtgggacaccttgatgcaggcttctttaacgcagagtaggacacagatggctggaggagggcagacaaggacaaagagaagtgtgaaaaaagagggtcaaatgtgctaccattttgccagttagaccaagatagggatggcttaatcaccataaaaatcatcatgttggccatgctggcctcaatggtataagtcttggagggttgttgttttgaagctgctgacaccctcatgcaacgatcctccaaatggacaatctagtaactttttagtttttttttcttttttatacccttcttatagtttgtggactttggttttcagcttctcgatggtcaagaagcaaagaaactcaatgtccagtggctcagagctcaactcggaatcgtgtctcaggagcctatcctatttgactgcagcattgccgagaatattgcctatggagacaacagccgggttgtatcacaggatgaaattgtgagtgcagccaaagctgccaacatacatcctttcatcgagacgttaccccacgtaagttaaagagtagctgaaatcagaagagactactttttatcccccaaacaattaccaaagttatgccaacaaaatcttgtaacaaaatatgttgatttactaacattaacaacttggacaaggcacttcaggataccaagcttccttatttgtaaatgggaatacattatgcctacctcatacaaatgtagtgagaagctcaaaaccaccatacttcaggttacagactggtggttgagggctgcatttagactgcagtcatgtttggtttagccctatggtacttttaaaacaattatagtttttattttgagataattatggatttacatgtaattgtaaggaatacagagatcttatgtaccctttacctagtttctgccaatgacaatatcttgcaaaactagtatacagtatcacaagcaggatactgatattgatacactccactcatcttattcagacttcccttgttttacttgcattcatttgcatatggatttagttctgtgcagctgtattgcagatggggattcatagatccactaattaagaacactggccaggcacggtggctcacacctgtaatctcagcactttgggaggccaaggtgggtggattacgaggtcaggagattgagaccatcctggccaacatggtgaaaccctgtctctactaaaaacacaaaaatcaaccaggcgtcgtggtgggcacctgtagttgcagctactcaggaggctgaggcgggagaatcgcctgaacctgagaaacggaggttaaagtgatccaagatcacaccattgcactccagcctgggcgacagagtgagactccgtctcaaaaaaaaaaaaaaaaagatacagaacattctcatctccataaagatccctcatattgcccttttagagccatgcatatatcccttcctcccaccctcattcctctcaaactctggcaaacatgaatctgttctccgtttgtataattttatattttaaaaatgttttataaaaatatatacagtatgtaaacttttgggattaacttttgtctttcagctaattccctgaagttgtgtgtattcataggcattgctttttattactgagtgatattccacagtgtggatgtaccacagtttaaccattcacctgttgaaggatagctgggttatttcctgtttctggctattgcaaataaagctgctgtaaatacttgtatacaggtttctgtatgaattcaagtttttatttctttgggataaacacccaggagtagaattgtggagcagtatggcaatttcatgtttagtttataagccactgctaaactgttttccagagtggccatcccattttacattcctaccagcaatgtgtaagtgatgtagtttctctgaatctttgccagcatttactgttgtcattagtttttatttttaccactctgataagagtgtagtgatacatcactgtggctttaatatgcatttcccaatggcaaatgatgttgaacatagttttttatatgcttatttaccatctatatatcctcttggtgaaatgtctccatgttgtttgcccatattctaattggatttttatcttttactgctgagttttcagaagttttttttgtttgtttgtttaacatattgtaattactgttggatatgtagtttgtaaatgttttctcccagtctgtagcttgtttattcatcctataagaaggtctttgcagagcaaaagttttacttttgatgaggtccaatttaccaattcttccttttatggattatgctttcagtgtcaagtctaagaactcgttgcctagccctaggcccaaaatattttctccatgtttttttctaaaagttttatagctttacattttaaatttcagtccatgatccatttttagttcactttaaacatgtgtagccctggaaggatggcttgaggtccctaaaagtgatggtagggacaattcattttatggcattcttccagcattcggggttccactgggttacactgacgtagagcttaattatttttgcttttattttctgctatagttagaaatcactcacacccacaaataaaattttaaaaccctttcattttggttagccttaccaacctttaatgcacattgacctgaatcaaatattggatttgactgtgaatagaaaaatttacagcttcagctcttaatataagtgaccactggaccttaggaaattaattcacatgatatacatcactgcataagccctgcaaactgaactgactcaatttacatctctattcatatgctctttctcagcctagaatgctctctcaaaatctagctccccaaacttctctaaaaagatttctttcatttatttccccttttttctccttctaccctgtctccataacaacttctatctccttcttctgatctttcatagtgtgctgtgtatactactacagtcctgtgttacataacaacattttggtcaatgacagactgcgtataccacagtggttcccataagattataatggaactgaaaaattcctattgcctagtgacatagctgtcataatatcatagtgcaacacaaaattcaagtatttgtggtgatgctggcataacaaagcgactgcactgccagttgtataagagtatagcacatactactatgtacagtgcataatacttgataatgacaacaaatgacttattgattcatatatccgttatagcatttgttattttagagtatcctcctcctattttaaagaaagttaattataagatagcctattgtagaataccattgagaattaaagtcactagttttctagtttgattttgaaaataaacactctgttaagttgaaacaacgttatagaaactgttattgactctaaatgtttttcttgtaaatagaactgtcaactgttaagcaacagttcattcaacatatttataatttggttaacttgcagaaatatgaaacaagagtgggagataaggggactcagctctcaggaggtcaaaaacagaggattgctattgcccgagccctcatcagacaacctcaaatcctcctgttggatgaagctacatcagctctggatactgaaagtgaaaaggtgtgtgtggcctcccaacttatgtcttatttaatttatgaaatagaagggattttgctgtcaaccatgaaaaaaacacacacaagcacagggggaaaaacacagaacgttagatagtggtttttatttttatttttttgagacggggtctcgttgttgcctaggctgtagtgcagtggcgcaatccagctcactgcaacctctgcctccagggttcaagcgattctcttgcctcaacctcctgagtagctgggactacaggtgcctgccactatgcccagctaatttttgtatttttagtagagacagggtttcattatgttggccaggctggtctcgaatcctgaccttgtgatccgcctgcctcggcctcccaaagtgctgggattacaggcgtgagccaccttgcccggctgatagtggttattttgaagtaatggaatattttattctaaattttctaaaatgattatatattttataaagtaaagcattcaaaagaaaaaagctgcacaaattacatttttagcacattaggaatgaaaaactggaaaatactcaaaagggaactagttaaacagaagattagaaaatttaaatacttatgaatttttttacagcatgggaacccatttgtgttatatttaaaaagcagaacataactatgtagattaaatgttgattatacaaaatacacatgcataaagttcaaagattctaagatactagaaattaaaagttgattagaaaggtaacattttcaaatttacttgaatgttaaaactaatttatacaatttttgggataaggtgtctgtctgatttatcaataggttgtccaagaagccctggacaaagccagagaaggccgcacctgcattgtgattgctcaccgcctgtccaccatccagaatgcagacttaatagtggtgtttcagaatgggagagtcaaggagcatggcacgcatcagcagctgctggcacagaaaggcatctatttttcaatggtcagtgtccaggctgggacacagaacttatgaacttttgctacagtatattttaaaaataaattcaaattattctaccattttatctgacttgtaaaataagtttctggtttgtcatcataaaacataggtatgtctgtctcattctagatcaatttagaagacccaatttggggtttattacggcatttgaaatttgagagttagaagtgacacctgtcttgatgaagtattgaaacaacaggctagctctccctaagttattagaaacatccagaaaaagaacaaaattcaaggtaagtacaggtgtagaaatatagaagccacagacatagggaaatggtcttatggtcctgaatgggttgggtagacaggaaagtttgggaataattttcccaagtacaaaagaaaaataaattgttcaatagcctcatctctcttggtaattttctaaatcattctattgtggaatcaaagttttttaaatgaatgaatttccagctttatcatccaacatcaagagaaaatgaaattgccctaccgagctaactctgaaagcacatatcggttccataaagcaagaaagagccctatcattaagtatttttttaaagttttaaactcattaatttaaaatgtacaattatcagtataatttcaaacatcaaacatcaatgatacatgctgagtttctatagcaactgcgttctcttttataaatagactacttttcccagaaaatccgtttttcctacaatgaaaggtatgtttagatggaaagcaaaaaatatagacaacccctagaagctaaccacactgaaatgtttcaataattttccctttgttttctccacaattttctgcaacaaattagttcttagcgctctatcaggttgttaaattcagtaaatcatccaaagttcttctaactgtaataagccatattaccaaagaatttttcaaatgtgaccactgtgtgagtggatcaagtttcagattaaccaagataaaagtggggcaaaaagtacattactgcagtgacccaaagtagtgtttgacctattcctgtataatgatacccaaacttgcctgatcagaatcatggggcatctattcgtaaacaaaataattgattcagtaggtctgggttgaggcccaggaatctgttttttaaaatacactctaggtgattattcacatcaggcaagttaggaaaagtggtgaagtgtgagtgagaggaggtttctgtgcaggtgatgcagtctccaaaatacgcaactcattacacattataggttgagtattcttatctaaaatgcttgggatcagaagtgtttcatatttcagaatatttgcattatactcactggctgagcatcccaagtccagaaatcctaaatgttccaatgagcatttccttatgtcagcactcaaaatgttttggattttggagcatttctggtgttcaaatttggaatgttcaacctgtatttataaaccaaccaaatgattctaaatgtcctcgctatctagtttaaaaccctgcattagaatgaggggaaaaggttcttagttcagatctcatcttccttttctataccaactgtgaagaaatgtatcaaatgctactgaagccaactctgaatgttttcacagagaaatagtactgatgcttttcaggacagaggctggcacagtgtaaagggcttaattgttagcaataaaccagtcttatcaaattcagagcgtacatgtttcttaaaagggatgtatagaatcagtaccctgagtatgatgtaatctttacatatattaaaatgtctggcagattgctatagtacccataatcatgccctctgtgcccactcttttacaaagtgactttctcttatcaagatattactttttccccactccttgaatctggacttctcttgtgacttggtttaatcaacaaaatgcagccaggtgatggcatgtgacttcagggcctaggcctcaagggaccttcacctctcagaacactctcactaccaagtaaggaagctcaattctgaatactagatgatcagagaccatgtcaggagagacagtcccagccaccaaatttacagatagttggtgaggtgatcttaaactttccagcctcagtcctggttgcctgatgattatagctgtacaaataaacacaggcaagatgagcagaagaactgtctagctgttatcaatcaactgacaaagtaatgagaaacaataaactgattcaagacactaagttttggatggttaattacacagcaatatataactgaggtcaaaaagcaccagaaaagcaaacaggaatgaatcatttattcaaacaaaacaaaaagctatataattttgagaatttcattttttgagagtaaaaactacaaaattgaacagcgaggaggaaaaaattctgacaatgtgattcaacattaatcctttaaaagtcactgtaacaaatttaaacataagtgctttatttttctattcacaaaactaattataatacaccacaatgaattttgttacggttttatgtgtgtaatagagggtatacatctccatactactagctaatttgtctgtttgttcaaaagagttatttttctctttttttcttctttgagacagggtctcacgctcttgcccaggctatagcataagggcacatcacagctcactgcagccacaacctcctgggctcaaccgatcctcctgtctcagccttcaagtagcttggactacaggcacacatgcaccaccatacccggctaagtttttgatcttgtagagacaggaccttaccctgttgcccaggctggtctcaaactcctagcttcaagcaatcctcctaccttggcctcccaaagtgctaagattataggcatgagccactgcacccagcccaaaaaagttattttagatcaccattagattgtagtggtctttcccatcaaacataacaggcttgtatccctgtggtgaacatagaaggcattgatttcagggaaattagcatacaataatgtaattcataccctttggcagctaaaaaaattaaagtgcttgaaagatggactctacattgatgtccagagagaggatttataa

SEQ ID NO: 287 - DNA, 38936 bp, Homo sapiens
  source 1..38936: mol_type = genomic DNA; note = NC_000014.9:35278558-35317493 PSMA6 [organism=Homo sapiens] [GeneID=5687] [chromosome=14]
agaatgtcagtatccaataggatgccagtggaattccctgacgattccatccatgcggctctgctggagcagggtagtgtcctaggctgggagaatgggatggagcctccacctcatgaagtagcttcctttggaggtggctatggcaggtcttcggagaggtaagtccctcactcagacttgttgcttgagatgtactatattactgattctttgaaaataaatcattcttatattttattcctctttacaatgaccttgctctagaatcccaagttgcttttttttctatcctgtgttccatggctgagcagtctattgctattaagttgttgtacgtatatatttttctatgcatatatactcattttttgtttttctatacatatatacttattctctaggaactctttcgtaacatgtttttttcacctgacagaaaatgaaaaattttccctgttcttacagtcacttcttcctcatgtattcttttttgtgtgtgtgtttgagatggagtttcgctcttctcgcccaggctggagtgcagtggcgcgatctcggctcactgcaacctccgcctccctggttcaagcaattctcctgcttcagcctcctgagtagctgggattacaggcatgtgccactatgcccggctaattttgtatttttagtagagacagggtttctccatgttggtcaggctagtctcgaactccagacctcaggtgatccgcccacctcgacctcccaaagtgctgggattacaggcatgagccactgcactcggcctcatgtattctaataattaataatgtaaattcataaaaaggggcagccagcttaaactacagcattgctggacaccataaaatagtatttgcatagctgtatactcacaaactgctactcaaggcttgctttgttcagaaggaaatctgtgttcacagaagctgaaccctgataatagctgttggctcaaattaagggtcacgtcctttggcacttagcgctattctggcaggagtggtcaaatccttgatgtaatgggtcttttctaagtcaggccctctgatctccaactcctaaagaaataaactctggtcaggccatgtttttgaagagaacgtctaaggaacaattgctgctttacacagataaagagctttttactgcttaaagcaaatcatgtaactctttgttcatcaacacaccaagggaagtttctgtgaggaaatcagtattgaatagtttgtactttatacatgttataagaatgtacttttcgggccgggcgtggtggctcacgcctgtaatcccagcactttgggaggccgaggcgggcggatcacgaggtcaggagatcgagaccatcctggctaacacggtgaaaccccgtctctactaaaaacacaaaaaaattagccaggcgtggtggcaggtgcctgtaatcccagctactcgggaggctgaggcaggagaatggcgtgaaccagggaggcggagcttgcagtgagccgagatcgcgccactacactccagctccagcctgggcgacagagcaagactccgtctcaaaaaaaaaaaaaagaatgtatttttcggcctggcgcaatggctcacgcctgtaatcccagcactttgggaggccgaggcaggtggatcacctgaggtcaggagttcgagaccaggctggccaacatggcaaaaccctgtctctactaaaaatacaacaacaacaaaaatgtatttttcttccactcccattgccagtatcaccagagattccaactccatccacattttggtctcattgtttcttttttttttttttttctttttcttgagatggagtctcactctatcacccaggctggagctcagtggcgtcaatttggctcactgcaacctccacctcccggattcaagtgattctcatgcctcagcctcccaagtagctgggattacaggcacgtgccaccatgcccacctaatttttgtatgtttagtagagacagggtttcgtcatgttggccaagctggtcttaaactcctgacctcaagtgatcagcccaccttggcctcccaaagtgctgggattacaggcatgagccaccacacccagcctggtctcattgtttcttaactctggtctcatgatttgttgttgttgtttgttttcgaaatggggtctcactgtgttgcccaggctggagtgcagtagctattcacagtggtcatagctcactgcagcctcaaactcctgggctcaagcgatcctcctgcctcagcctcccaagtagccgggattacaggcatgcaccaccacacatacctgattttgtgacttttggctccctatgagatggccaacctttttgattagtttcaggattttaaactttcaagttcctcattttgtccacaacctccttacctgccccactcctttaacccaaccaccactgggttaaaccaccattgacctgttcttagacctatcccttcctcacccaggaagcctctattgacctttcccatctgactttgcttgcctttctccctaccctgcctctcaaagcattcatgggagggatggcttcaatagcagtgcaaattctttcatactttttacctcctttggtctccatcttttcagttctaaaccttattttgagtagccacaaaccattccactttctccactcctgtataccatagtattgctagaaaagtcatgaaattcccattaatttcctgaaagagctctcccaacctttgcagtcttaactctgcaaaggtaagttgcaagcagctaatctcctggagccttcatttccttttctgttaagtggggaagatgggccatcacagtgcttctcaaacttaataggcatagaatcacctggggatcccactcaaaatgccagttctgattcaggtctgacataccccgtgatgccaatgctgcagactgtaatttgagaagtaagggcctcagtgagctccacaattatataaaaaatagtaacaaaacaacacctgtgagtccaagtcctgagtcagtctcatcattctcacactcagcagacttaactggaaactaaaagccatctgttatgaacctcttcatcaatgtttgccttttccaataattttcctctcctgaatcttttctcccttttcttccctaggttacttaaaaagaaatttttttttaaattataaaatagagacaggatcaggttggtcttgaactctttgcctctatcagtcctcttgccttggcctctcaaggtgctaggattacaggcatcagccactactcctggccctaggttactttttctacctacatccacgctgttccttctttctgaattgggatcttgttctcagttaatccctttcctccagctctttcccatttacttacaaatacctttaggctctgactggacaaaactgtgctttcccagggatagtttcatagcaacattctcaaaagaaggcaccatctctgccattggtttctttccaattccacatttgcagctgaccaacttcacctgagacactcaaactgaaccactttgaaaacagcttattcataatagtgtaattgacaataatgaaattggaagtaactattcaaaataagggaagaagtaaataactgtaatttaattttttattttttgagacagggtcctgctgtcacccaggctgatgtgcagcagtgtgatcatgactcactgcagccttgacctcctggactcaagcaatcctcctgcctcagcctcctgagtagctggtactactggcgcactctaccacccccagataattttctaacttatttgtaaattaaaaaaaaatttttttttttacagacagggtctcactatgtttcccaggctggtcctgaactcctggcctcaagcaatccacttatctcggccttccaaagcgctgggattacaggatgagccattgcacctaacctaaacgtaacttttaacgttgcaatgattaaaatgatactttgcactttgggaggtcaaggcaggaggatttcttgcatctaggagctcaagaccagcctgggaagcatggtgagattccccccatctctacaaaaaagacaaaaattagctgggcacggtggcatgtgcctgtcgtctcagctactcaggaggttgaggtaggaggattgcttgagcctgggaggcacaggttgcagtgagccaagatcgagccactgcactccagcctgggcaacagagtgagacccacacagcctgggcaacagagtgagaccccacagggtcaggctggagtgcaaaggaaagatctcagctcactgcaacctctgcctcctgggctcaagcggttctcctgcctcagcctcctgagtagctgggactacaggcgtgcaccaccacacccagctaattttttgtattttttagtggagtcagggtttcaccatgttggccaggctggtgtcaaactcctgacctcaggtgttcactcaccttggcctcccaaagtgctgggattacaggcgtgagccaccgtgccccaccgatactttgtacattggcatagaatcaatgaaaaagcagctccaaaatagtatgtctagtaagatcccattttttaaatgaaggaaagaaaatacttggctggtcaggtgtggtggctcacacctgtaatcctaacacttcgggaggctgaggtgggagaatcttttgagcccaggagtacgagaccagcctgggcaacacagggagaccctatctctacaaaaaaaaaaaaaaagagagagaaagagaaaaaatacttggaggaaaatgtctggaaggaataacatttcattgattccacaatgtcaataggtatctctggatgttgggttgtggatgatttttacttcatcttcttcacagtctaaaatttttgcaataggtgtaataggatgttagactagaactctttttttttttttttttttaggagatggggtctcactctgttgcccaggctggagtgccgtgatgcaatcatagctcactgcagcctcgacctcctgggctcaagcaattatcctgcctcagcctcccaagtaactgggaccgctggcacacaccctataaggtggacaccaccacacctggttaatttattttttgtagataaagggttttgccatgttgcccaagctggtctcaaactcctgggctcaagcaatcctcccaactcggcctcccaaagtgctaggattatagataggcatgagccaccatgtccagcctttacaaattttttgcagataatctcttctttccattcctattgctgcttaccccagttcaggccttcaaaaactttcacttggtctattatcaatagcctcctggctgatgtccccaatgacagttcctcataaatacagctacaaggtttatcttcccaaagcataattctagtcttgccactctccttgctcaaaaacattaaatgtctccccgtagccttccaactagatagagcataaattccttagcttagtatccaaggccagctcctttcatttgtaccctaatccaaaacattttttgagtcatacttaggttaggctattgcctagcttgccctaaacacaggatcttttttcttcctctgcttgtttatgccactcccattccatgttgcattgtggtgcctcccatattgctcctaacattgctcttaacacacctgttaagagttctccctgttctaagctgagcttggacatgcatcttccaacaggtagtcttacattccctttggcccgtgagcatataaggtcattttctcatctgtgctgctctgttacacatttccttgtgtattacggactacctcatgttagctttgctttcattcatgtttcatctccatggaactctggtggggacgctgtcgggttcatctgtgtgtctcccagagcagctagcccagcttcttgcccaaagagggagctcagtaaatgttgaattactttggagaatttgtttgaaaatatcttcctgatttttacctctaatgcctacttctcctttaagtgaatacccctcttgctccttggtcttttgtgtgtgagctggctaagtgggaacttaatctgtggtgtctgatgcctcactgatcctcaaaaaaacagtaacttctcagtgccatcctctataatcatatgatatcttcagtgaattaaaggtttattcattagacatctactctgtacttggtactgtggtaactgggataaaacttgctatgtacttgtaagacatcatcccagagtttttaatctttggaatgtttcagtgcctaaatctgctgtctgtggttgatttttggaacttgcctttgtttcaccattatggatgaaatacatttagagtgaagtttgaggatctcagctgaggttcatcaagtcattcaaaagcaagtagaaaataaaactggagtcaggtgcgatgactgtaatcccagcactttgggaggccgaggcaggaggatcacttaagcccaggagttcaagaccagcctgggcaatatagtgagacattatctctacaaaaaacttaaaaatcagccaagcatggtggtgcatgcctgtagtcccagctacttgggaggctgaagtgggaggatcgcctgggaggcagaggttgcagtgagccaagatcgtgccactgcactctagccagagtgacagagcaaaactctatctcaaaaaaaacaaaaaacaaaaaaaaaaaccgtagcacactcttgcttttctatcaataactggactctcaagaactggtttctaaattagtgactgaaaatattggtcaaaatgatcagaaacctcattcatttgcattttctctctccctctctccaattaccctcaagagaatttggttcattctgagcatcacagatgacttaattttgtggtaagaaaataggaattagagtcagccaattaggaaacctcaaggaagaggaagtgtctctaggctaaagggaaggctgttgagtcttatttcctctctgttcttgactcactttcttagtgactggccaatctctgcacctccctttccccaccttcagggagctgagggtgggggtggggaatagagtgaataaagtctaaataaagttcataaagatcccaagatgtagggaggtaccatgaaataattgatcttgcagttccatcccccatcaacattcatgggtgaaggctgcatgtgtgtgtgacacgataggtaagaattagctgctttccaaattaagacagagtgagtttcacttctgaataatagcagtgtgcagtgcaggcccatgcagtacctatttggtttcattctttactagggatagatcaaagcgaaatagccaacaattcaggccttattcatcagtgcgccccctcctttcacaaagaagctgagttccagtcaaatagtaggtggcttaatttcaccgtagtggacttctatgccttttaaagtgggtacagcatactcacctgtttgagagaagaagaaactgagattatggtcaccaagtaatctgtggcaaggctcagattcaaacccagtgctgctgacactcagagcagaacctgaccattttcaaagttcacaatatgaccgttcgcttctcccacccttccccatcttatttttcactggaacatttgctgttctctcaagctatgaagggcttcctgtgttaacatgcctaaggggaagctgtatgttaaaaaccaccaacggttaagcccaagccagctggggtcttccgttgtttcttccagtattgtggggagacccatgagaattctcagtgtttttcaaagtccttggcttccagaaacaagaagctgagcatcgggttttcatttaagacagagcttggaaaaacaagaaatatcaaaagccgtaagaggataatactgaagttattatagctaaaaaacaagggtgaactgaaaagctaaaggttttggctctatagaggggttcatgtatagttgtatttaaatgtcctttgggttgaagtgatacaagtttattccctctcaaaccaaaggacagcatttattctggggaatggctgagataatccaggcccagaaccacactgactggttagtaaggggatggcacagaagggaaatgatagttgtgtgacttctatgttgctaaacactgtattgcatccaccattggttccagagggtagaagaaccacactagatgttacagacaagggggcagaggagggttgctttattggaatctggggtttgaagggcttatgagaagcataacctcatgtaagttgcctcatgtaagtcacagaagtcacaccccaaaccacatttggtgctccatttgtccgtttcctttacccataaattatagaactagagtagagaaagtacccttttctcctcctccaacactcatccagaatgactgaagtcctaggtagccaaccatagctactggggtgcaagaagaactgaaggatctgagaaagacaaaaaagggaaagatacagagccaggttcttgtcctcagggaggaagctctgaattagtgaaaatctggccagagagctgggcagagtcctacgtccctttctttacccagaactgctacatccctagctctgtccttattacagctgtcctttggggccccttaacatcaggatactcctctaagatgctgtattgcaagtggccaactcacagggcactgtgtttcaacccctgctaatatcatatggaaacacaaataggcttctttttttttattccctggctcactgaaactgccggcagagcaccttaagctaagggctacattcttatcttgcctttaaacaccatgtgattcagcatgtctgcagtctctgggaatctacactgccactttctacctttgccttgtgggtaacccttaccttccacctacctccacccccaggggagaatgtgggccttgccaaacggaggcccccaggagattttccaagactcacgagatgtcaagtcatctctaaattttttcaaaaaaccagaaagtcatttcaaaaagtctaacttgatggccccacagagaggaagatcaaactttccacacagacacagcaagtctgccacccaggcttgtgttagagctgcagtattggtacccagacatttctgaaagctccctgacccaggggaaagtccacctgagtgagtagtttagctgctgcccggagcccgttggcacatattcacgaagtcggcttccaggggatttccctttgaatggaattggcaaacgttttgtctttctgaaagatttcccagaggaattcatttagctatgtggaaaaatctcaaattctaatataaaatctctgaccttttagggttttgaaatttggatctctcatttactgacaaatctttttgaataaagaaaaacaattaacataatagaaaacctaaacagtgagaatgcatattcaacaaatgattggagtgcttacctcaggctaggcactgtttggtattgaggatacactggtgaacaaaacagatgtggctagttgggcatggtggctcacgcctgtaatcccagcattttgggaggccgaggtaggcggatcacttgaggccaggagtttgagaccaaactggccaacatggcaaaaccctgtctctactaaaaatgcaaaaattagccaggcgtggtagtgcacacctgtaattccagctccttgggaggctgaggcacaagaatcacttgaacccaggagacggaagttgcaatgagccgagatcgtgccactgcactccagcctaggcgacagagcgaggctccatctcaaaaaataagccaaaaacaacaacaacaacaacaaaaacagatgtggccaccaccctcaaggagcctgatttttaatcctagctttcaatttatgtttgtgttgaaaatgaggttgattccttccaggaagtatcctttagagtattaaaatatatacaccatccaaaatcctatgcccagcttaaataccataccacaagaggggatgaagatttgtttgaatgtgtgaaataattctcatagactgcagggtgcgtaatatgtgtgatttgaaatatcccatcacaggccaggcatgctggctcacacctgtaatctcagcactttgggagggcaaggcaggaggactgcttaagccaagcttgtccaacccatgacctgcaggctgcatgtggcccaggatggctttcagtgtggcccaacacaaatttgtaaacattcttaaaacattatgagatttttttgcaattttttttttagcccatcacttatcattagtgttagtgtagtttatgtgtggctcaagacaattcttcttccaatgtggccagggaagccaaaagattggacactcctggcttgagcctaggagtttgataccaactagtaactgtcacaaatgaatttaaattcaggtttaaataaaaaaggatgaactaactcccacaccattagggattcattcattcaactaatatttattgagcacttaatatatgctggttattgttcaagttgtctgagctgtatcagtgaacaaaacaaaaatccttgccatcacagaggttaaattgtgggtgggcatgagggacaataaacagtgaacaaatttatgatttttttttttttgagacaaggtctcactctgttgcccagactggagtgcagtggcatgatctcagctcactgcaacccccacctcccaggctcaagcgattctcctgcctcaacctctcccgagtagctgggattacaggtgcacaccattactgcatggctttttttgttgttgttgtattttaatagagatgaggtttcaccatgttcgccagggtggtctttaactcctgacctcaaatgatccacccacctcagcctcccaaagtgctgggattacaggtgttgcaccacgcccagcctaaatttatgaattatataacagaaagaaaaaagatactcaggaggctaaggccaaaggatcccttgaggccaggagtttgaggctggcctgggcaatacagtgaaacctagtctctaaaaaaaattttttttaaactagccaggactgttggtgtgcagctgcagtcccagctccttgggaggctgaggccagaggatcacttgagcgcaggagttcaaggctgcagtgatcatgccactgcactccagtctgggtgacagagcaataccgcatttcaaaaaaaaaaaaaaaaaaaaaggcagaatagcagagcaggaacaaatgaaggcagagggggagaagtattaagaaattaagactgctacaaagttttggctctgaagacttggaaaatgtggtacaaggggcaggaattcgcttgagagggaatagatgagataaggagttctctttcaaacgtggggttttgaggtgccatatgtctcaatgtgaaaaatatcccattggcaattagagaagatccagttccagagaagggtccagctagagacctaaattcaggagacatcagtatagagccagctgttgaggctgtgagactaagttcatcctcctagcagccttaccgagaactctgactatgcaggcaaacagtaggaattacagtataccaggctctttcagagtctgagaagacaaaagtcttcaaaaggtcaagaggagttggtcctgagagtagggacctgaaccagaagcaagggaaaacttttatcagtccacttgggaactagccagtgctggaaagtaccctttgtgccagagatgctgtatgcatttaccgttttcttaaccatgtttcagtttgggattttttagattaataaaatagaaattaatttttaaaaacacttgagaaattggaattcccttatgaaggtcttagaacattttttctttaaaatagaaagttagtttaggaaatacattaaaggagtaagaatccctacttcagtattacagcaggcattacagtgccacaaacattagtgtatcttgccttccttgtacacaaaccatctttatctggggagaaaaacaactatcctaacattatgttttgcattttgtattcattaaatgggagtgtgccttggggaaagtcaaaataggcacaaatttgcgatttgaaaagccacctgctcttctcccggagctacctcgccagcttggaattactctcattaatccatgcaacactagctgctctaagccccatcccctcagctctagttcattattaatcaagggtgcttaacctcattccccattactcgtatttcaacctcagttccacatttttttttttttatttagatagatcttcctctgtcgcccaggctggagtgcagtggcgtgatcatagctcactgcaacctggatctcctgggctcaagccatcctcccaccttagccccccgagtagctgggactactggcgcgcgccaccacgcacagctaattttattttttgtagagacggggccttcctatgttggccaggctggagttaggctttctttctttttttttttttttgagacggagtctcgctctgtcgcccaggctggagtgcagtggcatgatctcggctcactgcaagctccgcctctccggttcacgccgttctcctgcctcagcctcccaagtatatgggactacaggcgcccgccaccacgcctggctaattttttttgtattttttagtagagacggggtttcaccgtgttagccaggatggtctcaatctcctgacctcgtgatccgcccgccttggtctcccaaagtgctgggattacaggcgtgagccaccgcgcccggcctccgctttcaagactaaaaattgcctgggcactgtggctcaagcctgtaatcccagcactctgggaggccgaggaaggtggatcacttgggctcaggagttcgagagctgcctgaccaacatggcgaaaccccgcctctactaaaaatacaaaattagccggtcctggtggcacacgcctataatcccagctactcgggaggatgaggcaggagaatcgcttgaactcaggagggggaggttgcagtcagccgagatcgcgccattgcactccagcctgggcaacaagggcgaaactctgtctcaaaaaaaaaaaaaaaaaaaaaaaagactaaaaattgtcggggctgctggccaaaagaagatcttgcctggctgtcagaaaataatgttctttccagcggctgcttgaacccgcttccttcagtgcctaaatttaacggctgcagctgcagctgcaacctgtttcccccgtaataggaatgaaagtggaggataaaagaggttaggaagaaggcaagccagcagtctgaccagacacaggatgcatgtaagagacttgttaattacacgttctatttaggtcacactgataggcaaatcgctattctgggcccccaggaagccttttcgtccttgctatagtcaattcattctccagatgaaagcctgaaagcgccacgacccaagtttcacgtctatccactcaagaggcctgcttggcgcaggcgcataccttcaaaggcctcccgccctcactccaccacccccttagggggcggggcctcagagctcagtgctcgaactggctccagagccgtgagttcggcatgcaagagcggaagaaacgcggctggtaccccggaagcagtcgctgcaacttccgggaggtgcttgtgtgcctggtgcgggagctacggggcccagggattgtgtttaaagtagtgcttctaccaacatgtcccgtggttccagcgccggttttgaccgccacattaccattttttcacccgagggtcggctctaccaagtaggtgagtgaaccaggttcgcctgtgggccacctgaattgccctgtcatggtacgtgcctggagcgagcagacgcggcccgggtttagtctggggccgaagctgggctggagctgggaagggagaacggctgaagctggattgagctctgtggtgtttgcacccccgtctggacgcagggatcgggggcctgaaggcctgtctctgcagggcgagcggccacactgcgtagacccaatggagagttaaggaagatagggctgtaatgcctgactccggcttcgtgaggccccttcagttattgtattctgtcctggccaggcacaaggtctgtttctaaagggtaattgattccttaacgtctcaactaaaatgcctcctctccgttttcctttgtttgcagcatggacttctgtggttaattccacacaggcactcgaagcctgctatataccagacactgctagtcctaggagatacaaatgtgaatgttacaccctcttctatactgaagctcacagcttagagtgacagatacgttaaacaaacggataaaaaaaattaaaagtgccaatttacaaatatctacagagttcaagacatctttgggaatctgatagaatgagtgactcaattctagagctgctcttgagattggcatcccctttttacccacatctgtttgaatgctcctgtaatttaaatgccgattctgagttgtagatgaggtactgtgtactagtttactgaagaacacctgtagtggaaagaaactatcagttactcggaatagtaatgtattgcgctgaaacggtgtcaaggtttaggttatgattataagccagacccttgatctcttaccatagagaatttagtgtcaggagggcttgatttacatctggtccgtgatggttttatttttgaatgagtttagtggctccgtgtcttgcacagtaatataatcatctgtgcttggaatcataaggagagagttggtctgtaaatgaggttctcttcacctgtaaattttagaaatagagttaaagataacttggaatgaaactgctcagtgtattactgcatagtgtatataatgtagcaagaaacatcttgttggataattcagtagcccttttaatttatccccaattgaaaaacatgattaaagatagaacaaagagataactgtatcctcaaagaattttcatttattgtattaaattcctgagttttaaataattttcgtatattagactactgctttcagcgttccattcgtgatttttaatatgtgaacaggaaaagtcactctgagacctttactttgtttctatatactgtattgtgaagtccagccataaagcataatcgttaatgcttcccagatttggtgagtggaaaggctgaacacagtgtcattgtgatggttttaaaagatttggaagagaacatctatctgaaaacaagttcattatctagacagaatgattttttatttatttttatttttttgagacagagcttcactcttgttgcctaggctggagtgcaatggcgcgatctcggctccccgcaatctccgcctcccgggttcaagcaattctgcctcagcctcccaagtactgggattacaggcatgcgccaccacgcctggctaattttgtatttttagtagagacgaggtttctccatgttgatctcgaactcccaacctcaggtgatccacccacctcggcctcccaaagtgctgggattacaggcgtgagcaccgggcctagcaccagcctagacagaatgattttaatctctgtgaataacacactccctctgctattcagggcattaattagacattgttaggaaaatgaaagtgaaagagtagtatgagcaagcagtatagtgaagagttcaggccctggagtcatacatggattcaaatctctgccctgctccatactacctgatctgggcacttgccaggtatgtaaccttagccttagtttctctttccaaagttgggctcataataattcttccttaaatggtggttttgagaattaaataaggcaatgtatgtagagtgcttaacgtgtgcctgccacatagtaaatgctcagtgaatgttattagatgcttgtttgattctttggcccccccttttttttttggtctattagattagtagctctgtatggaatatttccctttttatgggtccttccatgcttagttctccagtaaaatatatacataatcataatattctaaatactgtctgtttgtaaactttagaatcctccaaagacaaagcatggaaggattataggatgcaagttgttaacattgacagtaggaaaataatattttaaaaatgggatgatgatgaggggagattaatggaaggtaactatgctctttatcttccatacttgggactcaaaagataaatgtcgtctaaagttgatatatcaaaaaatagaggtagacatttaaagttataatgcttggccaggtgcagtgcctcacacctgtaatcccagcactttgggagggcgaggtgggcagattacctgaggtcaggagttgaagaccagcctgaccaacatggtgaaactctgtctctactaaaaatacaaaaaactagctgcttgtgctggcgtgcctgtagtcctacctcctcaggaagctgaggcacaagaatcgcttgaacctaggaggcagaggttgcagtgagccaagaccgtgccattgcacctccagactgggtgacagagctagactccatctaaaaaaaaaaaaaagttgtaatgccaatcataattataaacatactttataattattaataacatattattggcagtgtttgctcccagggagtggagagaaagactttttcttttttttttttttccctttgagacagagttgcgctcttgttgcccaggctggagtgcaatggccgtgatctcagctcactgaaacctccacctcccaggttcaagcgattctcctgcctcagcctcccaagtagctgggattacagacatgtgccaccactcctggctaattttgcagttttaatagagatggggtttcaccatgttggtctggctggtcttgaactcctgacttcaggtgatccacccacctcggcctcccaaagtgctgggattacaggcatgagccattgcgctcggcctgaaatatttctcttaatgtacatatgcaggttgtatgtgtgtgcatgtattcatttgttaaaaattgtagaacacctagctttgtaatctattttcaggaattgcccaagttactagagggaggaggtgcattgtagggggaatgggactgaggccctagttggccaaattcagcctggctacttgtaggcccttctcttctgtttgctgatcctttgctggataggtctggcaaaggagaagaggagtggtcatttggatttgcttgacaggtgtatgtgagcactgcctggttgctacaaagaagggagcgtgctgatagggaactagaaagaaatggactggtggagacatactgaaaataaaatgtagaagtgtcattgtgtattgaagccagaattcctgagttcaagtccttactgcataccaactctaagaactttttatctgtaaaataaagataataaccacctaccttatagggctttaaggatttaattagttaataaatgtaaagcatttaaaacattgcccggtatatatagtaagcactcaatgttttctgggtgtttgtttgtttgtttgtttgtttgtttttgagacagtctcacttggtcgcccaggctagagtgcaatggcgtgatctcagctcactgcaacctctgccttctgggttcaagtgattctcctgcctcagcctcccgagtagctgggattacaggcgcctgccaccatgcccggctagtttttgtattttttgtagaaacagggtttcactatgttggccaggttggtcttgaactcctgacctcatgatctgcccacctcggcctcccaaagttctgggattacaagcgtgagccaccatgccccgccttcaattagtattttctgtaggggatactgtcaagaagaaacaaatggctgatgtaaatggagtcagaaatttcacaaatgactgagaagtacttaccatttgcctcttttgcaatttaaaaaatattcttatttcaaagcagtatttctcaacccaggcttctcatgccctctttgaatctgatttgaaattcaatgcatgtgtgtgcatgcatacacatacatacatgtgcatatctacataaatacatatataactacacagaaaaagtgatgggatcaaatactgctgtattttcaaacctcatattccccctctctttccccctcccccagtgccaagatttctaatgaccccacccccttgaggaatcactgttctaaagagtaaaaggttaggaggcactttatagtgaaccacacatctcaattatgtagcctacaagtttagggaaaagcaaataagtagcttcaaaaaaatcttaacaaagtttttttttttttttttttttttttttgccacacagcattgaaattgaatatgaatatactttctttgtcccagtagaacatcccgttttatttttatttttatttttttgggggggattgagtctcgctctgtcacccaggctggagtgcagtgttgcaatctctgctcactgcaaactccgcctcctgggttcacgccgttctcctgcctcagcctcctgagtagctgggactgtaggcgcctgcctccgagcccagctaattttttatatttttagtagagacggggtttcaccgtgttagccaggatggtctcagtctcctgacctcgtgatccgcctgcctcggcctcccaaagtgctgggattacaggcgtgagccaccgtgaggcctgttttttaataactcatagaatatgtatctctcaattcatttttatttttcaagcccacgtttatatgggagaaaatcatatttacatcccgaaactctacagcattctaaacaaaattatgggtggaaaaagtcttgagttacatttctaataattggtaggacctcagaatcacctgtaaatgctttgcaacacctgatgagtgacataaagggaatatatatctctgctgttgttctcacagcctgagctgtgtacagtgtgagccattgtcttgcatcgtgtgcctgtcctgaacattttgccaccgtgccttttatgtttagccactgtatttttctagtatacaaatgaatcccagagaaattgaggaagtgttggggaaaatggtagggaaggaaacaaagcaaataagatattactatggaaatgacatttctacatacaaaataactgttgataccattttgtttgagcaaggaagcaatttacttcctaacctaatggtttgttgttgggttcaaccatgaaactgctggtctttgactaatttttaacctgtaaaaatggcagtttcgtgtggttcaatctaatacttaggtattttactgtgtatttaagatttagaaaattgggggcttggagtcgagtttaatgcattataatttttcccatttaaaaactggaaaatggggccggacacagtggctcacacctgtaatcccagcactttgggaggccgaggcaggtggataacctaagtttaggtgttcaagaccagcctggcccacatggtgaaaccctatctgtactaaaaatacaaaaattagctgggtgtggtggcgtgcccctgtagacccagctactagggaggctgagacaggagaattgcttgagcccgggaggtggaggttgtagtgagctgagatcgcactgctgcactctagcctgggcaacaaagtgagactccatctcaaaaaaagaaaaaaaaaaggaaaaggaactatgacttattattttcttgcataatcttggacattcaagaatagtttactcagttttagagttctgtaagtttccaaaattttagcccaaaccaaagtctttgatcatgtagtgtttaagtactgttgccaacgtttgaatcctgactttaaaaaataaatatcattttaaaatgctgcccataaactattatttttatctttatttctttattattattattattattttggagacagagtttcactcggttgcccaggctggagtacagtggtgcaatctcagatcactataacttccgcctcccaggttaactcaattatcctgcctcagtctcctgagtagctgggattacaggcgcgcaccaccatacctggctaatttttgcatttttagtacagacagagtttcaccatgttggccaggctggtctcaaactcctgacctcaagtgatccacctgcctcggcctcccgaagtactggtattataggcgtgagtcactgcgtccagctatttattttttgagacagggtctcactctgtcgcccaggctggagtgcagtggtgtaatcatagctcactgtagcctcaaactcttgcactcaagaaattctcctgcctcagcttctcaagtagctgggagtacaggtatacaccaccatgctcagataactttttatttttagtagagatgacatcttggtgtttcccaggctggtcttgaactcctgggctcaactgatcctcctgcctccattcccaaagtgctgggattataggtgtgagccgccgcagtgcccagcctctttttttttttttgagatggagtctcaccctgtcacccagactggagtgtagtggtgcaatctcggcttgctgcgacctctgtctcctgggttcaagcgattctcctgcctcagcaccccaatagctgggattacaggcgcctgccaccacacctggctaatttttgtatttttaatagaggcagtgtttcactatgttggttaggctggtcttgaactcctgacctcaagtgatccacccgcctcggcctcccaaagtgctgggattacaggcgtgagccaccatgcccagcctcttttttcttaattggccttcatataccataggttgtccgtatctgctctaaaccatgatactactgtttaccctgccagtgtttctttaaaagatactctttaggtgttgagttgtctaaattctttgctctggcagtttccatttttctggaaattattataaaacatttcatggtggtagtgttaaaatggggattcatttatacaagcctttactgaaattacagtgcagcttgatgagtactaaatagtataaaaaaggtattacaggaagtgactaactgcctaggagagccgggaaaggcttctcagagatgaattggcccagatgaagattaaataaggaaatttgggggaccagtgcatagatcagtcagtgtgaatgcagtatagacagtaacaactgaaagagtaaattatagcaatattttgaaggggcttgagtaccatgctagagtttggacttttttccatgtgttttgaacagagctagcaggggtctttaagaatggcgaggtaattaagtaaaataataggagagttgagtgtagaaatgggattagaaagggactgatggttcacacctggaattccaacactttgggaggctaaggcaggaggattgcttgaggccaggagttcgaaactagcctggacaaaataacaagaccttgtctctgcagaatatataaaatgaaattagccaggtgtggtagtacacacctgttgtcccacatactctggaggctgaggtaggaggattgcttgagccgaaagtttcaggttgcagtgagctacgatcacaccactgcactccagcctagacaacagagtgagaccttgtctcagaaaagaaaataaaaaggggactggtggcaggaagaacaattagaagaggtttgctcagtatcagtaattcatataaaccctaatgagtgaattaaggtaataagagagaaagggtggaggggtctcttgagcttatttttcacatttttattatagaatactttagacaaatgtagatagactagtacagtgaccttcatgtacccatcacacagcttcatctgatgtcaatattttgtcagtcttgttttctccctttcccacgcactttccccgctcttctagagtacgttaaagcaaatcctaggtataagaatggacatttcttgggaaagggcaggaggttagagtcaagagtgataacccaggtttgtagcttgaaaaattgagtggttagtaatacaattatgaaataaggactgtaagaaaagcaggtttataaagaggaagagtttatttttagacatgtctgtggctaataggcataggtatttgaagaaatagacatttgtaattataagtccagagctagagatgacagattagtagtgattatctaggttatagctaaatctctggtttagggtaaaatcatccagggatggagaaaataatagaattctgggaaataccagtatttcaggagctggctgaagagatgaaagcagtgaagaagattgagaagggaagttcagagaagtaggagaggaagagtaggaatgatattcttaacaaagaactttaaatttggctgagcgcagtggttcacacctataatcccagcactttgggaggccgaggcgggtggatcacttgaggtcaggagtttgagaccagcctggccaacatggtaaaaccccgtctctactaaaaatacagaaaaactagctgggtgtggtggtgtgtgcctgtaatcccagctactcaggaagctgaggcaggagaatcgcttgaacctgggaggcagaggttgcggcgagccaagattgctccactgcacaccagcctgagtgacagagtgagactccatctcaaaaaaaaaaaaactttaaaatccagttgctcagttacactagccacattttatgtgctcaatagccacatatgactagtgactatcatattggacattgcaaatatagaacattgccagcatcacagaaatttctgttggacagcactggtctatataaagaacgagggcccccttaatgaatcctggcaaattcacaggtgcattctctgttgagaagcattttttatatgtaaaatgttttttattttgtgagacaaaagtttatgtggtagggaagatactcttttgtggcttttaccttttgcattatttaagcaataagcatgtattcatttatttagttcagggatgacagacacaaatgcttacacagaccagataagtaatgccagtgagtaaaacaggctgagtgaaagataacaggaaatggtgggacctgtggaaaactgcaaaacacctgctcagcttaggtgattttttttttctttgtggccagttgctatgtgggattgaagatcaagtgttactagaatttttttttttctaggaaaaaatcacatctctaaagaccctctgcctgcttttgccatataaggtaacattcacaggttccagggactaggacatagatatattttggggatgcatttaccaacctaccagagggttaatgattttattggctcaaagaaccagtttttgacttagctggtttttctcttgttgtctgttactgtttcttgatttctggccatgttgtccaggctggtcttaaacttctgggctcaagcgatcctccccattcagcctcccaaagcagtgggattacaagcatgagccatcacacacagccagaatcactacaaatttagtggtgtttaaacaacacacacttattatgtcatagtttctttatgtttttcatttgtttttctctgttttcaaaattttttctatttttggttttcagacattggaccataatgaatctatatgtgattttctgttttcattttgcttggagttttctgaggttctttaatctgaaatttttttgtcttttgccatatttttaacatttttagccattatttcttcagattttgttttccgattctttgctctccatataggactccagttgtacatatcttacacattttgatgtagacccacagattcgttgtttttttcaactattttttctgcctttttaagattggatcatttgatacattttcatattcactcactctttcctttctcatctccattctacagttacgtccatttggtgaatttttaaattttacgtattatatttttcagttctacaatttccttttgcttctttcattttttctttgctgagatttcctatcatttttcattttgagaacattttccatcatgtcattgagcatagttataatggttgtttttaattctttgctaatacagcaacatctgggtcgtctcaggattgttctttttgagaattaaacacaatattcctggtttttgttgtttggttttggttttggttttttagtttgacttgatttgttttttggtatattgagagttccggattgtatcctggacatttatgaatgttattttatgaagactgtggattctgttatatttctccaaagagtattgacttgttttgttctaataggcagttaatttggttattctcaagctacaaagtctgtctcttgggtggcatcttaaatctcactcggtttcttttatccttaactaggccgcttggagtctgccttgtgtgtgttgttatggaatctgctagagatttgggcagtgtttatatatagaagttgggactctcactctctagtgctctggtttctctcccttgttttctggcagctattgttaccccaaactgttctctagttcttcaggccaaaaagactgagttttctgtgggagttcagcctttactgctctcagattatgagccacaaaaatgggaaactcaactcatgccattcctttctcccaactgttgacttcccctctagaatctgactttgtggtgtctttaggtagttgttgttttgtttagagttagtactttttatttgtggagggctgatctgatagaagctttattagccatatcaggatcagaatcaagaagcactttgaaagttgtacagctagtcctccatattcaacccatattcatgggttcatcatccatggattcaaccagctgcagatcataaatattcagggaaaaaattgctcctgtactgaacatgtacagatttttttcttgtcattattcgctaaacaatgtagtataacaactatttagcatttacattgtattagctagtgtagtgtaagctagagataatttctttctttttttttttttaaacggagtctcactcattgtattagctcgtgtagtgtaagctagagataatttctttcttttttttttagacggagtctcgctctgtagcccaggctggagtgtagtggtgcaatctcagctcactgcaacctccacctcccaggttccagcgattttcctgcctcagcctcctgagtagctgggattacaggcacctgccaccatgtctggctaatttttgtatttttaatagagatgcggtttcaccatgtcggccaggatggtcttgaactcctgacttcaggtgatctgcctgtctctgcctcccaaagtgctgggattacaggtgtcagccaccacgcctggccaagctagggataatttcaagtatacaggaggatatacataggcgatgtgcaaatactgtgccattttatatcagagacttgagtttctgtggattttggaatccatgggaggtcctagaaccaatccccacaaatagcgaggcaccagctacattttagaagttatttgtagtgtaggctgagcgcggtcgctcacacctgtaatcccagcatctgggaggccgaggtgggtgtactacctgaggtcaggagttcaagaccagcctggccaacatggcgaaacctcgtctctactaaaaatacaaaaattagctgggcgtggttgtgcacacctgtaatcccagctactcgggaggctcaggcagaattgctccaacccaggaggcaggggttgcagtaagccaagattgcaccactgcactccaacctgggcgacagagtgaaactccatctcaaaaaaaaaaaaaaaagttatttgtagtgtaatgggatggtaaaattttgctattataattaaccaattaaattgggggttatggctcatacctgctgtaatcccagctactccagaagccgaggcaagaggatcatttgaggccaagagtttgagaccagcctgagcaatgtagtgagaccccatctctaaaaaattgttttaaattaggcatggtgatacccacctgtagtctcagctgctcaggagactgaagtgggagggtctgaatcagaagtttgaggctgtggtgagctatgattgtgccactgcactcagcctgggtgacagagcaagatgctgtctcttgctcaataatgataataatgataaaaccagttaaatccaagccatatttgaagatttcttttcttttgtttcttttttttttttttgaaatggggtcttgctctgttgcccaggctggagtacggtggtgtgagcacggctcactgcagcctcgacctcctgggctcaagtgatcctcttgcctcagcctcccaaggaactgggaccacaggtgtaccaccatgcctagctaacatttttttgtagagacagggtcttgccatgttgcccaggctggcctgggactccggggctcaagcagtcctcccaccttggcttcccaaattgctaggattacagatgtgagccactgcacccagctgaggatttcctttaaggtgatttttctagaatcatttttgctctgttcttttgttctctcttaaatagttagccatttagaaatatttgatgatttattacagtttctattaaaagagattctttagcctgataggcagtagctttcttagctggtcgtcatcacctgtggctttttgaacagatgaggccttggctcagactcagtgcccagagtgacactcgaagacagaattttgaaataatctgttatatgtcaaaatgtaaataatgattgggattatgaataattatttaaaagttatcttctgtgttttcatattttctaccatgagcatgtattgatttttgttgcttttcccctgattacaaaatatgtgcccaggccaggaacagtggctcatgcctgtaatcctaaggtgggaggatcacttgagccagagtttgagaccagcctgggcgacatagcaagaccccatatctatttttaactaaaaataaaataaacaggccaggcatggtggctcatccctgtaatcccatcactttgggagtctgaggtgggaggatcgcttgagtccaggagtttgagaccagcctgggcaacatgggaagactccatctctacaggaaaaaaattgaaaattagctgggtgtggtggtatacacctgtggtcccagctactcaggaggctgaggctggaagatcacttgggcccgggaggtcgaggctgcagtgagctatgatcatgccctggtgctccagcctaggcaacagagcaagaccctatctcaaaacccaccaaaatatgtgtctattattaaatttaaatattgcagaggctgtcctggtggctcacgcctgtaatctcagcactttggaatgctgatatgggaggatcgcttgagctcagaagttcaagaccagcctgggcaagatagtgagacgtcatctctactaaaaattttttaaaaaagaaaaatttgggccaggtgcagtggctcatgcctgtaatcccagcacttcaggaggctgaggcaggcagatcacctgaggtcaggagttcaagaccagcctagtcaacatggtgaaaccctgtctttactgaaaatacaaaaactagctgggtgttgtggcgggcagctgtaatcccaactactcaggacgaggccgaggcaggagaatcgcttgagcccgggaggcagaggttgtagtgagccaagatcatgccactgcactccagcctgggtgacagagcaagatctgtaatcttactgtcgaaagacagccattatcaattatgctacatggtgccaaagcagtttttttgtaagctactattttgatcctagtgttttaaccaatagaatggattgacagcagctagaagtgcataagctgaggtttgttatagatggagtcatatgttggcctggcatggtggctcacgcctgtaatcctaacactttgggaggccgaggtgggtggatcacctgaggtcaggagttcggcaccagcctggccaacgtggtgaaaccccatctttactaaaaatacaaaaacttagctgggcatggtggtgtgcacctgtaatcccagctactcaggaggctgaggcaggagaatcacttgaacctgggaagcggaggttgtagtaagccaagatcgtgccacctcactccaacctgggcgacagagcgagactccatctcaaaaaagaaaagagtcatatgttgtaggtaacataaaaattgcaaaaagcatgatccagaaatattcaacttggtagacaaaaattaatgcaaaataatcaaacagcaattaaaacttcatgtggtcaaattagttactgaccaaaagttaacaaaagtattaagtctagaaaaaatttaaagcagctaaatttgacctgggaaaaccagacttagaaataatggccacaaaaaaccttttaaaatgacaaaacatcattgataaagatgcagtatgataaaaattaaattaaaccattattggggcggggagtggtggctcacacctgtaatccctgcactttgggatgccaaggcaggtggatcacctgaggtcaggagttcaagactagcctggccaacacagcgaaaccccgtctctagtaaaaatacaaatattagccagatgtggtggcacgcgcctataatcccagctacttaggaggctgaggcaggagactagcgttaacctggcaggcagaggttgcagtgagctcaggtcgcaccactgcactccagcctgggtgacagagcgagactctgtttaaaaaaagaaaaaaactttattggaaattgggtgcatcagcttaatgaaaataatttcagtaaaatgaaaatggaagaaatggagttggtttaactgtgacttgtggtcattattattattttgactttgcacatcctggaatgctatatgagcattctgtgttcatgtagctctttctcattctttttaatgactattatttcattgcaagaatctacagtaatttattccaacttaaaaaaaactgttctgttttccagaatatgcttttaaggctattaaccagggtggccttacatcagtagctgtcagagggaaagactgtgcagtaattgtcacacagaagaaagtacctgtaagtaatactgcccaaatagttaataattgcagaatataagaatttttcagccaagtgcagtggctcacacctgtaatcccagcactttgggaggctgaggtgggcagatcaccttagatcgggagttctagaccagcgtgaccaacatggagaaaccctgtctctattaaaaatacaaaattagtcaggcgtggtggcacatgcctgtaattccagctactcgggaggctgaggcaggagaatcacttgaacctgggaggtggaggttacggtgagccaggatcacaccattgcactccagcctgggcaacaacagtgcaactccgtctcaaaaaaaaaaagaaaaaagaaaagaaaaaagaatttttcatgggtttgtagaaaagtgtatttttatatacaaatattaacataatcttgctttgaccctgctttcctgtcatccaagaagtgtctattgaacgtctatatacagttcagctgtgtggacagaattaacttattaaacttcatggcgtgattataagcataacggtgtttctaagtcttttgtctttggggaccttgagacaaatttttattaagctattgcttgtccacaggaaaagtatcatctagaaaaggtaaatagagcccctcgaaactaaaattgattttaactataaaatgatcagaagacatttattatacagtttatttttatggttccatagtattgttttctccaagaagcagggcaaattaaaaacataattttttttataactacacagaaacctgtatgttttttaaaaaattatctttgtttattttgtttattaggacaaattattggattccagcacagtgactcacttattcaagataactgaaaacattggttgtgtgatgaccggaatgacaggtaattaatctgtagatatacaagacatctgtagatatacaagccttttgttattttcttcaaattattttgagttttgtattaattttaaacttattgcctgattttcaagtgccatgagtggatttgcagtcttctaagactagtatcaatattttaagagtattgtgagcttttttgaaattatacctataatagaattagatgcttatgctgctgtcggagaaactgggctgagggccctttcatagatgattttatcttatttcagctatagttagtagtttaaggggacctaactcagtatatctcaaacctggtaataatggcatcggttagaagtgagtgagaattattatgaaaattattttaggttgggcacagtggctcacagttgtaatcccagcactttgggaggccaaggtgagaggattgtttaagaccaagagttcaaaaccagcctgggcaacatggtgagactccatctctataacaaatttagaaattagctaggggctggtcacggtggctcacacctgtaatcccagcactttgggaggccgaggcaggcggatcacttgaggtcaggaattcgagatcagcctggccagcgtggtgaaactccatctctaccaaaaatacaaaaattagctgggcatggtggcgcacgcacacctgtaatcccagctattcaggagggtgaggcaggagaattgcttgaactcgggaggcagaggttgcagtgagctgagattgtactactgcactccagcctcggcaacagagtgagactgtctcaaaaaataaaaacaaaaataccaaaaaacttaaccagctatggtggcaggtgcctgtaatcccaactactcaggaggctgaggcaggagaatcgcttgaacccgggaggtagaggttgcagtgagccaagatcatgagactgtactgcagcctgggcaacggagcaagactccatttgaagaagaaaaaaaaattagctggtatggtggcacatacctgtagtcctagctactcaggaggctgaggtaggaggatcacttgagccaaggaattcaaggctgcagtgagctatgatggctcactgggtgccagtccaagaccccatctctaaaaaaaaaatgaaaaactaatttaagcctaaaaacaaagattaagaaagattattctctctcaaggcctttttttttttttttggagacagagtctcactttgtcgcccaggctgctccgcctcctgggttcaagcaattctcgtgcctcaacctcccaggtagctgggactacaggcatgcaccaccacgtgcagctaattttatgtttttagtagagacaggatttagccatgttggccaggctggtctcaaactcctggcctcaagtgatccgcctctcttggcctcccaaagtgttgagccaccatgccctgcctccttaatgctttttcttttgggagttactggatacttgcagaaactattttgactgctgatgaaaggctcagtataaaaggggagtactgtgtagagagcttcatgtttttaaatttttttcatatacttgttgatgagttatttagtattcattgggggagaaaaagccgtagcggaccctttctctttaactcatgtatgtctatatggtgggaaaattgcctggctaaattgcctggctttcaggtttgttctttccttctaaccaggtaaatctttgttttttatgctataagctgacagcagatcccaggtacagagggcacgctatgaggcagctaactggaaatacaagtatggctatgagattcctgtggacatgctgtgtaaaagaattgccgatatttctcaggtctacacacagaatgctgaaatgaggcctcttggttgttgtaagtatgctaagaggtctcccaaataattgatgaattgaaactttttacagaacatgtatacagaattatttaaataacacttgagttctgaacatgtggtttggaaaatacatagagtgggaaaatctttataataaatcagaactaaaggataggtttcacaacagtatgtcgggcattatctttaagctttagatgctgttagactttttatcaaagtatttccatttggtgtatgtgatttgaaagatgcaagtcctcattattaggatgttgtaatgaggttctactgcaattcgagattactaattccatagaaatacctgcatcaggcatcttaataatgtagctgtttgttttgaccaccctaaagaattagggtcacacacaggtgtgtaattcacatttttagaataaatttctatttttgaaaacaagtaaaattgtattgggagagggatgagatttactgatttttagatgtgatgtaataaattagcctgaaaaattcagtgcatgtttgtttctgacattgtgtcattcatttatgagcattaaagcagtcagtgtaatgatttctgtttagcatctgaccctcttgacttctcacttaaaaattacttaaatcatattcatcttgcaagaccttgaaggaaagaagtatttgttgtttccccaagcagtaagtgggtacttttttgtgttgcccttatattttgtatatatcaaatataagaaagcagtcaaaccattaagtactttgttacctgttctactgagtagaaagaaatttaatgatggtgtttattttaattgtattcctataatatggtaacattagaattgtagtaacaaagttacatgtatagaatttagagcttggtttgtgtgacttactagaggagtatataccaacagtaatgaagatgggcagtgtaaaggtgagcaggtagcctgtaagtgtatttcagtttgtgccagcattcccaaagtgtgtcccatacactgttccctggaaccttaataggtatttctattttaaaaaaaaagtatttcttggtcaaacaaacagaagaactactgagttaaagttaaataggtcaatctacaacagaatatttcacagcatttaatatgctattatttattatctgtttccagaaaaggtatatgaaagtgtttttgggccaggcacagtggtgcacacttataatcccagcactttgggaggccgaggcaggaggatcacttgaacccaggagttcaagaccaccctgggcaacagcgagtcctcgtctcctaaaaaaaaaaaaaaaaaaaaaggttggccagatgcagtggctcacgcctgtaatcccagcactttgggaggacgaggcaggtggatcacaaggtcaggagatcaagaccagtcctggctaacacggcgaaacccggtctctactaaaaacacaaaaaattagctgggcgtggtggtgggcacctgtagtcccagctactcgggaggctgaggcaggagaatggcgtgaacccgggaggaggagcttgcagtgagccgagatcgtgccactgcactccagcctgggagacagagcgagagtctgtctcaaaaaaaaaaaaaaaaaaaaaaaaaagtgtttttgaagtttatttgaccaggcaacatcttgaaggattagggttcaaataaacatgcttggataacagcaaggattggaaacactatttttaaattgtatttgtaattattcaaactattttttttaatctgtgataaatccttttgtgaaatgggaatttacctgttacctaatttacctgtggtgataacctgtattttatcagttttcttaaaggaaaatacatatcctaaaattgatggccaaagtcatgattagcagcagctatgtgacaccaccaagaaagaggagatgtcattgtataaagctaaaacatttaattagggtcttttctctttttaggtatgattttaattggtatagatgaagagcaaggccctcaggtatataagtgtgatcctgcaggttactactgtgggtttaaagccactgcagcgggagttaaacaaactgagtcaaccagcttccttgaaaaaaaagtgaagaagaaatttgattggacatttgaacagacagtggaagtaagtcaaccaaaaggagctgactttttttatgctatatagaacagtgaggatctttgtataatttctatacaaagctattcctgaattacatcccaggattcaagttgtcaacttaataatgaaattgatatcatacagctgacataggaaaatttgagttgcttttattcacttaattccttatttcgtaatgtatttgaggtggctttcaacaaaacgcatataataggaaaatataaataaaaataggaaccagctgggcatggtggcacacacctgtagtcccagctacttgagaggctgaagctggaggactgcttgagtctaggtgttcgaggccagtcctatttactgccaagaaattaaaaacaaaaattttagtagattttgggtgtaagtctggaattaaagccattctgaagatgctaacaacatgcttctgataagtgaccaaaaaaaaattaccatctaatgcttttacgtttggtttggaagtatgcttaaaggagataaaaagctagttcatgttcaggaagtactgggccctgtctaaatatttcttaaaggtttcttttattgcaattcataattaattacataaataaccacatccggtaaaaaaacacttaaggtggctcacacctgtaatcccagcactttgggaggcagacagatcacctgaggtcaggagtttgagaccatcctggccaacatggcgaaaccctgtctctatgaaaaatacaaaaattagccgggcatggtggcaggcgcctgtaattccagctactcaggagactgagtcaggagactcgcttgaatccacgagcctgaggttgcagtgagccaggctggcgccactgcactccagactgagcgacagagtgagactctgcctcaaaaaacagaaacaaaacaaacaaacaacacttaaaacattcttaaatcgtttttactgtaaattccttgaagatgcagagagtatcattcatctttatccttttcccatttcaccccaagtgctaagtgaagtgtagtgcctgggtcatgaagccaataaacctttttgtataaatcatcctattttaattaatggacccctttattatttgacttggtagaaaaaaatttctcatcattgggaggcaatacattagagttaagcagtctgttagtaacattgaactacctcattgaaacatggagctcctgattgactcatgatttgaataagctaggaatgagaaaaccttggaatctctaaaaaatactatattttaacattaaatactttttttcagactgcaattacatgcctgtctactgttctatcaattgatttcaaaccttcagaaatagaagttggagtagtgacagttgaaaatcctaaattcaggtgagtgatattgtgggccacatgcagactagaaaggtggaggcgtgtgagtccatgtgtcctataacttgtgggggaaatcttttttctttaactgtcattatagtttttgtttgtgtgtttgtttttttccccagcacctgagatctgtttttaaaactttggactctatttaagagtcagatatgaaagcttttctccttatttcagagtgattttatatctaacaccagagatgacataaagttaccttccttatgtaaggaaaaaaattagcataagtgttttcttttttttagtttaaggccaatacaaattcaattcccaaagtagtagtttgcaagtttttcagatagaactttggttatttagtggttatttaagtagaactttgaggagcaatatgagttactgatatatgtcagacccttatctagagatctttggaaagcccaaattttgaatacagctaattgacttgcagttgctggatgtgtgtgtgtgtgtgtgtgtgtgtgtgtgtgtgtgttcttactcactaagtgactaactcccacacatcagccttatagcttccatgattcaaatccatactgagtgcttcgtataatcagctcatttaatcctcccagcagccctgtgaggcagttgatataccatggaccaggatgctcttatctttaatgaaaatactgcagttaaatcgacagatacaaggaactactgggaggcattttaactattatgtgtatctattcttagatcacaaccataaagacacatggtcttggttgtggtgtggggtacgggagtggtaaactaagcttaactagaccttgaagaggtttttcgtttgttcttttttttcctaatttgttcttttggttgcccacagataagtcatataaacatgacagattcagaaaaattcataggactttaaaaaaaaaaaaacagctgggtgctgtggcatgcatctgtagtctcagctcctcaggaggctgaggcaagaggatggcttgagccttggagttgaaagctgtagtgcgcaatgatagtgcctgtgaatagccactgcactctagcctgggtaacatagtgagacctcatctgttaaaaaaacaaccgacaacaccaaaagcgaatctatcctagcttttcttcccgtaggaagaagtcttgtaacttgggttggggtaggggtgaggggtgggggcagggatcaagttgcttttgaaaaaggtgccttttttttttttaagtaaaaatttcagcaagaataatcttaaaatctctctaaggaacctacaattagttcttgttttcttttctgtttggagaccttcctgccacctttaaaattgtatttgttattttttaaattggtaaggaatcaaaaatcttgtcttcaaaaaactttgtatcatttataaattctgtgatagtaaatatatgtaaataattacagtacatagcataagcatcaacaactatttaaactgcttgatattgccttcagttgcactaaaaaatgtccttttgacaaatttcactttttagaagtctagtagtaataggtcacattaacaaggttgccaaacaattgcttcctttcgaggcaaacatcatttagaaaatacatgttcagggccacacatggtggctcacacctgtaatcccagcactttgggaggccaaagtggacagatcacttgaggtcaggagtttgagaccagcctggccaacatggtgaaaccccatctctactaaaaatacaaaaattagccagatgtggtggtggacgcctgtaatcccagctgcttgggaggctgaggcaggagaattgcttgagcctgggaggcggaggttgcagtgagccaagattgtgccactgcactccagcctgggcgacagggtcagactccatctcaaaaaaaaaaaaaaaaaagagaaaggaaatatatgttcaacatggagcactctctggctggtagactattcatagaattataactttattttcatgaacttctgaatctgaacactttaatatgcttaaaatttcttcatgaatttttatctttgagctgacataaatttcagttatactacatataaatgtattttgacggctgggcaaggtggctcacgcctgtaatcccagcactttgggaggctgaggcaggcgggtcacgaggtcaggagttccagaccagcctgtccaatatggtgaaaccccatctctactaaaaatagaaaaattagctgggcatagtggcacatgcctgtagtcccagctactcaggaggctgaggcagaagaatcgtttgaacctgggaggcagagcttgcagtgagccgagatcacgccactgcactccagcctgggtgacagagcaagactctgtctcaaaaaaaataaaaaataaatgcattttgacatagaagctaaatagaatactttatagtttagctttatttatgttattcaattgaaatattttctatcttagctgcaactaaagaattttattttcaagatacaattctaaatctgatgtcaaagtaaacatttttgtgtataggtgaaggtggtataatatctgggaattccttcaaaataatctgagggaagataagtgtgtgtatagattttttaaagattggtttataaattgataattgttaaagtaggttgataggtatatgggagtttattatactatcccacttttacgtgtgtttgaaaaaattttttttaaatcgttgtttttttcccccttttgccttctaggattcttacagaagcagagattgatgctcaccttgttgctctagcagagagagactaaacattgtcgttagtttaccagatccgtgatgccacttacctgtgtgtttggtaacaacaaaccaacatcatggaggtccctggattgaaaaaggagcctctcccactcctcctaccaccgaagtggttaggactctatataaataaaaacaaggcttttggaaaataattgcatcctgttgttttca

SEQ ID NO: 288 - DNA, 89518 bp, Homo sapiens
  source 1..89518: mol_type = genomic DNA; note = NC_000001.11:c51878727-51789210 NRDC [organism=Homo sapiens] [GeneID=4898] [chromosome=1]
aggcctgttccccgcggctgcggcagcaccagggccggccgccaccgcctctagaacgcggaggaggtgggtcctgggaagcgggatgtccatcgctccagcttggtggtgaatgctgaggagagtcactgttgctgcagtctgtgccacccggaggaagttgtgtgaggccgggcgggagctcgcggcgctctggggaatcgaaacgcggggtcggtgcgaagactctgctgctgccagaccctttcctattctggccatgcctggaaggaacaaggcgaagtctacctgcagctgccctgacctgcagcccaatggacaggatctgggcgagaacagccgggttgcccgtctaggagcggatgaatctgaggaagagggacggagggggtctctcagtaatgctggggaccctgagatcgtcaagtctcccagcgaccccaagcaataccggtgagggaggaggcttgcaatggggaggcgaacagtgtgccggcttctctgtcggtgccgccgtcacttcttgtctccatgtctcccaatggagcaacagggcacactttccaccccaaatgcttccttgggtggaggtggcaagcgtgattagaggcttccctgtggtgtcagctgggcaagtgggagatcttgggttgtaagacgtcagaatgggagaagcttttcgagtcatttgaatacagtcgctaaagcaagaatgaaggtttctttgaggaacgcagcctgaatggtgagggagtcttggtattatgttaccaggaaaggttgacggagttggatactttaatttggaggacaggatatttaaggggcatattatcactatccaaaatatttgagggacacttaagtgataggtgaaactagtggacgaaagttaccagaggatggtgtggcttcagtaaagtaactttgcatcatatttggcctaagttgaagtgacttgtttccatgggtagttctccattaccaaaacggttgggcgacctcgtccaggaatatattagagagggcttaggtctcagttgggtgagttgtaaggtttcttctaaccttgaaattctctacttttggtttgtacaggagttctctaaacatttctaataattggtgattcagtccccacctgagtattttccttcagaggtagcttatttcatggagtatcatgactatgatgtatcttgcgtgtgtgtgtgtgcgtgtgtgttttaataagagtctgggtcttgcgatgttgcccaggctaatttcaaactcctgggcttagggaatcctcctgtcttggcctcccaaagtactgggattacaggcgtgagccactgtgccaggcctggactttgatgtattttaaatagagttcatattgtccaataacttcgttgaacaggttgaggaaattgagacccaaagagtttgcttcttgctctgaatcacacagctaaataataacagagctggtatgatgacccctactatctgacaccaaattcagtgtatcatttgctgatttcctttttttttttgaaacggagtcttgctgtgtcaccaggctggagtgcagtggcgcgatcttggctcactgcaacctccgcctcccgggttcaagcgattctcctgcctcagcctccccagtagctgggactacaggtgctcgccaccacgcccggctaattttttgtatttttagtggagacggggtttcaccatattggccaggatggtttcgatctcttgaccttgtgatccgcccgcctcttctcccaaagtgctggggttacaggcgtgagccaccccgcccagcccgtttgccgattttttacaaatttcttgcttatgtgaattgaaagctgaaggattctagttctaaatttgttataagcccctacagcgttagcgcaagaaacaaccttatagataatcttttccacttcccaccacacctctttgacagatgacacttagctccaagttcaggaccaacctaatttctcctttcacttcaagtctagatatattttctccaggctgccagagtcaagagatctttataaatgagctaaattttctttctcatcaaagatgtgattgtacaggttgagtatccctaatccaaaaatccagaatgctcggaaatccaaaactttatgagcgccaacatgacaccacaagtgaaaaattccacacttggcacctttgctttttgatggttggttcatgtacacaaactttgtttcatgcacaaaattattaaaaatattgtataaaattatcttcaggttatgtgtataaggtatatatgaaccataaatgaattttgtatttatactgcatcccatccccaagatacctcattacgtatacgcaaatattccaaaatccaaaaaaatccaaaatttgaaatacttttggtcccgagtgtttcggataaaggatactcaacctgtattggcaatgtataaatgagcaagttgaaaacttgataaaaggtgcttagtttttgccttccagatcaaatgttcaataatggtttcagggttttttccagcctatataaagttatataataactaatatttatggaatctacactgtgtttcagctactgttgtaactgttttagatgtgttatttcatttactgacctcatttttggtaaatttgtttgataaatacctgttaagtcctactgtgtgctaggcaccaagctagattaaatattttctgaaacttggtcaaatataatgtaataaataacatgttagtctgggtgaatatacaaaaatgattgagccagtacctgcctttagggagcttacaatagtagagagggacacagacacataaaaaaaaaaattagagactgttgtggtggctcatgcctgtaatcccagcacttggggggccgtgttgggaggatcacttgagcgcaggatttcgagaccagcctgggcaacatagtgagcccctgtctctacacacaaaaaattagccgggtgtggtggtgtgtgcctgtagtcccagctacttgggaagctgaggtaggaagattccttagcctgagaggttgaggctgcagtgagccatgatcgtgccactgcactccagcctgggtggcagtgagacactgtctcaaaaaacaaataaataaaactagggcactaaagttttatagaagccataacggaggtatgtcctagatatattgaggaatgaaatacattgataaattccaccgggggagaaaggaaagacttcaaagagtagataatgcttaagagttgttctttgaaaattgttgcgtttttgtctttatatggcttttgccaagtcattgtccttcttagtgtctcagcttattttaaaaacgaagggggttggttagaacagcagtgtttttcaataaccctcccctttcagaagagcagttcttccatattacctgttttatatactggagtttcaattagacttttgaagaaaagatgttattagtttaaaataaaggtggaaagcctcaggactaggtgatctttaaagacttatccaaattcaattctatgaatttttgtaaccagaaacacacttagacgcatctgcagcccacagagctgaattatccttccagattctgctgagatattccctctgtgaagtctttctaggcagaactaattcctccttccattgtatttcagtaggattttgtgcacgatccattacagtacatagcatcatattatatatcttttgaataagtaccagaggaggacccatttagaggaatattgtggtgaaataataccttgaaagatttaccagtctgcatttattaatagcctgcggaattttacttcagcatatgtgtaatttgtattccgcttttttgaaatgttgggcatatttccaggacacctattatgcttttttagggatctgtattaaatgcttaccaagtattgattcccttcccttctggaagggttaagggacttcaggttgggaattgatattcaaatttttattggtgttgagtggaaattctggttgggcaggattagtagtggtgtattctatttattttttatttttatttttatttttgaggcagggtctcactttgtaacccaggctggagtgcagtggcgccatcacggctcactgcagcctcgacctcccaggcttaggtgatccttccacctcaggctctccagtagctgggactacaggcacgtgccatcatgcccagctaagcttttgtagagatgagatttcgccattttgcctaggctggtctcaaactcctgacctcagatgatctgccctccttggcctcccatagtgctgggattacaggcacaggtgagccactgcacctggcctggctgtggtgcattctgaatagtaaattttaacaatgaagaacacttaacgttaggtattttggattgactaaaacaagtacagagcactttccatgtttaacctgctcgtaaaaagacctgtatttctatggagaaggaaagaacaaatgaaaaggtatgtaaacttctttttttttttttttaatgattaaaaaaaattttgagacaggatttcaattcatcgcccaggctggagtacagaggcaccatcacaacctgccccaccatgtccggctaattttttgtagaaatggaggtggtggtgggggcaggtgtctcaccaagttgcccaggctggtctcgaactcctgacctcaagagatctgcctgcctctgcctctcaaagtgctgggattacaggtgtgagctaccacgccctgtcgaaaaggcatataaacttctgaagggcaagtccttctaatttaaattttggtcagactgttacaagtgaggagatggttatcttaataaattttcaggctgggcgtgggggctcacgcctgtaatcccagcactttgggaggcggaggtgggtggatcatctgaggtcaggagttcaagaccagcctggccaacatggtgaaaccctgtcgctactaaaaataaaaaaattagccagttgtagtggcaggtgcttgtaatcccaactacttgggaggcagaggcaggggaatcgcttgaacttgggaggcagaggttgcagtgagctgaaattgtgctactgcattccagcctgggcaacagagcaagactctgtctcaaacataaataaataaataaataaataaataaataaataaataaataaaaattccatatattatagaaaataatgggtgggtgtgtgctgaataaggtacaggctatttctgaatattatgttgtttactattatatgctgtggaacaggaggaggatcacaattccagtgagtggaacagttgcattgagaacactaacatttgttggcttcctgaatagtttgctagtgaagtggctcacttctgagcagaagccttttgctcactttggcagcacgtatactgagcagaagccttatacaaatctgaggtatcagaagaaaactatacaccagaaaacaagagaacttttttttttgtattggatgggaagaacataggtttatttgttgatatttacaatgaaaactcctggaaccgtaatgcttcattcaatacatgagccagtaatttcatttgtgtgtgtttcatttcacacacacacagacacacaaatattgctaaaatgatcacaaaatctcacagctacaaaagaaatcattatgacttccatgtgtgtaaattccatgagattgacaattccttagtctgataacaaatgaacaagtgaatccaaatttctttttgttttgcactctcacttgtcttgtaaagtaaaggtaacctaggtattacttcacgagattcaaactcatttaacaaagtaagtgcttttaagattgaaatatgttaaatcttatgaatactagtataactttaataaacatatcttttgtctcttactattccttagactgatttccttattttgttttgttttgtgtttgagacagtctgggtctgtcacccaggctggagtgcagtggtgtgatctcaactcactgcagcctccacctcccaggttcaagccatcctccccaccttggcctcctaagtagctgggactacatgtgcacaccatcatgcccagctaatttttgtccttttttgtagagttgggtttcgctctgttgcccaggctagtctcaaactcctgagctcaatcagcccaccttggcctcccaaagtgctgggagtactggcatgagccactgcaccgggcctgactgatttctttaaagtgggctgatgggctagtaagaatagaaagagtgtatattgtttctaactgaagttgtgtgtgtgtgtgtatgtctgtgtgttttaggaaaataagatttagcattaaaaagctctctgttggccaggtgcagtagctcacacctgtaatcctagcactttgggcggccaaggcaggaagatcacctgcctctgtctcaaaaaaacaaaaccagaacaaaaaactctctgtttttctgactgggcgccgtggctcacgcctgtaatcccagcactttgggaggctgaggctggtggatcacgtgaggtcaggagttggagacctacctggccaacatggtgaaaccctgtctctactaaaatacaaaaattagctgggtgtggtggcggatgcctgtaatcccagatactggggaggctgaggcaggagaatcgcttgaacccgggaggcagaggttgcagtgagtcaagatcgcgcccactgcactctaggctgggcaacagaaccagactgtctcaaaaagaaaaccaaaaaacaaacaaaaacgccctgtttttaaagaactgaatgatggtaaaagctcttttgcttttaagaagcttatgatctgctgtaggagagtcagggagcagatactgaaactgaaatgcattaaatataataggtgctagaatagggatatgtaaagtatgactttttgttttgtcatttgtgtttctagcttgctgtctactggttatgtgacctttagcaagttaactaatgtctctaaggctaaggatcttcataaggacacagaagaagagcaacctataaacaattgaaattgaaaaggagcagttgggaagcaggtgatagtggcttttttttttttttttttttttttttttttaatgaaccagtggaggagaattcttgaagcaaggagtgatgatagataaaactgagaggtcaagcagtactaggactgaatcccttttggagactcgagaaattattactggtgaaagcagtttcaaaggaatggtatggaggcagaaaccaggttgtagtgagttaaggatgaatggagagtgagaaattgattgactgagatggagtcttgctctgtcacccaggctggagtgcagtggtgtgatcttggctcactgcaacttccacttcccgagttcaagcaattctcgtgcctcagcctccaaagcagctggggttacaggcatgtgccgccatgcccagcttatttttgtatttttagtagagaggggatttcatcatcttggccaggctggttttgaactcctgacctcaggtgatccacctgtctcagcctcccaaagtgctgggattgcaggcctgaggcaccacgcccggccaagagtgagaaattttgaatgatgaggtacacattgtttggttttaaaggggaagggatgagaggagattttaggataaaaacagtgcattgtagcaagagagagtttttttcaagatgaataagaggtgagcatgtcttgcttgagaaaaaaagaatcagtagagaagttgaagatacagacagtaatagattactgtctgtattagtaataatactgtcagtattagtaattattaattactaattattaatactgtctgtattcataataataatagattcttagatagttgtgaggtgacaggattaatcttaagaacatacccagagaggctcattttagagagacgagaaaatatcttcacttaaagtgaaggaagtaacgagtatggatgcaggcagtgaaaacttgaaagggtgactttcccctcttatttgtaaagtagtcattgaaatgtacttaggtggtcctctggggaactctaagggaaatagtgggatgcataggggaagccttgagtgtgaaggtttgaaatagctaatgtagaaaatgggtgaagtgtatacgtggtaaatactaagaaaatttgtgggttcttgagcatgaaaatgataaaagtaaagcagtattttaagaataaagcagtagtttaaatctataggatgtggaagactggcttaagagtcagttataattgtgtcagttgtgttgacacaaatggtactagtctttctgtagctgatgtgttcccctcttcacttttctttttgctttccacttaattcactttaaatgtttgctaggctaaatgcccgtgagtacggagatcatgtctgttttattcactcaaggtccagtacattttaggttctcaaataatatttgtagaatgtatgaatgtatgagtgcttacatgccaggcattttcacagaactcatggggatattttgccagaaatttcttagattaaaattgtattctgaagctgggcacagtggcacatacttgtaatcccagctacttgggaggctgagatgggaggatggcttgagcccagtagttcaagaccagcctgggcaacaaaatgagatccctccatctcttaaaaaaatttttttaagtgtattttggccagttttaaagcaattgattttcagagaaaatgaatatggacaggttacagaagtgcaaatgatacaaatactacaaatgcgtatgctgatattgtatattttgtgtggaagcttgtgcttggcatagtaagcactcaaatgttagctattactgtttatatattggataaggccatgaataaagctggctttgtagcattttttgtagtagtaaaaagttggtacaactttattttccattggttgaataaagattaaattatgttacagttttacaatgaaaataatacatagctataaaaaaggataggtgattttatatgttgaaatagagagatcttctctgatttattgttgaatgaaaactagtggcaaaacaaaatgtataattccatttttaaaaggaaaaaacattactgttatatgtttacttaaattatagtttttcacgtattcatatatatgtacagaaacgattagggatggtattcagcaagctcatttctctggggaaaggaaggagagatttgacttttgttttatttattttttagtaattacaagaagataagtgttaaataacaataaagaagtattatgtggtcatcacagggaaggaactttagataaaaagaaaatttaagaattcctggctgggcgcgctggttcatgcctgtaatcccagcatcttaagtcaaggcaggaggatcgctggagatcatgagtttgaggccagcctgggtaacaaaacaagaccctacctctacaaaaaattaaaaaattagctgggcttggtggtgtgcaccaccaagctggtgtggtcccagctacttggaaggctgaggtaggaggatggcttgagcacaagagtttgaggttgtagtgagccatgatcacaccggtacactccagtgtgggcaacagagtgagaccctatctcaaaaagagagaattctccataattattctaccctgcattaaccactggtaacattttaaataatttcaatgccttattttattttttgaggtggtggctcactccctctcaggatgcagtgcagtggtgtgatctcaggtcactgcaacctccacctcccaggctcaagtgatcctcccacttcagcctccttgagtagctgggacgacaggcacgcaccaccacacctggctaatttttgtagagatggggtttcctcatgctacccagcctggtctcgaattcctggatcctagagtcaagtgatcctcctgccttcatctcccaaagtgctggaattacgggcatgaaccactgtgcccagccagacagtactgttactacatgatagatttaagtgctattctatgaaaatacattactgaggaggtactaagcagtaattagagtataaatggattgtattctctcattttattccttctaacaaacttctcataatggcaggtaatgtccaaggccttctattttgttcttaacgttctatcttcatcttcatcttctgttgtgctattttgtgcttcttttcttggcacatgttttctttggtcatatttgccttttgaattcatgcatgagtatctcctctcttttctgttttctttcaatcgtcccttcccacatgtagttagtgactcttgtgtggccctctagcaatgttttttttccaagcgatttcatatttttgtagttattacttgtctttccacgctattatgttgaattttttgaagggagagaatttgtttctttgagtctttgcataccttctcttctgttagtaataaatgaatagtctgtactcctaagaccttatctctactctccagttgtgtactggatcccatctccttacaccttttatgttccactaattattccagcaattgttctccttccatcctgcatcatcagtttgtcttttactggatcatccccgggagcatacaaatatgctgtaattgtttccatcttcaggagagaaaatttctttattctttatccccttggagctatgtccttctagctattcagtttctctggtaactgtagcaaaacttgttgagttatctgtacttgcagtttgtaattcatctgtttccattattctgtaagctcactcagagtagacttctgccactattgttacactgaaatagctagttcaaggtcaccaatatctttacattagtcaattctcaagttatcttactcaacctatcagcatcatactgcatagttcaccattcttcttgaaatgctttgatcagttgactttcaggtcaccactgttcatagttctcttcctgcttattcacagatctcttcttatttccctgacttctaaattttggattatctagggctcaattttcagacttctcatctacccttactctgtatgttgtccggtctcatgactttaaatatcagcctgtataaaataaattttgttttcctacctccatgttttttcttactctttttttttatagcacttattgtcatttgacataaatttacttgtgcattgtctttctcttgcactggaatgtttcatcacaagggcaaggaattagttttgtttactgcttatatcgccagtgcctagaatagtgcctgttttaaagtcttgcttccatttctgtcttcttccttttctcctttggcttgttacataaggatatacttttcagtctttttttttggttactttatttcttgctttttgtctggatcaaaacataatgtttaggctgggcacagtggctcatgatgcctgtaatcccagtgctttggtaggctgaggcaggagtattgcaggagcccaggagtttgaggttacagtaagctatgatcgcatcattgtgctgcagcctgagcgacagactgagactctgtctttgaatatatatggcatatatgtatatataaaacatacatatatatagaaacaaaaccttacagataacagctgaagccctctttatattgcctcttcccattaccttctctgccttcttttttcagtgttaaccactatctaaatttcatgtatataccgtactagttctatctatagttgtatactttttattaaacatactttttaaacagtatatatcattgtttttgcatgttttaaagcattatagaaatagaaaggtatcacattagatgtctcataatctttttttttttttggtttaacattgcttttgagatttatccatgtcaataagtgtaattctagttatttgtgttaaccaatgtttaatattttgttgatgaatacatcgttattatctattttcctattgtcatttggttacagttttctgttatattttgttttatgactatgccacaatttagcttttttctttttgtttttcatttaagttgtttctagcatttcagaggactgtatatggttccttgtgcacacgtttgagaatttatctagggcacatacctatgagtgaaatgatacctataagtgaaatgactgggcatactcatttttaacctcactagatattgccattagtactcttctaatgggttgtgcttttttacattgacaccaatagaacatgagagttcctgcttctttacgttcttacatttttagcagttattgatactgttagtttttttcttttcttttttttaaagataaggtctcactctgttatccaggctggagtgcagtggtgaaatcatagcttactgtaacctagaagtcctgggctcaaggggccctcctgcctcagcctctggagtggctgggactgccaccacgcccagctaattttaagaaatttttctttttttttttgagatggagtcttgctctgtcgcccaggctgtgcagtggcaaaatcttggctcactgcaacctctgcctcctgggttctagtaattcttctgcctcagcctcctgagtagctgaaactacaggtgcctgccaccatgcccagctaattttttttttttttgtatatttagtagagatggggtctcaccatgttggccaggatggtctcgttctcctgacctcctgatccgccctcttggcctcccaaagtgctgggaatacaggcgtgagctatcatgcttggtcgatattgttaggttttaaaaaaaattactatctgtggaaaattgtatttctcacttttttttaaaggttagtcaagtgaagcagtgggagtggagaaggcatcatttagttgtgaataccactgaattcagatcagcctatatttttctttcttaaaaaatctttttaggctgggcgcagtggcacatgcctgtaattccagcactttgggaagccaaggtgggcgaatcacctgaggtcaggagtgcaagaccagcctggccaacatggtgaaaccccatctctacaaaaatagtaaattagccaggcatgatcatgggtgcctgtaatcctggctactcgggaggctgaggtgggagtatcgcttgaacccggggaggcggaggttgcatgagccatgatcacgccattgcactctaacctgggtgacagagcgagactccgtctcaaaaaaaaaaaacaaaacgaaaaacttaaaaaatttgtatttccccttattactaataagatcagacattatttcatagtttgtagacatcaggatttctccttttataaattgcctgcttttctattgggttgttttttctttttataaatttgacttgtaaaaattcattttattttgaatgctaattttttgtcgattatatgagttgcaaatgtattctctaagtccatagcttatgtttgctccttgtttataaagtcaaacattgaatcagttattgatcttttatggtttgcactttttgtatcttattctaaaaattttattatagttttttacattaagaaatctaatttttttttttttttttaagaccaggtctcactccatcacccagggtggggtgcagtggcatgatctcagctcactgcaacctctgcctcccgggttcaagcgactcccacctcagcctcctgagtagctggaactacaggcatgcaccaccacgcctggctaatttttgtatttttagcagagacagggttttaccatgttggccaggctggtctcgaagtcctggcctcaagtgatctgccctccttgtcctcccaaagttctgggattataggtgtgagccaccatgcctggcaaaaatctaattttattactatttaaaaaaaaatatggataaccagttgtccagtcatacttttaaaaaagtataaatcccagagatcaccaaatattttctgtaaaagttctagctaataaatactttgggctttgtcagtcaggaggtgaaattgaggatattaagtaagtacttgtatatcaaaaaagaaaacaaatttctgcaaatttttggtgaaaatttttatgaagttcaaaatatagtatgttttttggtaatacagttctactagtaagaatgatggaattgtttttattgggataacattttgctttattgggatcaaaattaagtgttcatcagtcagttcatctgttaaatctgatttgtaatgagattttacataccttatctttgaaaatgtctttccacatagctaggtaccgccaatatattaatattgaaatactaatagcagtctatgagtacagatggtccctaatttatgttggttcaacttagggtttttccactttccatggtgcaaaaaagtgatatgcattcagtagaaaccgatctttgagtacccatatgatctttctgtttttcacttcagtgttgtatcagtaaattacatgagatattcaacacttcattataaaatagactttgtgttggatgattttccccaactgtaggctatgtaagcattctgagcatgtttgaggtaggctaggttaagctattgatgttcagtaggttaggttaaatgcattttcaatttacaatattttcaacttaagatgggtttttcaggacctaaccctgttgtaagtcgaggagcatctgtatatgactttaattgagcatattctttgcttggaaaacatttatataattatattagattcttctcatattttttccttttaacattattatagattaaatagatcaaacactatagatcagtcacttccaattaaattaggtgggatctcctcaattgcacagttaatggactttgaaatatggaagtttctttgtggttgcaacaaggtctggaaggcacttctgaaactatagtttgtgggggaatggaggtattacttcttgttttaactttttatagcacaggaagtatatgacgtagcttgccattacttgtgattcaaacatcattcttgattgaaatgacttaaatgctgttttgtcttgtaattttaggttgagttcattaaagaaacattattaaatctgcaccaaaagctaatttttttttttcttgagacagagtcgtgctctgtcacccaggctggagtacagcagtgcaatcttggcccactgcagcctctgcctcccgggttcaagtgatccttctgcttcagtctcccaagtagttgggactacagacgtacgccaccatgcccagctaatttttgtatttttagcagagacaaggttttgctgtgttgtctaggctggtcttgaacacctgatctcaagtgatccgcctgccttggcctcccaaagtgctgggattacaggtgtgagccaccatgcctggcctcattttgaacttctctgaagaaattctacagtgatgtgatactttgttttaaattttctactttttctggttattgcttgtttttttttttttttttttttttttcctccacacagagtctcactctgtcatccaggctagtgtgcagtggcctgatttcagctcgctgcaaactctgcctcccaggttcaagcgattctcctgcctcagcctcccgagtagctgggattataggcacgtgccaccacacctggctaatttttgtatatttagtagagacagggttttgttgtccagctggtctcaaactcctggcctcatgtgatctgcttgccttggcctcccgaagtgctgggattacaggcatgagccactgctcctggccttttttttaagacagggcctcctcagtctgttccctaggctggagtgcagtgtcatgatcatggctcactgcagccttaacctcctggctcaggtgatcctcccacctcagcctcctgagtagctggcaccacaagtgtgtgttaccacctcgggctaattttaaaaattatttgcagagatgaggtctccttttgttgcccaagctgatcttgaactcctgggctcaagcaatcctcccacctcagcctcccaaaattctgggattacaagcatgagccaccacactcagcctctttttttttttcttttttagagagatgatctcactgtgtcacccaggctgtactgcagtggtgccatcatagctcactgcagcatcgaacttctaggctcaagtgatcctcctgcctgtgccgcccaaagtgttggaattacaggcatgagccactgcttctagatggatgtcttttattggcgggggggaaagccctatatacgtatatatgtattttttactaattctaaaactgctaacccaagcaggacaaaatttaattgaataccaagaaaataaccatgccagattttcatgctaaatcagctaatactaacattgtttagatacgcaatttgaatgaactccatggtccaaagtcaaattacctatgataactcattctaataaacagttctatgcatctaaattggagagacaaaattggcatttaggaggatattaagtccaatgttatccatggactcatggagagctttgacccacctggcccttcctgagtcgtcgaagtttccattactaaaagctctgcagtcagtgactcatcatagatgagactaagtaatcccaattgcatataaatgtgtgcgtgtgtgtggcgaatgttctaaatgcgaaaatggtttatgaccaatgtttggtttgtcaaacccataatcaatcctgagaagataataaaaacttcaggtatatttctgccctggtgggccatttaaacatttatagaggtattttcttcacttgtcattttcagtgtatgttttctggtggtacagaatctttctcatgtagccaggcacagtggctcaccacttgtaatcctagcactttgggaagccaaggggggcggattgcctgggctcaggagttcaggaccagcctgggcaacatggtgaaaccacgtctctactaaaataaaaaaaaataataataataataaaaagccaggcctcatggcatgcacctgtagtcccagctacttgggaagctgaggcacaagaattgcttgaacctgggaggcagaggttgcagtgagccaagattgtgccactgcactccagcctgggcaacagagcaagactttgtctcaaaaaaaaaaaaaagaagaagaagagatttgattatctctgtggcagagtgagaccctgtctcaaaaaaaaaaaaaaaaaaagtaataccacttgggcagccgggtgcagtggctcacgcctgtaatcctcatactttggaaggccaaggtgggtggatcacctgaggtcaggagtttgagaccagcctggccaacgtggtgaaaccccatctctgctaaaaatacaaaaattaactgggcatggtgatgcccgcctataatcccagctactcgggaggctgaggcaggagaatcacttcaccatgggaggcggaggttgcagtgagccaagctcatgccactgtattccagcttgggtgacagatcgagactctgtctcaaaaaaaaaaaaaaaagaagtaataccacttggaacatctttgtgcatataatttttcatactctggacaacttaattgggaaatattaacaaaagtaaaataggtctaattaataaagatgtttttaaggctgatagtgtcccacactatctctcttgtaatattctagctactatattataaaggtggtggtaagaagagaaaggaaggttcttgtaggtagcacttctctgttccttattattctagacacgtaagtttatactgtgaataaacatattttcggttttgatttaaagtcacccccagaaaagtaatagtaattgcaacaggaagaccaattggaagaaagcttttactttctactggggatgaaaaagtagatagaagtaaactctcccggtgaccaaggtgtatgaaatgccattttaagctagctgtagtggccagaaggcactgggagagtcgagtaagagaaagaggtggcagtctctataatgagctagctgcagcagcaatgaacacagaggcagctatgagtgtgaatgatagacataagtctgtatacaactgtagttaaactgtctccagataagaaagttctagagcaactatcctatatttttgaagaaaaaacaattctatctggggaagttttattcttcagaaagaaaaacttacggaatgggaaaatcaaccctatctaaatcaaccctgactagtcaacccaagtcaactctgagtatctctgaggtgaaagatgaagcatgctgatgggtgtcaaatccaatcttgtatgaataaaataagcatcggggaagcatagatgtcatcttctaaggcaaacattctgaggatctggcagcataaatccatcagttaatttataatataattggacaccactatggccaaagtaaaagacacggccaaatctggatcaccttacaattttcaagatgctttcaagatcccccttgtcctgttatggctgagggaagcagtgatgggagtaggcaccatagtctgtaacccctccccttctgtctcggtacagacaaagcagataagctggggctctggtaatcttacacagtttacttcatgccaatttttatgctccatgagatccaggtaaactgagaatgctgtgcatctcctacatctaactacatcatttctaaatacttagaaatattttaagttttaatacttagaagtattttaagttaccgtaaagactttgaaactgtgacacaggtaccctcccctctgatgtttttcctagtcatcctgggtctcaggtagccacatggcacccaagatgggtatgaagggcaggtcctgtctgagtcctgaatttacgcacagctgtagacctcatgacagaagacagaaatgggaagacattgcctggaggacggaaccctcccaaaatagccaggaggcaaagctagggcaggggaaaaggggatatattgggcttgattctgccttgcagctggtggcctaggcattgagaatgtgtcctcatgcctcactgtgggcatacatccagacctctgactccagaggctcaaaaccaaaaacaagcaagcaagtatcaaattatatttaactgataattttgaagccatttctattttagtaacaatttacaactacctttatttactaaatattacatacaagtaacacatatagacacagacacaaagacagaagcagatattatagcttacataaaggattgtcatttgctggcttttgaatagtttttcttttccccattcagactatcattcttccattacctgtttcattgccctaaggagttgttagctaggcaaccttaaatttgcatttctaatgggacaactcttaggtgaaataaggtagaaaatttatatctcaaaagcacaacctaagactttaggcgtacatattgtaccctcatttgctcaaaccaaggaaaaaatgatgtgagtaaaaaatttcagttaagatgtccagaaaagcaccttaaacaaaggtttgacttgttacataaatttaaaactatggtaaaagtttctaatatacacaggcagacacccttacaaatggagatttcctttatagatgtaaatttcttttacagaagagtttcaggatagccagttaaatgccaggaaggtatattttagttgggtaggtggtttatttgacttagctactgtttcttggctaaaattactgagttcagggtagatggagcccattgaggaatagggcaaagaaaacagtactctgtgcttggactcagactggatagatctaaaaaagaagcaagtctgctttacccactggtttacattttatcaacattttatccaggatatcgttattttcactcttgaggcaggatagtgtttatgccaaaagtttagcagatttaattattcttgtgaattattcacctgagctttttatttgccttttttttttttttttttaaagacagggtttccctctgtgtaatcacaaaggcacagtcacagctgatttgcagcctttacctcctgggctcaagtgaatttcccacctcagcctcctgagtagctggaactacaggtgtacaccaccacatccagctgatttttaattttttgtagagaggagatctcactatgttgcataggcttgtcttgaactgctgtgctcaagcgatcttcctgctttgatctcccaacgtgttgggattacaggcatgagccaccacacctggccctatttgccttttatgaagtcttttaataaagcaataaaaatattgaaatgtttttagaagcttctgcacatcaataggcatccttgaagactaattcaggacccctcatttttaagtgctgtgttgttcattaggaacggtccattgtaattttaagttacaaagattttgccatttctgtaagtagttatttcttctgaggcctaatatttatacattctaccttatagctagaaggtagaatacggtgttcttcagatactaaggatccaatatttccctagaatcctggatttggtcctcagatccccttcatcaatttagttaatgatttttccctacctaagggtacaagaaaaagaatgtagaacacaaaaatctctgcaaatttctgaagtctgcacccactgtaatattaccatttctgctagtttctgcctgatcctggacatctgcagcctcttaactgaatccaagtcagttaattatcagatccaatccaatcatggatccagtccagtttctgttgtgacttccaaacccagttcggatcagaagtttgctcaaactcggttccaaacagaaatctgtcgagcttcagaatctcagcgagaacttaccacgatatcagttgcttccagaaagcaatggacatcgtgagtctgaggggtaccttgcttggtcactccatgctcctgggcatgacatctgttgaaaaccttagacatattaaatttaacagagtttaactgagcaaagaatgattcacaaattgggtagcccaggaaccagaataggttcagagaggctctggtgcagtcccatgattgaagatttatggacacaaaaaggaaagtgatgtacagaaaacagagatgaggtacagaaacagccagatttgttacagttcgggcatttggagtatttgaacatagtttgaacagttggctgcctttgattgactgaaactcggtaattagcacaaaagtaggttacgatctgtttatacatctagttaagtttcagttcactgtgtacagagaaacctttaggccaaacttaaaatatgtaaggaggtggctttaggttagacttaatttaacagatgttatatatattggttttcatccactgttcctgtcttgtaactcccatagcccttgttaaagtctttttgttacaatgttgggtgtgtcaggtctcatgtgtctagacttaatttaacaaatgttacatatattggttttcatccattgttcctggcttgtaactcccatagcccttgttaaagtctttttgttacaatgttgggtgtgtcaggtctcatgggcaggcctcaggaaacagaatttctcagactttctcctatccatctctcatctgccccaagacaagaccctataatcttccctgcctttctgattgggagttataagaccctcctcagagggcgtcccaccctatccttggaggaaggaatgctgatattttgaaatttccataaaaacccaggaggactaggttccagaagcttcaggatggctcaacacgtggaggttcttggagggtggcctgcacaggaagggcatagaagccctgtgccccttcccccatacctcactctgtgcatctctttatctgtaatatcctttacaataaaccagtaaatgtaagtgtttcccaaagttctgtgagccctccagcaaattaatcaaacccaaagaggaggtcgtgggaaccccaacttgaaagccggtaagtcagaagttccagaggtctggacttgaaactggtatgtttgtttgttggcagggcagtcttggggactgagccctcatcctgggggatctgatgctatttccaggtagtgttggagctgatttggaggacacccagttggtgtccactgaagaattaattgcacggatttggtcacagaagactttggttgctgaccattgtagtagtatgagagaaaaagaaaaaccgtttgagagtttttcctagaaatgaaatacctagaaatgaaattactgaatgaaaagtattcagagtttccattaaaaataaaaatggctgtatttccctacaagaatgtgataccatttgagattcatcagaaatgtgtgagaataatctgtccacttatcagcactggatagcaattgtttttattttttgtttagttaatttgttggatgaaaaatatttcattaagttgattgtcttttatttctagtgagattgcgcatcattttatttgacatcttgtgttcttgtaatgtgtgtagtatatattattattatcattattatttttttttgacacagagtctccatctgtcacccatgctggagtgccatggcgcaatcttggctcactgcaacctcttcctccctggctcaagtgatcctccagcctcagacacctgagtagctgggattacaggggtgcgtcaccatacctagctacttttttttgtattttttgtagagacagggttttgccatgttggccaggctgtatagcacatatttttaagcttattttttaatagggtttttttctcttaatgatttgaaggaactcttacatgttgttagtttttcctcccagtatgcaatttgctgtttgattttgtttatgatattgttttataaaaacttaaaattagtatacagtgaactcttttcattttttttttctttataagggcttggattttttatcttgtttggtacaaattttcttcacccaaatattataccaatttttttttcttaaataaaaacattctttccttttagctctgttatagaactgaacttgggtctgctcgcctggcacaataaggacataaccacactgaggttttgcagcagtagaaaggaaggcatttattttcaggatgctacgcaaagaggaccaggtagctaatgcttaaatcctgacctccccgatgatttgcaggtaagggtttttaaaggcagtggtaaatttctggatagcagaagttacagacaaaatcataaaccatacatggagggttacacactgattttggcctaaaaggttgggatatcttgaagcagtggtgtataggtcataggtacagtagaagattttctgatttgcagttggttaaggaggcaaagctttttctaaaaatttgagatcagcagaaaagaatgttagcactggctcatgggtataaccttctccaggcccctcagaaagaaatttagaacaaagaaggggagtcagagttcagtccccagttcctctctatatgaggttgctgtgctggcagatccttttggtgtgggcacaggtttctgaaaaacaactggagacatgttaaggtattatctttagtttttatagggaagcaaacattcttgtgactcttaacttccttggctatttttgttgttgttagagatggggtctcgctatgttgcccagactggtcttgaactcctggcctcaagtgatcctcccaccttggcctcccaaagagttgggattacaggtgtcagccaccatgctgggccagcttggctgttgttactgttacctgcttgtttatcaagttgcacatttatttttcagggctagctaggtgcctgaagtttcctttgaaataactgaagattttccttttttctatgcttggggtccctgcgtcatctcaattccccatcttttgtcacccatcaatcttgtggggtactggggtgcagactgctctgcctacttcctgttgaattggggcaaagattgaggactaggatatgaggatattaagtttcttttctttatttttttgagatggcatcttgctctgtcgcccaggctggagtgcagtggcatgatctcggctcactgtaacctctgcctcctgggttcaagcgattcttctgcctcagcctcctgagtagctgggactacaggtgtgcacctctacgcctggctattttttgtatttttagtagagacagagtttcctcatattagccaggctggtctcaaactcctgacctcgtgatccacccgcctcggcctcccaaagtgctgggattacaggtgtgagccaccgcccctggctgaggatagtaagttcctagcacggaattcaaggtatccatgagtcccaggcatggcaccatggtgctgaactgtcattatttgtattagtcactgctttattacattttaacacacatttggttatgatataaagcacaagaaaaattagcaagattgatatgcataactttagcaatccagaaaacatggattttattccatgaggaatccaagaaaagaaagaagaaaaccagtccttagggacagtcagggagatctgttgtaaccaagtgacttgttctctaatttattttagatgagtttctacctcagcagattcatttatataagtattgcatgtgggatttgcaaccatacacactcctccctgcttggctaagatgtaatctaaggctatcctattatctaagacacctgagccaatgaattaattcttttctgctagacagctattgctgctgaagtttccttagcaagaattcctaaagagagagatttctaatcatgtgctcataggatgccactccccaccaaggtaacaaagtccatccaaagaaataacccgcatccatctttttagtacctgggcaagaatagatttgtggatcccaaagtgagtatgtggacttgtttacttttaatgagttaatttacttgcagctaagatacgggatttctgacatgtttagagagcagacttctaaggagggagcagggctcttgctcctctcaagaggcaaaatcaagtaagccttttatatagaggcagagtctcattatttctggcaaatttgtttgaagcttcaagtgaagggacttccaaaataaaggaattcttttatataatatatatatatatatttttttttggagacagtctccctctgtcacccaggctggagtgccatgtcttggctcactgcaacctccgcctcccaggttcaagcgattctcctgcctcagccttccgagtagctgagattacaggcacacgccaccacatctggctaatttttttgtatttttagtagagacagggtttcaccatgttggtcaggctggtctcgaactcctgacaccatgatctacccgcctcggcctcccaaagtgctgggattataggcatgagccaccgtgcctggccaggaattcttttatgtaatattctgaaaggggccctcagattatgatgattgaaggaacttgagtatcattgttctattagctgggtcagatgatatatctataggttacctgtctttgtcaacgtctcagaaattctaattataaaattgcccttttaatttgggaggatgaaagtccacaaggaagcataacaaaaaggcaattatatttatagttcagtgtgatcacctgaagtaattaagactccagggcagcacacagaatttgctaagccagtagtagacagagaaaataagaaaagtggccgggcatggaggctcacataaaaaactataaaaaactatatataaaactattaaaaaaactataaatatataaaactattaaaactatatatataaactatagtttaaaactatataaatatagttttaaggcctcatatacatgttatatataatgtatatatagttatagttatataattttatatatatagttatatatacatacacaaatatggcctaaatattagttttaattagacttttgagtatagagttcttaaaaaaatatcctttcaaatctcttactatcagatttttagctgggacaaacagttgatatttctggcttttgaactcttttcaccccaaagatattctcccccatgaaactaagaagcgttagccagggttatgacttcaacaaggacacatgaggtctcgaaagaggtggaaagcagttttcacaagattcagagctgccccaaagacagcttaaagagaggaaaatttcgtcagccataaatggagtacagaccacatttctgtttggccatattctctagagcctcagtttctcagctgaccattcacacacacaacgtgtaccaaaaagcataccaaaaaacctgtaggctgcccccctcacagatggaggacaggaaatcaaaagctgcccatagaaggaaaaaggaacgataaatggcaaaagtcacacaaatattaaaccaaaaaatgatgtgttccttggctgggaattcaacccaggcagcctcagtgctttaccactgctgttcctggaggggatctaaagcaggcagttttgagcttgcaaaggattttaaccttgttttaggtgagatatttgttctttaatttagtcaagtgaattctcaaggctagtcatgacactattaagtgtcctttgtaaaatttgtttagaaaataacttttttttgtaaaagcaattgtttagagagatgcctgagattattttaaaatttaggggtccagtttaaaggttccccttttcaggcttttttctggagtcttaaaaaatactgtggccaagcactactgcaattaaaaaaaaatcattttttttttttccttgggcccaaatctaaaaatggcccaattctgcagaatacaccctaatgggctacaaaggaaatagaacttgtgtttctcaaatgaaacaaaaccctggacaaggcattaaaggtttgtcgcaaaacctaggtgacaaacctttaatgccttggccaggtgttaagtattaaatagattttcaagcaagtaaatcacaatcaaattgtgatttttcaaggtttcagtcttcagctctgggatatctcccaccaagtgcattctgatgaagtagagcccaataccttgctgaagcaaggctggatttcctgctgaaaggaaaaatactatggggctatcacacatcaaccccccacttaccaaaagacatcttctcaggtgatttatttctaatgctgtgaaagtagaagcaccacaggccaacggtgtctgattgcctgccaaatacacggatctgtccctgaataaaataattcaggcagctgctggattgggcccaagggtggctgcggccagggacttatgtggtacagatgaggcacccactccagacttttgtcccattttggttgccggtgtttagagaaccaaaccggagttggctcacccagtccaataaggccagatatccacaccaagattttgcagtggtagaaaggaaggcatggtgtttatttacagggtgtcaagcaaggaggaccaggtgactaacccttaaattctgacctcccctatgatttgcaggtaacagtttttaaaggcaggggtaaatttcaggatagcagacgagttcagtacccagttcctccttatctgaggtctgtgtgcccgcagatccttttgctgggagttcaggtttctgaaaaacaactgaagtgacagatgttgagatgttatctttagtttctgtagggaagcaaacgttctcatgactctgacttccttggctattttaaagttactattacttgcttattaagttgcatgtttactttccaaggctagctaggtgccagaaatttcccttgaaagaacttaatattttcttgtatttctatgcttaggggcccacaggcccttaaaaggtgtccctgttctgtttcagctctaagtaatctggaatttatatatgttgaaggtaaggtagacatggctattttttcctcactaaatgagtagcctattgtttgagcatcatttgttgagttgtggtagtaaatggcattgtaacagtattatatacactgctctgtttttagaaactcttggctttcattgatctgttggtgttcctgttagtacttcagcttcatttcagtcaccttaaaagtctgtatttttatttatttatttattattatttttttttgagatagagtctcgctctgttgcccgggctggagtgcagtggtgtaatcttggctcactgcaacctccgcctcctgggttcaagtgattcttgtgcctcagcctccagagtagctgggattacaggcacgcaccaccaacctggctaatttttgtatttttagtagcgaagggtttcgccatgttgggcaggctgatcatgaactcctgggctcaagtgatctgcctgccttagcctcccaaagtgctgggattagaggcgtgggccactacacccagcctaaagtctgtatttttatacctggtaaggcagttccttccccttgttcttcctttccttttctttctttttttttgtttttgagacagagtctcgctctgtcgccccggctggagtgcaatggcgcgatctcggctcactgcaagctccgcctccctggttcacaccattctcctgcctcagcctcccgggtagctgggactacaggtgccagccaccatgcccggctaattttttgtatttttagtagagacggggtttcaccgtgttagccaggatggtcttgatttcctgacctcgtgatccatccacctccaccttccaaagtgccgggattacaggcgtgagccaccgtgcccggccatctttttcaaaatgttcttggcatttttgtgtgttttggtccacatgaattttagaatcagtatgtcaagttccacaaaaaaatcttgttgggttttttttgttttgttttgtttttttgagaaggagtcttgccctgtcgcccaagttgtagtgcagtggcgggatctcggctcactgcaagctccgcctcccgagttcacgccattctcctgtctcagtcattctcctgcctcagcctcccgtatagctgggactacaggcgctcaccaccatgcctggctatttttatttttatttttttgtatttttagtagagacggggtttcactgtgttagccaggatggtctggatctccagaccttgtgatccgcccgtctcggcctcccaaagtgctaggattacaggcgtgagccaccgcatccggcccttgttggggttttttatgggaattgccttgaatttatagattaatttgggggaagaattggtatctttataatattggatgttcccacccagtaatatagtatgactgtttagtgaggtctttcatttcacctgtaaagttttcctaatgttggctgtttagtagtattgaaaagaatgtgttctagtgtcatgctacttagagtcggtctttgctaagccacaataaggttgggcaaataacagaccttttttgtgcttcagtttcctcatccataaaatgggaataactcatcaggattattgtgaagattaactgggttaagacatgtaagttaatacattaaaaatgtgagctattgttattaggtatatttatgcattttatagtttatattgctttggccaaagggattttaaaaaaatcttactttgatgtataggaaagctactgatttttgtttatagttctttgattttggctactttgctgaattctatttattaataatagtttttgggttttgtttttggtaattctcttgttctaggtaataatatgttttgcagtgatttgttttagctttcgatatttgtaccttattattattattattattttttgagacggagtctcgctctgtcattcaggctagagtgccgtggcgctatctcggctcactgcaagctccgcctcccgggttcacgccattctcctgccccagcctcctgagtagctgggactacaggcgcctgccaccacgcctgtctaattttctttttttgtatttttagtagagacggggtttcactgtgttagccaggatggtcttgatattctgaccttgtgatccgcccgccttggcctctcaaagtgctgggattacaggcgtgggccaccgcgccccaccgtaattattttttatttatatacattttgcatcttttttcatttattaggacctccaatataatattgaatagtagtgacgataaaggacattttgttcatgactgtctttaaaatggatttgatgttgatttatagacgtgatcctccataaagctaagggctttatgtgtaggttcttaatttgctaaggagtgagttgtgtatttttacaaaatcatttttattgtacaaatcataaatgaatattttttattacaaaatgagaggtgacagcgtgctggcagccctcacagccctcgcttgctcttggcgcctcctcggcctcggtgcccactctggctgtgcttgaggggctcttcaggccgccgctgcactgtgggagcccgttcctgggatggcggaggctggagccggctccctcagcctgcggggaggtgtggagggagaggcacgggcgggaaccggggttgcacgaggggcttgtgagccagctagagttccaggtgggcgtgggcttggcgggcccgcactcagagtggccgctggcccctggcagtgaggggcttagcacccaggccagcagctgcggagggtgcgtcaggtcacccagcagtgccagcccactggcgctgcgctcgatttctcgccgggccttagctgactccccgcagggcagggctcgggacctgcagcccgccgtgcctgagcctcccaccccgccgtggtctcctgcactccccgagcctccccaacgagcgccgccccctgctccacggcgcccagtcccatccatcgcccaagggctgaggagtgcgggcgcaaggcaggggattggcaggcagttccacctgctggcccggtgctggatccactgggtgaagccagctgggatcctgagtctagtggggactcggagaacctttatgtctagctggggggattgtggatacaccagtcagcactctgtgcctagctcgaggttaatgaacacaccaatcagcaccctgtgtctagctcagggtttgtgaattcaccaatcagcactctgtgtctagctcaaggtttgtaaatgcaccaatctgcactctgtgtctagctgatctggtggggacttggagaacctttatgtctagctaaaggattgtgaatgcaccaatcggcactctgtgtctatctcaaggtttgtgaatgcaccaatcagcactctgtgtctagctcagggtttgtaaatgcaccaatcagcactctgtatctagctaatctagtggggaggtggagaacttttgtgtctagctcaggaattgtaaacacaccaatcagcatcctgtcaaaatggaccaatcagctctctgtagaacagaccaatcggctctctgtaaaatggaccaatcagcaggatgtgggtggggccagataagaataaaagcaggctgcaggctcctggggtgataacccacttgggtcgagttccatcgctgttggcgataaatcttgttggtgttcactttttgggttctcactacctttatgagctataacactcaccctgaaggtctgcagcttcactcctgaagccagcgagagtacgaacccacaggcaggaagaaactctgaacacatccgaacattggaaagaacaaactccaaacaagccgcttttaagaactgtaacactcaccgcggggctccgcggcttcattcttgaagtcagtgagaccaagaacccaacaattccagacacaaaaagagtgaaaatgttttaagaattataaagtgtcggctgtgcacggtggctcatgtctgtaattcctgcactttgggagaccgaggcgggtggatcacttgaggtcaggaatttgagaccagcctggccaacatggtgaaaaccccgtctctattaaaaataaaaaaattaaccaggtgcggtggtgcacgcctgtggtcccagctacccgggagcttaaggcaggagaatcactttgaacctgggaagtggaggttgcagtgagccgagacggcaccactgcactccaacctgggcgtcagagtgaggcttggtctcaaaaaaaaaaaaattataaagtgtaaaatatctttgtatctctagtttttctcctttccccagatatatacattaccattccatttgatttgtgtacttttagttctgttgttgtaactttatatgcatttaatggatacatgttgtacacatagctttcttttttttttaaattaggtgttagattttgtctcattttgtttcattaagtagatattaagtacctactatgtatcaggtcccctccaggcgttaacattcttttgtttattcaatatctgtttattaaatgtttggtatatatatgcctggtgttgtcccaggatatagctgtgaaggaaagaaaagctctgtcctcagagataacattctaatggtgcaggcagaaaataaaatcaagtaatgataaatggtgcgaagaaggttaaagtaggataaaagagaatagaaatgggcgaaagagctattttaggtagtgtggtcagagaaggcatttctgaaaacgggacatttcttttcttttcttttcttttttttgtgacggagtctcgctctgtcgcccaggctggagtgctgtggtgcaatcctggctcactgcaacctccgcctcccgggttcgagtgattctcctgcttcagcttcctgagtagctgggactacaggcgtatgccaccacacaagctaatatttgtattcttaatagagtcgggttttcgccattgttggccaggctggtctttaactcccgacctcaagtgatctgcccgccttggccttccgaagtgctgggattacgggtgtgagccactgcggccgggccaaaaggagacatttcatgaaagacttgaaagaggtagagcagtcgggcacatactttatctgggtcaagggcccctaaggccaacagaacagcaagcacgaaggccctggactgagagtctgttggcagtgtttaggaaacaacaataaagtcatttgtttagagcaaacagaatgaaggaagagtagtgggaaagaaggttggagaggtaaatgagaacgagattatgttgagcattgtataggccatggtaaggattttggattttaagtatgatgggaagccaatgatgaattttgaaaagggaaatggccttgtattaatttgctaaggctgccataacaaaatatcaaagacagagtagcttaaataacagctctggggtctagaagttcaagatcaagctgtcagcctatttggtttccttccttccttccttccttccttccttccttccttccttccttccttccttccttccttccttccttctttcctccctccctcccccctcctccccttcccccctcccccctccctccgtccctcccttccggaattcctttcttcctgagtcttgctctgtcgcccaggctggagtgcagtggcgccatctcggctcactgcagccttcgcctcccgggttcaagcaattctgcctcagcctcccgagtagctgagacagactacaggcacgcgccgccatgcctggctaatttttttgtatttttagtagagacggggtttcaccatgttggccaggatggtcttgatatcctgacctcatgatccgtcctcttcggccctattcggtttcttctgaggcctttctggcttgcggttggccttctccttggtatctcctcacatggtcttttctctgtgtgcacacatatctggtgtaccatcgtgtttccaaatttcttcattttataaggataccattcagattggattcagacctactttagaggcctgatgtttagcttaattacctctttaaaggccctgtctctaaatacaatcacatcctgaggtagtagggtttaaggattcaacataggattttggggggaacacatttcagcccatagcagggctcatttgctttacttagcctgctgagaattgacttgaggtgtgttggggcgtcgggggatggtggtggtggaggcgagtatagccagggtattgaggttagaatggaaacagagagttaggaggagattagacacgatgacaacatgctctaaggaaatagctgtagagttgatgagaagttatcagaattgtgatttattttgaaagtagaatgcataggattattttgatagtagatttttagattttttctgttctgtttatgaaaaatttaagctggaaaaaaaatgcaccttacaaagaccaagtaaagttccccttccctggctttttttttttttcccccaacctgagttggtatctgatacagatattgggactacctcaaactgcttctctatgattctgcatctctgagattcatcttagaatttatttctggacagattgttcatattcttggaaaatagctcttggattttaacttgtcctgctgttgggttgtgtaagggaggaaaataatttttttcaaccctcataagttattatttggaatggtcccctgtaacaaaagaaaaacaaatataagtttgttaacatgtataattcataaatacatgggagatactcagaatgagttggcttttaattcctgcttatatagtatcttcaacaaatgtttagcaaagtgtcaagacaaagaaaaaggactttgagtctgtaggggcagcaacttgtagaaaggcaaataatggcaggcaaagcataattagtaaacttgttaatgtggattcctttggtgtcgtatccagaccaatacaggtgtaaagttgtatttggtggttaacttgtgttcttccacggtaaacaggggttgggttttttttttttttttttaaccttttttgtctttggagtaaatttatgtcttgcttttaggcaagtggatagcagagagctttcctgcatctgctttttaattgccttcagttcaacaatccttatgccaaggaggcatatttagaggtggcatattgctgtctacttctggtggtcttgaacattttaatccctctgtatccttacatgttgccctgccctcccaccccaacaagtagttagcttttttttttttttttttttttgagacaggtttttgctctgttgcccaggctggagtgcagtggcatgaacgtggctcacggcaacttccatgtcccgggcttaagccatcctcccacctcagcctctggagtagctgggaccatagatacaccatgcctagctaatttttgtatttttttttgtagagatggggttttgccatgttacccaggctgatcttgaactcctggactccagcaatctacctgcctcggcttcccaaagtgcggggattataggcgcaagccactgtgccctgccctgttttgcattttgtgtttatcattcttttgcttaaaaaaagttggatatatatgtatacctaaataatatactgtttacttttgcttgttttttggcattatgtgaatggtactcatatagtatttttttgtgatttgcttttttcactcatgtttttaagattaaccactgtcgtagtttgttgctgaattctgtatttccctgtgttacaatattccactgtgaagaaaattttcattatatgaatataccacagtttttttattctgctgtcagtagacttggattgcttccagtttacataattgagcttattgccctgaggctctctttgctcttatttattgatctgaagcttagactttttctagggtttcctgggaagaaccaatatcttactacatgtttataggtctgtggttttctccattaatctgatcaaatttgcatgtcttctaatgatttctaaaaatttgtaatctgctaacagtgtcctttcctgttttctgtctgtcatgattttattttcaaaaaccaaaaaaaaaaaaaccaaacattttttctatcacttaaatgtgattattttttattatttatttattaatttttgggacagggtctcatttttcacccagactggagtaaagtggcccgatctgggctcgctgcagcctggacctcctgggctcaaatcatcctcccaacctcagcctcctaagtagatgggactacaggcgcatgccaccatgccaggctaattttttgtattttttgtagaaatgaggtttcgctacgttgcctgctggtcttgaactcctgagctccaaatgtgattattttatatggaaagtagataaatcccagtgttcagtcttccatcttaggccaaaggttctcttccttgtctttctttgcatgttattcttagtttttgcttgactttttaagtgtaccttgtcttagacgccttccctgactgcttgtttcttacattctgtatttatctctgtcattctgtattatactggctcatctcattattagacagtgaatgcctgatgatgaggaattttgttttatcctttttatccttaatgcagcatgatatctgatatgtaaagggtgctaaataaatgtttattgaataaatacatgaaaaaattagtataaatggggctgaatgcgatggcttatgcctgtagtcccagcactttgtggggccaagatgggtggattgcttgagcccaggagttcaagaccagcttgggtaacatggcaaaaccctgtctctaaaaaaatacaaaaattagccaggtatggtggcctgtgcctgtgatcccagctactctggagactgaggtgggaggattgcctgagcccaggtggtcgaggctgcagtgagctgagatcgtgccactgcactctagcctacacaacagagtgagaccttgtctcaaagaaaaaggaaaaaaaaaattagtgtaaatgggagtggtctgtaatagatacctagtcatcaaactggcacagtagttttgcagataagaatcaggagcttgagatggtggcacatgcctgtaatcccagccactcaggaggctgaggtgagctgcttgagcccaagagtttaaaatcagcctgggcagtaaagcaaactctgtctcaaaaaaagcagaataatcttcctgcggggctaccagtctgtgggggatttcattttcatagagatataaccactttttagttcataaaggcagctttggagactgatatgtcaaacattttatagaaaagaaaatcagcagtttaattttgtgtgattttgctttaatattaagctgacatgactgttctgtatattgagggatacaatttatcttagcctaagtcttctggtatgatagaatgtttaaatacttacaaactgagaaataggggaggctgagtggtgagttgcatatctttagctactaaaatgtgttttttgaataggtaaatatatttatgtagttcaaaatttaaaaatacaaacagcgtatattatgaagtgttcttaccttcatttccctccagctgttcaaaaactgattagcttttggggttccctctccagagcaaccaattttattagtttacaaatagttgtgtgtgtgtgtgtttgtacttttacttggattctttttttaaaattctgctaagctgattacttgtattggtgtaaagaacagctgaatcaaaatgtgtgattttttttttctccccccagatacatcaaattacagaatggcttgcaggcacttctgatttcagacctaagtaatatggaaggtaaaacaggaaatacaacagatgatgaagaagaagaggaggtggaggaagaagaagaagatgatgatgaagattctggagctgaaatagaagatgacgatgaagagggttttgatgatgaagatgagtttgatgatgaacatgatgatgatcttgatactgaggataatgaattggaagaattagaagagagagcagaagctagaaaaaaaactactgaaaaacaggtgcgagtcatgtctgttttcttctaatttgggaattctttgggtaacttctaaactcaagctttattttttaatggcaaaaaggaagtatatagttatcttttggtcttcagtaaaggtctattctgtatcaggattacattttgaaaacattttcctccaattataaaagtagtaaatgctcattatataaactaatggaatataaagaaaacaaaaatataaaaatcacccatagctatatctctcagaggtaatcaacactcagaggtatttgaatttatgtgtatttgtatacattatatgttttaaaaacaaatactggtagatgaggagctgcagaattcttagcctggattagagaaataagagtatgttatccttggtgagactggaaaaagaagaagaaaagaatggggctagtgtgaaatctttacatgggcctagggctctaagagttattgtatgggtggcttctatatagataattagataattgagtttgatttagcactttatatgggaacgcaaaggtctggacaaataagtactttggaagagttgaaatagaaactgggcagttaagcttatttaatatgtaacaaccatcagtggatagataaataagtcttgatagggagaatttcttaatatcttttgaagaatacctccattttcatagtagggagtacccagaggataattttcggagccagtacagtggaattgaccagcaaaagttagttaaagctagtttcttgaatattgataatatattcaacatggtacagtctacatacaaagaggccgagatgggcagatcacttgagtccaggagttctgagactagcctaggtaatgtggtgaaaccctgtctctctaaaacattaaaaaaaattagctgggtgtggtggcacatgcctgtggttccagctacttgacaggctgaagatgggaggatcacctgagcccagggaggttaaggttgcagtgagctttgattacaccactgcactccaccctggccaacagagtgagactttgtctcaaaaaaaaaaaaaaaaagaaaaagaaaaaaagtggtcacccttaaaggtgggaagagttgaggtataagtagtagatatgatttaatagttattcttcttggaaaaaattattttttaaaaagaaagattgtaccagttttttactaagttgttggattgagtaatatttttaagaagctttttcctgtttactactcagattattagtgatcctgtttttgggtagcatgatagaccaagtattaaatagttttaacttggaaggctgtagagatgaacatcaaaacactgggggaaaaaaaggtatatatatgtcacttgatagtctgtatgctaaggtctctatgaacagattggaaattaatagattcacttttaacttaaaatagatctcataattccaaatagagcattaataggaagaaattataaaagtcacaaaaaaaaagaacactgacagtcaggaaacctgggttctacttctggctctgttcctttctttctgcgtgattttaggtgttttcattttctttcttttttttctcagttttaaaacaagaatataaaattctgaggcctattttagctctaagccagaccatgttataacttcttaactgaatacttcttatctatactttttttctatatctttccatctatctgtaagtagcttttcccatgatctgacttgtttatatttcctattaactgacaaagcatttaaaaacagttaaaaattgtctcgacaggcattttaaatgtcaagacattataaaatactttagatttatacagcaattgtgaacacctttgacaaatgaacatgtctgttcagcctttttggtacccctttttattttgcttaggtagatcaaattctaagttgatcttttctagcagcagggtcagagtctagtgatcgtttttaaaatggcttagatgctacctttcttttctgagaactcagtgtgatataatccttataagatattgacagctaattttatggattatcctaccgggacagtggaacctaagtagtttgaagacgagaaattgttttgattcagaagcaatgggttcactagtgaaaggaaagatcccacgatcgtaagtggtaaatgtttatatttgttgaataactctctgaaaaaaggaaataaagtagattagccttggtaagaggtggcttaagagtggttttatgatctaagttttatttgaaaaatgtgtgaaacttgtttaaggtaaatgtgagaattaataaaggaattgagaagaaagatatttgatcgttttttgaataacatttacctaattaagaagttaactacttttctgaggcatcttttttatccctctccgttttcctcctcccaaaagaagttgttcttgattttaaaagtttgataaattaacaaggttgaaatttgaatatgatatacattgaattaagatttgttcagggctttcttaattcagttctcaagtatgaatttctcaggtctgaattttttaggtagaaaattctcaagtatgaatttcttttctagcaattgcagagcctgtttttgctgtggtcaaagctgactgatagactgtggtttaagtcaacttattcaaaaatgtcttcaaccctgctggtcgagacaagaaatctttatggggtagttggagctgaaagcaggttaggcacctattaaaacatcacagaacaggttagattgtggtttgaagaactggatattccccaatgttttaactgagtttatgtgcctaagtcttcaaaatggggtttatagtatcaagtgaggctgtttggttcttctgaaaacacactcattttctgacacatggctagactttatgccaggtacatgctatttttgaaaagctcttttttaagaggtaactgtttattaaaacaatctgtttcaccaaatatgttagccctgtaaaattgacatttacaaaagtttgaagaaaacaaatttgggaaagttaataattcgcctttctatcttcaaggattcaaattgaccgttttttctcctttttttgtcttttaacttactgtaattatgccccaatagttcgggtgcagtggctcacgcctataatcccagcactttgagaggctgaggtgggaggattgtttgagtccaggagtttgagaccagcctgggcctcatagcaagacccctgtcttaaaaaaaaaaaaaaaaaaaagtcccaatcattttaagtgcagtttggtgtacctcttggccatcaattttgttaaaaactctgattttcccaaagtattgggagaatatatactgataagtaatatatgctgtatatcttcaattagaagtgaagaactaaaaagcctctttaaaatttagttatactttttaatagctaccgattttatctttttttatcacttactatttttgttagatgttttcctaaaatgttatcttattctatcttaacaaaattttctaagttacatgttgacaggtttcacatctagtaactgagtcactcaacacaaagcttttaattgcttagagatcttcagagatatctatctagatatgttacttccgcagatttccaaaatctagtaattcagggaaaaaacttggttcagaattatgaaatgctgacatgaaatgatatttgggtgggctgtccagtccctcttccctttttttctgtctgtttctgctttttttccttaggtctgcacctgttcagcatttggcaggatggcaagcggaggagcagcagggtgaaactgacacagttctggtgagtttcactttgctgctcctcctgattctcagggaaagaattttgttactcctattggaaaacatccatctccaaatgaatccttaagataagatgcgaatattattcctttagggttgactcaactatttgtatgtgttctaattactccagtctgcagcggctctttgtgttggagttgggagtttcgctgatccagatgacctgccggggctggcacactttttggagcacagtaagaatttgtaaaatatcattcctggtgtgtttttttcccccctccaaacttatatgaattgatatcaaagattagcaagtgatttgacagaagtatgatatatttagcaagagaaaaggctaagaaaaaatccttgatttatgaatatcgtgggggaaacaatctgagtgtacttatattgagagttagaatgaaaccacacagaaaacttttaaactgtagatgtcactattgttgagctatgttaaggccaacggatcaggagatgattgccattttctaggaaatgaccagtcctggggagggcagtcccttccagggttagcaaggcccccagccaaacatcagaaatacaggaattccctgggtgaggtggctcacgcctgtaatcccagcactctgggaggctgaggtgggtggatcacttgaagtcaggagttcgagaccagcctggccaacatggtgaaaccccatctctactaaaaatacaaaaattagttgggcgtggtggcatacacctgtagtcccagctacttgggaatctgaggcaagagaatcatttgaacctgggaggtagaggttgcagtgagctgaggctgtgccactgtactccagcttgggtgatagagcaagactgtctcaaaaaaaaaaaaaaaaaaacaagaaacaaaaaaaacctagaaattcaaaaggcatgattaatataaaaacaaaacaatagaagcttttcatttaatttggaatgtacctaaataaaacttacacggggccgggcgcggtggctcactcctgtaatcccagcactttgggaagccaaggcaggtggatcacctgaggtcaggagttcgagaccagcctggccaacatggtgaaactccatctctacaaaaacacaaaaattagccgggcatggtggcgcacacctagagttccagctgctctggaggctgaggcaggagaatcacttgaatccaagaggcggaggttgcagtgagccgagatcacgccattgcactccaacctgggtgacggagcgagactccagctcaaaaacaaacaaacaaacaaaaaaactctatgtggatgttatatagttacaaatatttatttttattttacaaatatttattttaaattactctttttttaatggtctggttttctaaagtatttgagggtatacttcttactttgtgaatttttatagtagccattaatctgcatatgtttgtgcttaaattttaatctccttaaatttaattgaagagattaagttgtaacagcagtagcagttaatctgcatatatgtttgtgaatttgtttgaattttaatctaattaataaaaggtgaattttaatctatttagacttaaatatatttgtgatctctttataagttatatgttcgtcttatctttctttaaagatgaaattttttttttttagtataaaagtaacatgagcataatagaaagttacaaaatcaaatgtaatgaagaaagtattatttagggtcaggtgtggtggctcacgcctgtaatcccagcactttgggaggccgaggtgggcagatcacttgaggtcaggagttggagaccagcctgggcaacctggtgaaaccccatctctactaaaaatacaaaaaattagccaggcatggtggcaagtgcctgtaatccagctacttgggaggctgagacacttgaacccaggaggttcaagaatcacttgaacccaggaggcagagtttgcagtgagccaagattgcaccactgtgctccatcctgggcaacagagtgagactctgtctcaaagaaaaaaaaaagaattcagacataaccatttgatgtgttggtctattttctttcagtttttctatgcatataagaaagttcatgtgtgataaaaatattttctatatctttgtgttgtgtgactttgtgttctttccatttagtggtattcatgggtagtttgaaatatccagatgagaatggatttgatgccttcctgaagaagcatgggggtagtgataatgcctcaactgattgtgaacgcactgtctttcagtttgatgtccagaggaagtacttcaaggaagctcttgataggtaactaactctaaatatactttaattttaatgatctaatggcactttgcaaatgtaaatagagtgttcttgtacagtagaattgtcacaatactttacttggaccagtcatggtgactcatgcctgtaactcaagtactttgggaggctgaggtagaaggctcgcttaaagccaggagtttgagaccagcttgggcaaaatagtaagaacctgtctctacaaaaataagtaaataaaaaattagccaagcatgatggtgagtgcctgtagtccttggcactcaggaggctgaggtggaaggattgcttgggtccaggaattcgaggctgtagtgagctacagtcacaccactgcactccagcctgggtgacagagtttgtttgagaccctgtctcaaacaaaactttatttggagaaaaaagctgttaaactgttaaatacactttgactcttgttctattatatatagtctttgtattaaagattaaaataaaagtcaacaccttttgggttttattaattttattaattatgtattctctgttgactcattatgactttttttttttttttttaagagatatggtcttgccatggtgcctaggctggagtgctgtggtgcaattggccatcaattgcatgaatgcatggctcagtgcaacctcagcctcccaggctgaatgtgccaccgctcccagctaatttttaaatttttttgtagaattgggagtctctctgtattgcccaggctggtttcaaactcctggcctcaagtgatcctcctgcctcagcctctcaaagtgctgggattataggtgtgagccactttgcccagccacttaaaaaacagaatttagtagaaaatatggagaaacagagaagcaaaaaagggataagattgcctccaactttataatctagagataaccaccattaatgttttggtatagacccatctatattttttaaagtataccgatcatattgttcatacccttttataattgttaattttaagcaagatatatcattttaacttacataatttataaaacatgatttttagtgattgtatgttatttacattgtatagaagtaccataaggtgtttaatcagttacatatgattggacagttgagttgtttccagttttctaatactgtgatgattatcctgatctctgtgaatatccttaattatttctattaagttctaagcagtgaaattgctgagtatatttgcaaatatatttttaagactttttttttctttaagcttttgaaattcattgcaaaattgttttccagaaagtttgtcagtacaatagtagaagtttgagattacagggttgcagaccaaagtctaccccggaaaaaagtagaaaagtagaaaaaagttatacctaattctagatatatgcaagattgaaatgtaaaagaaaaaagaaacctcacgtttgtctagtataatgtaagctccttcagagcaggaatttttatctattttttgttgatacatctgcaaatcaataatttggtagatactcagatttgttaaatgaattaatgcagttcctttatagcaaaaattaccataaaatcaaaagataaatgaccaaaaaaaattttttttaaacatgatagagatctaatattttttttaaaaattggcctggtgtggtggctcacacctgtaatcccaacactttggggggccgaggtgggcggataacttgaggccaggagttcgagaccagcctggccaacacggtgaaaccctgtctctactaaaaacacaaaaattagctgggcttggtagcatgtgcgtgtaatttcagctacttgggaggctgagacaggagaattgcttgaacctaggaggcggaggttgcagtgagctgagatcatgccatagcactccagcctgagtgacagagtgggactctgtctcaaaaacaaaataaaataaaaaagataaaataaaaagaaattatctcttttcttaagagattaatttgatctggaaaaatcctttggacatattcctataaattggaagcatatgccactatttatttattttttttttggagacagtctcactctgttgcccaggctggagtgcagtgatgtgatctcggctgactgcagcctcatgcctataattccagcactttgggaggccaaggtgtgtggatcacttgagcccaggaattcgagaccagcctggccaacatggtgaaaccccatctctactaaaaatacaaaaattagctgggtgtggtggcgcaggcctgtaatcccagctgcttgggaggctgaggcacgagaattgcttgaacctgggagacggaggttgcagtgagctgagatcgcaccactgtactccagcctgggtgatggaccgagaccctgtctcaaaaaaaaaaaaaagaaagataaatcaatgaaggcaatgcaaatgatgcctgagatgatctttcctataaatttagacaggatcagcaataccttcagaggagactttaaccatacaactttgaagaaaactgcatctttactcttgttacagagttctcagctcttaagttttacagaatccaaacaggtctttgtatgtgtgaagaaatcttaagcagaagacaagttgaatttttacaactttatatttagctttgtccatatacaaagaaggaaaaataactgattttattgggaaaaaggataggcaaatggtatgtatgatatgaatacattctggccatctcagagatgatgaaatttggtataaaatgtagttaagaaatttgttttgtttccttttaaagagttgttctaaatatgttttgtacaaggactgcttcagcatctaagaatatcaccttacacatttatttttatttaaaaagaaagccacccaataagaaagccactgcattaataggataaattaatgagaatatcaaatcataaatttatgccataagtagagcattatagggtgcaaatactataataaatgctataatattatacttctacaatgtataaggaaaagcctttatacgtgtgtaatatgctcttatataacatggattaagtacctgtttttaataggttagcaaaatctgattccctcacacaggccacattgtttataagtatcttttaaataaacagctgaggaaatgactaaatttttactccagttaagtaagtgagcatggaagccgtctttaccatggtggcgtcttctattttcagtaaatttgaactttattttatcagtatttcatggtaagagtgacaaatatcaaagcttaggatgtccacttctaacaggagaccctccccattataagcgggaatacaaaatcttcactttcaggttgtgaaaaaggatgaggcgtcctgagtagttatagcctagattccaagtgcctgagtattctggggaaccccaagtcttgattgtagcttcatgggcagaactggtagtgttcccaggagcctgggagaagcaaacataaggcatctcaaaaggaagatgccttccttctaggccctaaattgttacaaatattttttcaagtaaaataaccaacattcagtcaaaaataagcaggtactcaggaaaataatacaacatgattgagaacagataacacaaacagattctgagacatctcaagtactggcatagttacacacaatttctaaaataattatactttctattttttaagaaataaaggccagacgcagtggctcatgcctgtaatctcagcactttgggaggccgaggcgggtggatcacgaggtcaggagtttgaaaccagcctggctaatatggtgaaaccccatatctactaaaaatacaaaaattagccgggtccggtggcgggtgcctgtagccccagctacttgggaggctgaggcaggagaatcgcttgaacgtgggaggcagagcttgcagtgagccgagatagtgccactgcactctagcctgggtgacagagcgagactctgtcacaaaaaaaaaaaaaaaaagaaataaaagacaaatttgaatatacttgcaaggaataagaaactgtcaaatatgacctaggaaatttgtaaaatgaaaagatacatcttgaactgaactatgataaaaaaaattgaaaatgtcatggacaagtttaagagtaaatagagttgaagatagaattagtaagccagaagataagacagaaggaattaacccaagtatagcataaagaacatatataacccaaatatagcatatagcacaaaattaaaaatacaaagaatatgaagcatagaggatagaatgaaaacatcccatgtattttacttgtagttgtagaaggaggagagagaaaattgaagtagagacaacagttgaagggttgatcactggaaaattttcagaacctgttgtaagacatcaaatcagaggttaaagtctaataacttccaaaaggatacattagaagaaatatggaaaatttttgccagataaagagaaaattttcttcaaaggaagatgagttacacttacagatgactactcaacttcgtgctctgaaggaaaataactaccaactaataactagaatcataaattgtacactaaataaaaatatcttttaagaatgttagtaggctgggcatggtgactcatgcctataatcccagcactttggaaggccaaggcaggtggatcacttgagcccagcagctggagaccagtctgggtaacatggtgagggaaaaaaattagcagggcatgatggtacatgcctgtagcctcagctacttgggatgctgaggtgggaggatcacctgagcctggggagttcaaggctccagtgagccgtgatgtgccactacacactccagtctgggtgacagaattaaataaaattagtttcattatttaagtcaacagaaattatccaacccatcattaatcataccaagtactgaaaagaaaaaaaatgccccaatatatctagcaggtagttaagttaaaagttaccttattgcaagcaaaagttaaaagttttttaaagaagcctgagcaatatagggagaccctgtctctataaaaaatttaaagatttaaaaaaaaatggtagtgcacacctctagtctcagctacttcggaggttgaggcaggaggattgcttgaacccggcagtttgaggccgcagtgagcagtgattgtgccactgcattctagcctgagtgatagagtgagacactatatccaaaaaaaaaaaaaaaaagtttactaaacattttaggaaattaattttttaaatcattctattttgctggaaaaacaccaatacaccaatctttgaataatttttaacaatttaattgcattgctattatgtatttatataagtggtaatttgtatatgtaatttgatacatcacagtttatataattaaaaattaatttaaaaagcagatgaaattataagattaacttaaataccaagtctttaaaattctaatttaacttttaactgaaacgtttttagtcatctgtaaacttgcattgaactaaaaaagtaagctttatatactctataaaaacatggatatacataacattacataaatagactatctgtgatattacaattttacaaaggaatgaataggagaacatttccgaaaaggctcctaagggttgaaaatggaaataaaaagggttgataaacattgggttagaaataggtatataggtaataaaactataaagaaaaggagagaaattactgctatacattcaggatatttcttgaggtaagggtaggagctgggtgcttctagagtgttgactatggtctgtttcttcacctgggtgggccactcaggtgtagtttatatgttcatgttttgttaacttttctgtatgattgttattaaatatatttcacaatgaaaaagttaaagtaacatgtagatattagtttaaaatatagaaatgcagattatttagattttatatacttaggattgtgaattaaatctccaacttagtaagtttcttaattaaaataatagatgttgattgatgaaagtgaacaaaaacggaaatgccagttttgttttttgttcagatgggcgcagttcttcatccacccactaatgatcagagatgcaattgaccgtgaagttgaagctgttgatagtggtaagaggagtactttatgtgtaactacagttttttccttcatgaaaccagttacttattacatttatccttctttatctctagaccattttatctttatattttaaaggactaaattgaaatatgtgttatgtttgttcctgaagtcattaaacatctaattcagtgtagatttgaagtaaatgaaaaggatggtggattttagttttttcatcctttgtttttcgaaggttttaccataggggctaatcttttgagattcaaagattgaagactataaaggaaaagaatgtgcttatatagggtgaggcttcattatagatctgtgctataaatattccttaattacatagtaccaataaatatcaccattgtatattatccctgcttgatttatttaagtattagaagcatttaatactagacttgaggggacttccagttcatataggttaggcttggcttatagccactgcaagtctctgtatttgttccactttttgtagtatttccctccttggtttgatgcagtgtctagttctaataatgatgtaaagcatttactaggctgagtaaactacagatggctagagtgatctatctggaagtcaacagacccctgtttaacttacagaagtgtctagctgtggcattcagtttatttgtaaaaaaggatggaatggttaagctcctcctagctgtagtagctccttggaaatcaaggatttattttctttatttttttacttgcctaccacagtgtctgttttaccttaaacccagttaaatacctgttgaatggatgaaaaaacaaaacaactaaggataactaaaagcacttttcatattttgagactcaagaactgttatctgtgtcttaaatgctttctagtatgtttttctttatacagtttctagagtgggttgacaccagtgtttaaacaagcagacctttaattagattttacaattttaagccagaatatattttattatgctttgaaaaattatgctgaaagaaatatatatgtatatacacacacagtatggagttttggtttatgctgaactaaagtaaaaattctgttgtgcttttgttcatgatctgcctgcttcggcctcccagagtgctgggattacaggtgtgagccactgcgcccggctgataaattatttttaataattgactttttattttaatgatggtttatactcacataaacatatataattgcctgcatagtatgtcttagtgattgagatgaaaggcatgtccaatgcctttttaaatcttaattatgtgtcaaagtgcagtctctatttttatttacttacttcttcatttttaatgtttgtttcctttccaaatatggtctctaagtgttcagatatttatactctatttttatcagttgcaaggggtcttaaatcacttttcgtagatatgtttacatgtctgctatattacctgttattgcagaaacatggtggcttaaaataaaacatttattttcttacagttttggaggaatggaatcaggtacgttagataacttcctcaaggttgttgagcttagtgtcagaactgcagttctagcggtttttagtccatttgggctgccataatggaatcccacagaccgggtggcttataaaccacagaattgtttcttacagttttggaggctgagaagtccaagatcaaagaactggcagatttggtgtctggtgacagcctgctctctggttcatagaaaactgccttcactctttgtcctcatacagcagaaggggcaagggagcactctgaggtctcttttacaagggactaatccattcatgagggctctgccctcattacctaatcatttctcattggcccctacctccaaataccatcacattggggattaagtttcaacatagaaattttgggtggggggacacaaacattcagtctttagcggtagctaaaggtatttctgacttcaaagtggattgttcttagccatcatactttattaccaacatagttggttttggaagaaatttaaacaatatatatgaccaaattcccagataaaaggattaatattttattagcattttcatcagtaaaatcttgtacatagcatcctagagctgaaactttcagattattaactaccttgtgtttcatttgaaaaataagagtaagactctggtaagctgaattgatttacccaaaattacaggtcatattaagtcatagagccaggcctggatcattgagtttcccacttcagtcttataacacgtgattcatgaagttaattttgttaattccttgctttctgttctgtaagtttgaatttccatataataaaggagatactgaattttgttttattatgtgtttatttaaaattgacagaatatcaacttgcaaggccttctgatgcaaacagaaaggaaatgttgtttggaagccttgctagacctggacatcctatgggaaaatttttttggggtaagatactaaatacatcatcttatttcatattttctagttaagatttagaataagaaaagttgataaagaattgaaaattataaagctagagtccctaggtaccttttaccttttaggatagctagttagcctttcaaacgcgaagttgttaaatatgcctctatttggttctctaacagtgaatatagcaagagtaacacctaacattttgtgaatgctttttaagtgccagatactgtgctaacactacatgaattatttcatttgatcattatcacaatgttcagagataggtaccattatcatctccatttaaagataaacaggtttaggccaggcgtggtggttcacacctgtaatcccaatgctttgggaggctgaggtgggagaatcacttgagaccagttcaaaaccagccttggcaacatagtgagaccccatctctattttaaatttcagtcaagttatctcatttgtttaaatcacacagatagtaagtggtggatgtgagatttgaacatctgtttatctgattataaagtctgtgctctacctcagcctgacatttccatttgtcaacagagttagcaatagtttctgtaagagtttttgaactgcgacttaattttgttcatctagtaaactgtttaactggtgtctgtttttcataatggcattttcttagtgggaggatttagttacagcctcatattaatcctgttgactatagagtaaaatttaggatgagatgatctgaattattctttaaagggtgttttgtttccctgtatatttctgtacagttatatacattttatagggcattcttgcttcatgtgttttatttttaagaattagatagccgggcgcggtggctcacgcctgtaatcccagcactttgggaggccgaggcgggtggatcatgaggtcaggagtttgagaccagcctggccaagatggtgaaaccccgtctctactgaaaatacaaaaattagctgggtgtggtggctcatgcctgtagtcccagctacttgggatgctgaggcaggagaatcgcttgaacccaggaggtggaggttgccatgagctaagatcgtgctattgcactccagcctgggcgacaagagcgaaactccgtctttaaaaaaaaaaaaaaaaaaagaattaggcaaaaatattattaaaataattagaaagaacctggattgaatactgctagactaattattaagcaaggaagcttagggagttattgtctgtttttttaaggttttcccagagattaattccttggatattaaaatatacttcagaattgtttcttatgcatttttgtcttattaatattaatacattattgcacactggttcaatattcttgagtcccttgggttatttcattaatcatgtatggtagcaaaatatgcattgatgatgtagaagacttttaacaaagttaacttagttatatctataatttttttcattcttttataggaaatgctgagacgctcaagcatgagccaagaaagaataatattgatacacatgctagattgagagaattctggatgcgttactactcttctcattacatgactttagtggttcaatccaaaggtaactattaattatggctcttagagttaccttgaagtagcgctttcttaggatttgtttgcctgtatcagtgttgtagtgtactattaattactttagtgcttgaccttaatacaaagtaaaggaaatcagaacttggagatgtcacgtagctagtggcaaagctcagggaaacacaagatgatgagattctcaggcaaatttttttctcttacagaaataggtcttatctgtaagataagatatgtaggctggtctgtgaatgtactaatattctaataggtcatgaattgatcttttaagccaccttcagctgcaattgtatctgtggttttacatttactctatatcgattacaaactcttacagggcaaagtgttggtttgttcattcttacataaggtcctgtaaaaatggcatgattaattgagattgacatggtgacaatttaagaattatcttaaatataaaatactgatgaatacctctatggcagaactatcttaaatgtaaagactgatgaatatctctattttccttcttttatcattgtcttcagtaactcacattcactttttctcattaaggaaatcatggaagctttcttttgttttctttacatttcaacctacttgtttttcaaagttagtaaattgctaaattattccttttaacataccttatagtttgcacatttctatttgaaatgctaatcctctcaccctaatgtgattcccctttttataaagttttgctttttacattgtcaaaattaagatcaaatctgacttggctcttagatgtaaaacattttcgcatttatgatcaaaatgagttcactaaagttgacttgaaggtaaagtttcgtggtatggtagattcttctgttcaaattgcttttaggttccttttacatttgctaaattaggcaattccatatttggtattccccaagttaattcacaatttttgattattgtgtttgcaaataattccatgtgtttttcttgaactagttattctgtttcttttgtattctcttcctctatgatggcagatataagagcttattaatgcttatttcaaaattttaaaacaagtcctagagtttttgttttttagcaagacagggttttgctctgtcattcaggctacagtgcagtggcacaatcatagctcattgtaacctcaaatgcctgggctcaggtgatcctcctgcctctgcctctgagatagctgggattacaggccccagccactgtgcctaggctagagttttgatgaaaactatgtacaatgtagatttcataggatttagatttttagcattaattataccatttaagagtcaaacatctatataaataatataaattcagaaatgattagtctgaatcccaggttttatataatggggttctctattgagaattagtgaaattcatgtgcctggtagaactaacaaatactcttcaatgatggtcactcagataaagcaaaaagtttcctttttcgtttagatctgttttttactataaatttccaaagaatttcttactaaatataagaagtgaatcaaaggaaaacataaatcatatatatgtatgatatatatatatataaagcctaaaaagaagacctatgagttaaaacctcagcaagtgtacattaatgtaaaacaagtggaatataaaagtactgatgagatggcaaaaaggagaggttaatgtaatatgggttagtacggaaaaaccttccaagaggatgtaagttttagaatgggcgtaggatggttggcataatcttatctcttggtccttcacactagcctaatgctaaagatatatttttttgttaaacttgtgtgccttttctgactttaccagggagaaataaaggggtctcacaaaattctgtgtgtcgtaaggttttcttttctactgttatttttcctgttcatccattactggttcaggagtggcaagtaatggccaaattaaaatatccctttgttttttagctaaagatctctgagaaatctaattgcatttctaccttgaataatgtcattgcattttcctgtctcttccctgccctcccctctcaagaaacactggatactttggaaaagtgggtgactgaaatcttctctcagataccaaacaagtaagatatttattttcatacatcatacaccttcagagttaaagagaccattatcttgtatgagtcccaaaggttttttgcttttttatttttacacaggtgatagaattaagacctaaacaaacttaatgactgtcaagatcacacagcttttgagtgggtaaactaagatgacaagccaagtttccatagttcaaaatttacaggcttgtaaatgtatatagtaagcaataattctgaaaaatttatgcctccttttacatttatttagagcttttctgtgatacgaaagaaaatactatatgagaggcagaagaatatgcacacttacatcccccgtattgggacaaattgtgttctgaaaatttgttttttttaagtcagttgtttggatattgcactggttttccccataaaagaagtaatcttttagatgatggctgactttccatactgcctgaaaaacttacttcatatagtcaaaccagatgttcttttataagaaattgtatgtcgagtttcagttcaggatgatttaaacattttttctccacctcaaattcatcaaaatagtacaaatatttaaaagatacattactgctacctttttgttacaaagtttacaaaaaatttaattctgaagcaatgaaatctttcttcctgtacttagtagtttgcattttaacaaaattaatgaaaacagatattttttcttgcatcagatgggtaacctgtggattttcccaattagtcttctaatacataattagaaaccagcataaaatgttagaataacttataatgacaactgattggttattattaatttggctttatatgaatttccattgataattagcagtgctttttggtatgtaaaggtaatcaagagcatgacaaatttgtggggctgttttttctgattagaagtcttgagtgtgaactatggaaatatcaaatgtgaaactttaataaaatcagaggtgtgtttaatagaggaattcattaggttctgtcaatccctgatgagcattaaaaaaaatctcatatattattcactaataactttggttccttaattagacaggttaaaaattctttgaggcatttaatactaatttgcatcaactgtgttttggaagaaatattaaagttacaatatcttcaaccagagtagaagcccctaggagggaccaagtcttttaaataccacagtgcctaatatagtgctttatacctaatattcacttcatgtataatcgttgattttaaaaaagtattatctctagtttgtttctttctggaatggctttgtctaggaggagaactgaaattaaatgaggctgatagagtcagtaaatattggggtgagagggggtcctttaaattcattctctatctcttgagttgtaaagacttttgagttattgggctgaggctaagaacagattgtgtaactgaagattttgtggctgtgttgccatctatttgttcatgcctggaatgctttccaagaaggagtatgtagaatagattataaatatctctcagttagatatccctaaagatattgcttataaaggcttttgccagttaaatttgtatgtatttgttttattttcagtgggttacccagaccaaactttggccatttaacggatccatttgacacaccagcatttaacaaactttatagaggtttgtgaaccaaaagtttaaaactgtttgaaataatgttagcacattctctataacctaattgaagctgccaattttcattgaaaatgagaacacaacagaaaatacagctgggttggaaaggaagtagatgggcaatggagatctaattaataatagatagcagaccactgactagctgcagatcgattgattctggtgccctgctgctacttcagtctatttcatgctttctccttgttttacctttcttcccttttgttctctgttttgttaaattttcattcatgtttcattttatttatattctgctcttttgcctttaaatgaataaaaatagatgagagggaaaacactttggcaatcgtttccttttaaattcattgtgaaagtaatatttgctaaataaaaatataaaatgtcaagaaatgggagataaatcacccttaaatcttaccatgaagagaagtcatttgtatcggatttcttttttttttttttggagacagagtctcgctctgttgcccaggctggagtacaatggcatgatctcagctcactgcttcgcctcccaggttcaagcgattctcctgcctcagcctgctgagtggcagtgattacaggcactcaccactatgcccagctgatttttgtgtttttagtagagacagggtttcaccacattggccaggctggtctcgaactcctggcctcaagtgatccgcctgccttcgcctcccacagtgttgggattacaggcatgagccaccacgcccggcctccagatttctttctgattttctaataggtatattttcttaacaaagtcgagattataaagtatatatataattctgtctcctgctttgtttcatttaatagtatacctgtaataactacataatgagttgtgtgattacattataatttacttaacaatttgcctacagtgaatattgcagaaacattcttaattcaccatctctctttattctatcacggcagatttttttttctgtttttactaattgccttaggtattccctccttcttcaccccgttaccagtctcttttgctttcccctaatcagtgactgttttgttacacgcttctgctgctggctccattctgttaatattaaactaactctttccagagacaacttactttttattgtattctttctggttttaggtttcctcttcatagaataatagcattgagaagaatcctagagatactttaacccaactaactcattttactatgagtaaacagattcaaaaagatttaaatgcaagtgattttctcaggtcatgtaagcacatatagcaagatagtggtaggactgaatttcagccatgggtctcctgactcctagttttgtatcctttcttgcaagaagagatccatacacagcagcatttcatatcctcatagttcttttatccctgctttctctacctctgaaaccaaataaaaaagaaatttacaaaaattgcattattcgagttggaaaattggcaagttgaaacaataactgcattgtacttaacctttccttgtttattggaggataaatatattgaattttaaacattcttgtagtaaaagtcatagagaaacacttacatctgttcttctggaaaatatttttgtttagttgttccaatcagaaaaattcatgctctgaccatcacatgggcacttcctcctcaacagcaacattacaggtaagagtttaagggaaaatttacttcattagaaccaagtgagagtaatttttaaagcatgctaaatggtttaagtttgggggttctgaatttataaacatagcaatacggtaacctggaacttgattactccgggagctttcaagccttgctatgtattttactattttttggatataaaaactagagctttctcagttatagtggcctttcttaagtctttgaaattaagtgtttagtgtgaatgctaacttttgtaatttgtttcgatcttgtcaaaaataaagttaaataatttgggcctggcagactggccaacatagcgaaaccctgtctcgactaaaaatatcaaaaaactagccaaggcgtggtggcacacacctgtaatcccagctactcaggtggctgaggcacgagaattgtttgaagctgagaggtggaggttgcagtgagttgatattgcgccactgcactccagcctgggttgacaaagcaagactctgtctcaaaataataataatttggattggtaatatgactagggtacataaatcccaaggatttactcctctgaattagggcaggtttatgcagattgggaaaggagttctacttgtctgtatagttatcttatatgagcagtgtagcatgggccagagaattatttaagttaaggatcagtcaatgcctacaaatgcttttccagttagaaataaatgctaatcaactgataaaaatttaacttttttgggagggggggtggggctcaagcagtccactcaccttggcctcccaaagtgctgggattacagacatgagccactgtgcccagccaaattcatattttaaacaaggttgtatgggctttaaggattgcctaacatagttgaaaatcatatcttgacattcaagaatttactgaatttaactgtgtaacctaattaaattttctcatatatacagaaatatacagaaaactcaatttttttctgtatgtctttgtggtaggaatactttaacaaaattacagtagaggccagggggaaagacagtttgaacagcatgtgcacaattactcggactattacattattagtatgtgataaagcatttttatacttgttattgcattttcatgaaaactctgtgagtaagtagttgggcaagtgaagagaaaaagaagaatacggttaagtatcttgctcaaggtcatgatttacttaaaggaaaaactaaaactagaaccaagattttctgaccctctgaacaacacatttcattttaccacagaacccaatgtggtaccaaaagcttttacagacagtaattcatacctatattaggttctagactgataaggaatctacatttcatattgggtgaagcaaaaagatttatcatgagagcagataagtttggtgtccaagagaaaaagtagtgcccttaaattttgggatgattgtactcttcagtaatctcaaatgaaagagttaattttactatattttctgtttttatcttcctgctactaaattaattataatttcatgtttagtggacatatgtgagaataagtttgtgattatattttcaattattgtagccttagaggtaagattttctggtgtatttataccttttgtttttttcttctgaccattaaatttttttaaaagggtgaagccacttcattatatatcctggctggttggacatgaaggcaaaggcagcattctttctttccttaggaaaaagcaagtattcaattaataagtattttcagtatagcaatctctgaaaaatagtagacaataagtattatataatgcattcttttactttagctgccaggaagcctagaataaaatttaatgcttaattatagttattttaataacttacattattttaatggccatattatatttgtgtatttccttgtaagccaccttttagcccattgttggaagttatttgtacacaaaattttaaaaaatcataaatgaaattaatagattccagaattacataaaagaattagctctaatcaagaatttatatttgactgaatggtaaagaaatcaattatttaaatgccatggatctccaggctttcctaacccccaaggctagactttaatgaaaacttcattgggtaggtaaatcatagttaataggtgggactgcaaatggtatatgcagccatgttagcagaatgtttcctaagcattaaagcacctgtttaagtcacctatagccaaataatagaaatacaattttagaatcaagactaatatattaaagtaattccttgtttgatttttctataaatgaatagtatgagaatggaaggatagatgagacatttaaataagtatttttaagacactttcgtgtactagaacattcaaagaaaactaagaggggagagttaactataaaataataaactaatgatattgggttcatatgtaccttacacaatatatgttatatgctttgagctgtgcacaacctttctaccttactgagctttattagaatttcagactctattctggtgtcctctctttttaatttttcagaattaatctagtcagggaaaggtatagtctcattatttctttcttagacaacctatgtaggttagctgacagcctcaaagaactcacttgacattcaatgtaagtatgttttagaagtgtcttaaggcttctcctaggagacaggttcaaaaatggtgaggccaggcgcggtggctcacgcctgtaattccagcacttgggaggccgaggtggaggattgcttgagcccaggagttcgagaccagactgggcaacattgtaagaccctgtctttattaaaaaaaaaaaaaaaaaaaaagaaaaaaaggtaagcaaaatgctttccagcagccatcatttgaatattttgtgctgttctcttcaaaaggaatggttttggcttaataaaactgttaatgttttattatggtgccatatctattcgtatttgcattaaacaaagactgttatttccttctggtgattcctaaatgtaccacaattccttgggaggctttgtgcttttaaaatttgcacttttagatttactgttggaaagtatatgtttacattcaaaggctgagatttccacattttacatagaaagcctctatattttgttaatttgaatgtctgtagactgtcaatccaggaacattgattgggttaattttttccccacctgtagatgctgggctcttgcactgtttggtggaaatggtgagacaggatttgagcaaaattctacttattcagtgttcagcatttctattacattgactgatgagggttatgaacatttttatgaggtaaataattcaaattcagttgttttttccttttacgtagatatcactttatgcaaaagactaattggatgttttgttttcaggttgcttacactgtctttcagtatttaaaaatgctgcagaagctaggcccagaaaaaaggtaataaacacttcctggaatgaggccaggagccagtcctggtatatttgaggcttcaggctgccggtagacatgctttagtcttgccttgatggtttttcaggcattttctgctctatttcctttattgactccatatccttatccctctacatgtgattgtatactaaggctttacacatatgtgggcagtccctttattttcacgcttctcttttattgttgatgcttctattgagaattttttaaacttttattctaggttcaggggtatatgtgcaggtttgttatgtaggtaaacttgtgtcacggtggtttgttgtacagattattttgtcacccaggtactaagcctactacccaatagttaccttttctgatcctctccctcctcccgcccttctccctcaagtaggcagaaattttaatgtatcttctaattatagttttctccttcacagaatttttgaagagattcggaaaattgaggataatgaatttcattaccaagaacaggtactggaagtcaaattctttttgcatgttatctgtgactgagttgaagctggtgtagacattgttcctctttttgaaagtgtcggtggagttttaattctgtcattctgtgtcatgtgagtctccaggtggccttgaagctatctgaaaattaactattgggtttttgagtatttatattgagtaagataaggcagtgagaggattaagcagatgacacagatgatgttgtgtggtaatcatttatctacatagtcatccatctatcccttcaataaacattcatggagacttgttatggtatttaatattttgggaattcaaatattgtgaagacattctataaggtaatttatatttaccatgtataatgttagaaacattgtgctttggaattcaggggaaggagagcattttccttgattgaaataggctcacaggctgggcactgtggctcatgcctgtaatccaagcattttgggaggtcgagcaggcaggttgcttgagcccaggcatctagtaaaggactgggcagtgtggtgttttgggaagcgtatgggatatgttatgaggtcagagttctgatgtccgctctgcctgtcgtttactcactgtgtgaccttaggcaagccatctagccatctagtcaggaaaaatccgactatgtttcctcattgtaaaacatgggactggaaccacttggtatctgaaggacctgtcagttttaagagtctgtgtatctgggtgctcggtaaatacttgaattgactacgttcctctggaaaaatatttccatttcatgtatcagtgaacaagtggtcattctttcagttttaaattaaaataatatttttattaatataacttcttatcgcaagacttttatctgacagtcacattttaatttttttaaaattttaattagagacagggtcttgctgtgttgcccaggcttacctcaaactgggctcaagttatcctccctcattggcctcccaaagtggtaggatcacaggcatgagccaccatgcccagtcaacacattttgattttttttttttttttttttttttgagacagagtcttgctctgtcatctgggcaggagtgcggtggcatgatcttggctcactgcaacctccgcctcccaggttcaagctattctcctgcctcagcctcccaaatagctggaactacaggcatgagccactgtgcccggcccaacacattttgatttctacattgatttgattcatgcttacaaatagtgtttagacgatagtgctgtagtgataggttgcctgtctttattgctcacataatcatgtggggcacttgactggtaaacaggcattcatagtccagtgtggtaattgctctcatgaagaggctgtgatatgactagaacctaatgggttatagggctcagagtgatgcatgaagggtatgagtttaagctccctaagggagtagctatggctatattttcttagaattttttttttttggagatagggtcttgctttgttgcccatgctggagtatggtggcacgatctcagctcactgcagcttcaacctcctgggctcaagcatccctcccacctcagctccccaaggagctgacactacaggcgtgtactgccacacctggcttatttttgcattttttgtaaagacagggtttcgccatgttgcccaggctggtctcaagtaatctaaccacctctgtctcccaaatgctgggattacaggcgtgagccactatgtccagcctactgagcatcagattcttaagctgcaattatatctcgttgtatctgttcagaagcttttggttttattgttaataagaaagggagaaagtatttgtatgttgtggtaaatcaaatataataatggagaagttctggtgtgaaataatttacctctttacagacagatccagttgagtatgtggaaaacatgtgtgagaacatgcagctgtacccattgcaggacattctcactggagatcagcttctttttgaatacaagccagaagtaaggaggtttatacgtctaaaacttacttttaggggaagaggagggtgagaaagtacgaagatgtatttaagaaccatgggaacgaagaaaacttagttatatttagtcaggatttttgtttgtttaaacagaagtatcaacagttttgtgaataatttctcatggttcttttacataattaagttttaatataaggagaaaatcaaactcagtacttgttaggtcctattttaataattttcaaatgttgaaacatctactgcaatagatgaagtgattcctaagaattatgtggtttccctgtgaaaaatacgtagttgtttagcttaccttttaattcagttggagagtcaggacaattaaatttttaatcattttgaaaatatttattaaaaaaatgtaaggttcccgaattagaaacatatgacttagggataatgttacatgccaatacattgtcggtcagggtcattccttcactagtggagaataagtcattttgtttcatacaggctagcgcgcgtcaaccagaggtgacttttgccttccaggggatatttatcactgtccggagacattttggttgtcacaactcagggtggggcgtggggtgctcctgggatccagtgggtggaagccagggatgctgctcaatgtcctataatgcagaaggcaggatcctaccatagttatttgacacaagatgttcatagtgctgagattaagaaattatagggcattccttgagatattttagcatagacgttcctaaactattaattttaaagaggacagggaaaggtaaaggaggaaggaacaaccacacattcttgccatgtcactaggatggttgtgcctggtagtggctggttgtgtttttttctgaaccaccatttgttgttttatacttaaataaatggtgtttaagtagtagttagggctccaaaccaagccacaaaattctgtttagtccttattgtagctggaggattactgaaggaggccctatcttggcagtgttttactgattcctggatatgaagtgatacaaaacatagctgttaggagcatagtccttggtagcatgtacaaatttagttagaactccacttttgccacttctagctgtattattctgtacaagttacataatctttaacctgagcaaattacttaaccatcacccaaagctgactgttattttgtgtaaataagtatatcttaggattgtttttaggaataaatgaaataatgtatgttaaatacttcctggctcacagtagaagcttagtagtaaaggatagctatttttactgctaatgctgttaatatgtaggatttaagataaacactgtttaaagcattatcaagaatatacttgatatttgtcaactatacctcaataaagtaggaaaaaagtttttgaaacactgttgagactttgtaaattagggtgttcatgaactgtaggtatttttatgagcatagatcttggaggtgcctaacaatgtgatttttgcctttttaacagagatgtattaggttaaaattgtgtgtatctctttcccctcttcccactttactaggtcattggtgaagccttgaatcagctagttcctcaaaaagcaaatcttgttttactgtctggtgctaatgagggaaaatgtgacctcaaggagaaatggtttggaactcaatatagtatagaaggtaaaatattttaacaattgtcttacatttaggtatatttaacttacctggaaatgtttattctttaataatttaatggttctagagggggaaaaagtataattttttaaaaagttcactttgaaatgaaaattacttatactactgcacaggaagttattttctgctatgtttatatttactaactagtgaaaaaattctgttatcttggtattttgggggcagagttttgacttagttttagaagaatgcttctcaaatgtagtgtgcatttttgtcacttggagatcttactaaaatgcagattctgagtcagagggtctgggtagggcctgagattctgcatttctcttttttcttttcttttttttttttgagacagagttttgctcttgttgctcaggctggagtgcagtggtgcgatcttggctcactgcaacttcttttgccccctgggttcaagcaattctcctgtccctgcttcccaagtagctgggattacaggcatatgccaccatgcccggctaattttgtatttttagtagaaatctgtctggggtttcaccatgttggtcagtctggtcttgaactcctgatcttaggtgatccacccacctcagcctcccaacgtgttgagcttacaggtgtgagccaccgtgcctggccagattctgcatttctgacaatctcccaggtgatgccagtgctgctaggaccacactttgagtagcacgattctagaatgcctggatatgtgtcagtcacagtattcctgagaaaggataattgatttgtaagccagttgataactagtttattattaagagaatgttgaacattgcattgtttattgggtcagtttatttttctcctttacagatattgaaaactcttgggctgaactgtggaatagtaatttcgaattaaatccagatcttcatcttccagctgaaaacaagtacataggtcagtaaaatagcaatttttatacataatccatccatgtgctaataggcacctgtatagcacattatattttacaaagtatcgtaggaatttatatttgagattcccagtaacattctgaggttggcattagtattttcttacttttccaaatgagaaaactgggggtcaaaaaagcaaagtgactggtacaagactattcagttggtgaataagaaaccaggatttaaacacagatcttgggactctgaagtttatgctttatcttgtatagagtagctgatcctttcataccaatctccttagggattgccattatcttgccagatttttctattgcttttcaaactgcaggtggcagcccattagaaggttgtgaagtcaatgtaatagattgtaaggtcagtgtaatgagccatgaaagcattaaaaaatcagttagaatagaaaatagcaaagtgtttcattgcatgtagaaataatgttattttaagaacttttgtttcagatatctgcctgtctactagcttgcagtggaaaacatatttctaagtgagttgcagaaaaaaatcattgaaagctaccaatcctaggtccaaggttttagagttgcttataactgtaatttactcagaacactgtatttccaagccattcattacatgtctaagtatatacccaaaataattgaaaacaggtactcaaacaaatacatggaccttcatgttcacagagcactgttcacaatactcaaaagatggaaacagcccaaatgtccatcagtggatgaatgtataaacaaattgtgatgtatacatactttacaatattactcataaaaagtgtagtactgatacatactataatggggaagaaccttgcaaacatcatgctaagtgaaagaagctagacacaaaaggtcacagataagtccatgtatacgaaatattcagaatagataaatccagagacagaacatagattgatgattgctaggggctgaggtgagtgggtaatgaggagcagtctcttaaggagtagggggtttccttttggggtgatgaaaatgatttggaactagctagaagtggtagttgcacaacatcgtgaatgtattaatgcttctgaattgttcactttaaaatagctaagtttatgttatgtgaatctccctttcattagggaaaaaaagccttttaaaaaagtattggccaggtgccatggctcatacctgtaatcccagcactttgggaggccaaggcaggcacatcacctgaggtcaggagtttgagaccagcctgaggaacatggagaaaccccatctctccaaaaaaatacaaaattagccaggcgtggtggcgcatgcctgtaatcccagctatttgggaggctaaggcaggagaatcacttgaacccaggaggccgaggttgcagtgagttgagatcgcaccattgcactccagcctgggcaacaagagtgaaactccatcacacacgccaaaaaaaaaaaaaaaaaaagtattaattatctatattagacacttcagtttcatatcttgaactgtaaataatctaaacaacccagttagcttattattttggttttctgagttagggttttactctgttgcccaggttggagtgcagtggcatgatcatggctcactgcagccttgacctgctgaactcaagcagtcctcctgtgtcagcctcttgagtagctgggattacaggtgcgcaccacaatgcccagctaatttttaatttgtttctagagatgtggtctctctatgttgcccaggctggtctcaaactcctggcttcaagtgatcctcctgcttcagccttctaaagtgttgggattacaggcatgagccaccatgcctaccaaatccagctcttttacctaaatatagcaagtactcaaattttaaaaattagctatttttcatctatgtgataatgaaactgttgttttaattaaccaaaaggacaagtttgactttgagcagaactattttgtaacttttcaaatgtatagcataaggttggtaaaaggcattctcatgaattaatggattgtttaataaattggtttatgaaactatcctgactaaaggctcctctctcagttaaaattgtctgtaagaaagggaatgaagcagaatgtgtagcaaccagaatcagttcttgggaaattccagatctttagaatttatttactttaagaccaacatagttttccctttggtattggtctactaatttaatgtattccaacatttgaatttggcttatttttgccacagagaaaagttacttagacttctgaagccaataacagattactggggctcctgctgaaatacttgagtgaattattattatcttcttttattagccacggactttacgttgaaggctttcgattgcccggaaacagaatacccagttaaaattgtgaatactccacaaggttgcctgtggtataagaaagacaacaaattcaaaatccccaaaggtaaaatgttgccctcctgttacttccctgctgaattccagtgttctctttagatgctctgtttcacatgtgattatctacttgctattttgatcttcctttgtggaggaggctggggctgggtgcctctatcagccaccttgatgccctctcaccctccctaaaaggagtaaaataagtaaaacaaatatttctccactttgctgtaacttgcttcccctgtgtatatcacctacttctctttccttttccccttccgtttgaagactttttctaggcttatctaccagatttatactgtcctcctatgctgtcacagaaatccttatggacactccagtgtccaggaaatgaaaatttaaggctagaatgaaatcgtttttagatttttttctttcagttaaatgaaagcagagccaggtatttggccatcttaaggaactcgtgtgatttgaacattgttgtttttaaaaagagataagaatacacaaaggaattattcatagacagatagcctagtccagcattacaaatgtgaaagccccaccaactgcctccttctaccatttttttttcagcataaaggaagcatagtatagagttaagtagactctaaagtccttatctttaatgttgtggccctaagtgtgctgctttttaccgttctgttcttgaacatggcataaggaacttattgaagccacatggaatcataggctgggtgctcttgtatgtcatttaacccatatccccaacctcaaaacacaactatattgtagctctgtgggattattgagtttattgggaagttattttcataattttttttgaatagcttatgagtttctaaaaatctcctcaaattcagtttccttggaaagcctctgctgtaaatttgtgtgaatgctggagttgttctcttaatgttcttagcatctgtcctctaaaaatttttcctgactgaagctattaataagagtatttataggcctctctaagtatctgcccttatgtctggtcttcccatagattaaagagtgccttttggaactctttatttggaatggtaaatactgctttttaaagacccttaagaataaagatgtaatgaggatttaaggattagtagtttacttcagaatttaaaaaatatatatattaggggaaaataacagatgtataaaatatctgaggcccctaaccttttttatctatggtcttttttcttttagcatatatacgtttccatctaatttcaccgttgatacagaaatctgcagcaaagtaagcaattgtctttttttctggaaaatacattttttagttattgaaaaactattttgtttcattctaaatcattctgtcattttctctatccatatttgagctatgttgctgatttatgtatttttttctgtactccaaacaagttatttgtattattaccaaacattaaaatggaactgtggctgctccattaccagcacccattggtaaaacatgctgatagtgtagactagagcaattagttcccagttactggatggggaaaagtccttaaagatcagtttgggtgagtgcccagtctataatgagactgatggatctgttgattctgtatttatagactaccaaggaatgtgattgttcctgttcttagcaaatcccttatatatttatgtagatagctttcattgtgggtggtcggagaccctaaagtgtatctgaacataggagatatttgggaaatgtgtctgaatataggagatacttgggaaatgtgtctgaatgtagttgatatttcggaaatgtgtctgaatataggagatacttgggaaatgtgtctgaacgtagttgatacttcggaaatgtgtctgaacctaggagatacttgggaaatgtgtctgaacataggagatacttgggaaatgtgtctgaacgtaggagatacttgggaaatgtgtctgaacctaggagatacttgggaaatgtgtctgaatgtagcagatacttgggaaatgtatctgaacttaggagatacttgggaaatgtgtctgaacctaggagatacttgggaaatgtatctgaacataggagatatttgggaaatgtatctgaacgtaggagatacttgggaaatgtgtctgaacgtagcagatacttgggaaatgtgtctgaacctaggagatacttgggaaatgtgtctgaacatagcagatacttgggaaatgtgtctgaacgtaggagatacttgggaaatgtatctgaacgtaggagatacttgggaaatgtgtctgaacgtagcggatacttgggaaatgtgtctgaacctaggagatacttgggaaatgtgtctgaacgtaggagatacttgggaaatgttggtgcatttcttctttcttttcctacgtaactgtaaaatccaaacttaaaatgacaagcagcactagaatttgttaatattcactctaaaaaatgcattcccaaactcatatttttaattagtcagaatgcctagacttggagggtagacagagccttcaggccagtgctgctgatgcctattccatttacctcattgtacaatataaatattatcattttgcatgtgtacatgacatgaaaaagattgggaaacactgctgaaggtaggaattctgtaatacacctctgaaactgaatcctgagtaagctgtattaccttttacattctggagtagagaatttatactttctaaaaatgaagctgcttactctaaattgaagcaaatctatttcatgtgtctttcttaccaattaaagatgccatttgcattttgtacttcttagtgtggtcctctttgatatctttgtcaatatccttacgcataaccttgcggaaccagcttatgaagcagatgtggcacagctggagtataaactggtagctggagaacatggtttaattattcgagtgaaaggatttaaccacaaactacctgtaagtacaagtactctgttttccttatagagagcattaaaataccatatttatttagaggtttgtgcatgggatgctgtatagagaaataaatgtttattaatgtggattatcttgaatattcttggctgatgacagctattctaactgtgactgactatccataagaacaacatatgtttcattaattactggcagtgcatgggattatagcccatgctttaggattgatttcacttccctttgctgtcagtttctccacaaccaacactggcatttaggattggttctagctaaattttttaccatacaggaataaccttttttttttttttttttgagacagatactcactccatcacccagactggaatgcagtggtgtgatcttggttcactgcaacctccgcctcccgggttcaatcagttctcatgcctcagcctgctgagtagctgggactacaggcacgcaccaccacacccagctaatttttgtatttttagtagagatggggtttctccgtgttggccaggctgatctcgaactcctgacctcaagtgatctgcctgcctcagcctctgaaagtgctgggattataggcgtgagccaccatgccggctgtggaataacaaatttgactggtgttttgcctgaaatagagtagaactcaaatgcttgtgcccttacttcctcatcttatgctcctcattgtttcaagtatgtgtgtcttgtttcccttctaagtttatgaacctttccgaagcagggtctgtatcatgtcagttattaatctcttagtgagaaatatgttccagtattgcttcatcaaaaacttcataagaggaggaaaaaataatgggttgttagctaagagagttagattactgaataccaggtaaagcaatataatatactcaataataaattttatatctaggtttcttgggtagaatatatattatattaagatttagggaaatagggttatacaagaaaaattttagaggaaaggacctgccagaaagacctgtgctaggtgttaatagccttcatctgggcaaaaacccaagagaagagtatagctctcacctttttatgccttttcccttctccatctccccatggaacaaagattggtctcagaaggagacgccatcagtaaagaactatcagcggacattacattaactgataaaatgatgatcactgacatcagcaacaagccaagaataattttactttgtcagcctctgaggcctaaatataatgtagcttaagtttcaagcagattaaagcctaattcagtggttgtcatttggaaaatatgttttagaattacctggagagcttattaaaaatacaaaccatggaaaagtatttgatattcttgaatttgtgagacttagccttaatattaaaacctaatatataacatatatatatgtatgtatgtatgtatagaaaactagagatcaattttatctgtagaatatagatgtaaactttctaaaaattaaatccagtttagcaaaaagaataattcaagtaccaggaatgctagggttgtggaatattaggaaattgatgatcataagtcaccacaacacaagtcaaaggagagccactgtatgaatatagtgataaatgctgataaatcatttgataaatttgagttggcattcctaatacataggaatggaaggaaattaattaagtataaaaacctcagcctggcgcggtggctcacgcctgtaatcccagtgctttgagaggctgaggcgggcggatcacgaggtcaggagatcgagatcatcctggctaacacagtgaaaccccgtctctactaaagatacaaaaaatttgccaggcgtggtggcaggcgcctgtagtctcagctactcgggaggctgaggcaggagaatggtgtgaccctgggaggcggagcttgaagtgagccgagatcgcgccactgcattccagcctgggcaatagagcgaagactccatctcaaaaaaaaaatcaaaaaacctcaagtaaagaactatcagcggacattacattaactgataaaatgatgaacactgacatcagcaacaagccaagaataatccacaatcatctctattattctgttattgttttagaggttctggctattagagtaagatgaaaaaataaaaacttttttggaaaaaatatttttccttgcagatgatatgattgtattcttagaaaacctcatataccactaaaattaaaaaaaaaattaggtgtgatatggctggtcaaaagactagtatatcagaatcaatggctttttctcccccatagtaccagtaatcacttagaaatggaagccaggcacagtgggatgtgccggtggtcccaactcctccggagtatgaggcaggagaaatacttgagtttgaggatacttagctatgatcgtgtcactagcctgtgcgatatagcgaggctctgtctcttaaaaaaagaaagaaacaaatggatggaaacaatcttacatttatttacaatattgagaaaaaaaagccaataaaatggctaagaataaacaggaaaagtataggatctatctgaagacaaactacaaatcttattgagaacacccatgaaatgataaaaaaggaagaattgttccaaatttgacaattatttagaattttggacccttaagattctttgaggctaggaggctgaggcaggaggatcacttgaggccacgagtttgagaccagcctggcaacataagaagaccttgtctgtacaaaagcaaaaaaattagccgggcatggtggcccctgtctgtagtcccagctactcaggaggctgaggtgggagtatggctagagcctaggcattcgaggttataatgaattacagtcgatagtaccactgcactccagcctgggtgaccagtgatatcctgtctccaggtaacacccaaacaaacaaacgaacaaattgagttgttagtaattttcttatgtccccccacaatgcctagttccatgctgggtacctggtaaaaaccaaagagaaacatttccctccctaatacctagtggatttccatgcttcttaaaatgcttccttctttttcttttagctactgtttcagctcattattgactacttagctgagttcaattccacaccagctgtctttacaatgataactgagcagttgaagaagacctactttaacatcctcatcaagcccgagactttggccaagtgggtataaatgagatgagcttatattttgaggacctgaaagtattactctccctagtgggtgggtgtgggggttaaggctatagttgcagtgctaattttcatccgtgtttgaatcgtgctctagtttaggagacccgtgcatagcgttacggtatttctaaacccagcttatgtagctagctgtgaatgggactgaaagcagcttactgtagagactaaaagtaaggaagggtgttttcaccaatcattatacctgaatgttaaagaagtgctagttttaggccgggcatggtagcttatatctgtaatcccagcactttgagaagctgaggtgggaggatcacaagcctagaagttcaagactagcctgggcaatatagcaagacttcatctctacaaaaaattaaaaaattagctgggtgtggtggcacatgcctgtagtcccagctacttggcagactgaggtgggaggattgcttgagcccaggaggttgaggctgcagtgaaccatgatcatgccaccgcacaccaacctgcatgacagagatagaccctgtctcatagaaaaacaaacaaaaaacaaaccagaagaagtatttactggtgattttagtatgttggtgattagtagctgagttaaattgctaaacatgtcacttatctagcaatcttaactatccagaattcagccaagcttccagaagagagcagaaaggcagctacacagtctgtatgctaatacttaaaccctctgctcacaggcaacccccttgggccttcattcagagcctgttcttactactttagtccagggctaattgtagcctgtaggatacttttgcgtgaatcagaaaaaagtatccttctgaggtaccctctattagcaggtagagcctttgtgggagggagagaaaagtcctctgaacagacctacccctttgtgcacatgactggctagcccctacttgacagttttgccctgggcatctataaatagtgaacagcgtaaaggttctgcttttgacacagctgtaatgaacccatcagtttccagaattagaaagaaggggttaggaatcagtcatgtaataactgatattctgatcacagaaagttacaaaaactaataactagatatatgttagaaaggacatggacacagggagggaacatcacacaccagggcctgttggggggtgggggtgctgggggagggatagtgttaggagaaatacctaatgtaaatgacgaattgatgggtgcagcaaaactaacatggtacatgtatacctatgtaacaaacctgcacattgtgcacatgtaccctagaatttaaagtataataataaaaaaaggagagttatctgcaaccattgatacggtgaatagccctgccaataactcatgaatactactttatttatttataaaaatacattattaaacacaaccttctattttattaaaattcaactcctgaaatttactttataaaagaataataataaacctgtttgttgaagatttttgtgctagatctaagaactgttatataaattcattaattcaattctatccaaaacggttacctctcacgaatacttcccctgttttacaaatgaagaaattgaatcatagatgttagtagatttgtcaaattcaaacagcttatttggggtggggttgtggaaatgggggatgaagttaatctgattctggaccagagccgttacctgtattatattgtcactgcagtaatagatatcccaaatgatggcttctagtaattaatgaaatattagtgagatttcaaaccaaaatagtaataattttaaatcagtgtacaactaagtaaacttgactcatctggcagctttacttttatgtgaaatattttaccctgcaactgagacaggtaagtgcatttttgtactgctaagtaaatttgtttaaagtttgtgtatgtggttttcagtacttttttggttaatctgatactgttttcccatcttacattgtgataaaaatggtctctctttagaaacacatcctttatagaactttgaccaaacatttctttattctgaagattcatttctaataacaaaactttgagtgttttttttctgccctctgtacagagatgtacggcttttaatcttggaatatgcccgttggtctatgattgacaagtaccaggctttgatggacggcctttcccttgagtctctgctgagcttcgtcaaagaattcaaatcccagctctttgtggagggcctggtacaagggaatgtcacaagcacagtgagtgtgagatgctctgtaggccaggtctgaatgcagttgtgaactctggaattgccatagttctttcctaaaggggaagctgtagttttggcaggccagcattatcatattctgtttagaagggaacctgacccctctgatgctgggcagctttcttcttaagatgaagactgctgggctgggaatgatggctcacgcctgtaatttcagcattttgggaggccaaggcagaagcattacttaaggtcaggatttcgagaccagtccaggcaacacagtgagaactcatccctacaaaaaataaaaaattagccaggcatggtggcacatgcctatagtctccgctacttgggaggctgaggtggaaggatcatttgagcccaggagtttggggctacagcatgctatgattgcaccacagtattccagcctgggcaacagagtaagaccctgtctcaaaagaaaagaaataaagaaagagagagagaaaaatagattgctggtaatagactaggattttgagtgaaatgggtttggcgtatctatactgtttgttacctttgttgaagattgtatgtggaaaccatgaacagtttagtatagaggctaaaatgggaggaaggaaatggtgagggatgtgtgtgcatacatacggatacatacatagatacatacatacatagccagaactagtatgtcaagcctgtttgtgaagctaaggtgctgggctttatcctgtagaaatggagaaccattaaaggatttaagaagatttgtggttaagaaatatccagagagacaagttatgaagctgttttaaagtacagatatgattccactcataggagttatctaaagtagtcaaattcatagaagcagaaaatataatggtggtttccagtagttggggagaagagggaagagacaagttattttatgggtacagaattttggttttgcaagatgaaaaagttctgaaaatctaatctactgcacaacagtgtgaatatagttaacattattgaactgtaccccttttttttctgagacagagtctcgctctgtcacccaggctggagtccagtggcgtgatcttggcccaactgcaacctccacctcttcggttcacgccattctcctgcctcagcctcccaagtagctgggactacaggcacctgccacctcacccagctaattttttgtatttttagcagagatgggatttcaccgtgttggccaggatggtctcgatctcctgacctcgtgatctgcccacctcggcctcccaaagtgctgggattacaggtgtgagccaccgtgcctggccctgaactgcacacttttaaaaatggttgagattggccaggcgcggtggctcacgcctgtaatcccagcactttgggaggccgaggtgggcggatcacaaggtcaagagatcgagaccaacctggccaacatggtgaaaccccgtctctgctaaaaatacaaaaattagccgggcttggtggcacatgcctgtagttccagctactcgggaggctgaggcaggagaattgcttgaatccgggaggcggaggttgcactaaactgagactgtgccactgcactccagcctgggcgacagagtgagactcctcgtctaaaaaaaaaaaaagttgagattataaactttatattattttatcaaaataaaaagctggagtgaaggctgtgcaaggcggcccacgcctgtaatcccagcactttgggaggctgaggcaggcagattgcttgaggccagggattcaagaccagcctggccaacatggtgaaaacctgtctctattaaaaatgcaaaacttagccaggtgtggtggtgggcatcttgtaatcccagcttcttgggaggctgaggcagaagaatcacttgagcctgggaggcagaggttgcagtgagccgagatcacgccactgcactccagcctgggtgacagagtgagagtctgtctcaaaaaaaaaaaagagttgggagtgaaaaatattgaagcctgatgttaggccaaataaatgaaaaataattgcttaaggctggacatggtggcttatgcctgtcatcccagtactttgggaggctaaggtggcagaatcgcttgagctcagtagtttgagaccagcctgggcaacatagtgagacaccacttccaaaaaaattaaaaaaaattagctgggtgtagcaatgcacacctgtaatctcagctacttgggggctgaggtgggaggattgcttgagcccaggaagtggaggctgcagtgagctgaggtcatgccactgccctccagcctgggcaataaagcaagaccctggtgtttttttttgtttgtttaaagaagtgcttaagaaatagaagatgatggaaattcactcagtgggagtgagagagaaggcagtctagaatgatgcccagatttctttcttgaagcagtgggttggtggaacaggaacagtagtaagagtgggagcatatgaggagtttgttctgatacgtatttagttggaaatgtctgtggggccttgtacctgactaaggccttttcctcagtcagatgcttgttcaagattctctccctgaactgttttgttattaaccatcctcctccatgccttcccagtttctcagggctggccctttgattggaatatataaatggccactcttgaaattgtggctgctatcctcccctttctctctatcttcattctgcaaccccagaaccagccttagtttctgtcttggccaccaaaagaatcttaagtctcagtccacaaagggaagagaagaaataggctgcctgtttttccgagcaccgttgaagtaccaggcaagggcttttgatacagagtccttagtaccatgaatttcctccagtagaaatcactttagagaagagctaatccctccatttatcccttattttatagataagaaaacagaattcttaagaagggaagaggatgtattcactcagtattaaatgttattttctttgctttatccaggttctatgtcaatgggcccaggattctgaaacatagtccatgttgtcataaaggccacagcctagttgggtaaaccaacactgaacaattaagtttgatccagttgggaaactgtattatgggtaaacagattgccaagagagccagaacagttaagagctgcttagtgttccacaaacacaatcaatcttgaatcagtcaatgaataacttgccagcatttaggtcaccaactatatctgctttcctaaagctatgcagggctccccaagcaattggaacattgatattagctgattctgggtgaaatgaatgtctagagagcttaatgtagttattctcttttgcctcttaggaatctatggatttcctgaaatatgttgttgagtaagtatttgaattttctctttggggttatgtgttcttaccagcgagagggcatggagccacaattcagttaattgttactaaacacccaattgaaatactacttgtagtagatttttttgaggctggtgtacaaggcaattgaaaagttagaaggcctagcttcttatagtttttgggtgcctcagtgacccatactgattctcttgcagcaaactaaacttcaagcctctggagcaggagatgcctgtgcagttccaggtggtagagctgcccagtggccaccatctatgcaaagtgaaagctctgaacaagggtgatgccaactctgaagtcactgtgtactaccaggtcagttgggtgtactaaagactggcggaaggcccagtgcctggggatcagggaccccgtgaccttcaaggcccttttatagttacttctgtagtttcatgcttggggccatttgtcctcttgaagcaactacatttaaaaattgctcctgttggtaaaatggatcctttttcaatcacagtgaggtattgcttcattaatcacctaagtactaatctagagggccagaaaccgaggtgtgggtggaaatccctacatgtgcccctgatagaactcccaagtagcagaaggacatttgttaaggggcagttttgaaaagaagacagaagtaaacatagccaaacaattaagacacagcaaagagaacgactactagagtcataaatgtttaaagcacctgagaggaaggatttatcacctctgttttagggtgacaactccatgatccagagccccttacttcttgaggtcgtaccagctgggtctcagattattccttttgtcttcagattctgtgttctttccacaccattctactggggtgtgtggtgcttaaaggaaggaagcacgtggcagtaatcacagttagctctagcctatagcctgctttaacctgtggttggtcccactcgcttctagaaccacggggatcttccttaaaccttgcctgtctagtctgattactgactccccaaattctggggctcctgtagccgctgctgttatcttgggttccctgcatcaggaattcacttctttgtcaggtcttgtgaagatccctgactgggctttgggtgggatggactgattatcatttctttgtcttgtatctctgcccctgggcctcagccttattctgacattatcctggtctggctgtcaggagcaaattcacttgcccgatgtcacggtcatctcttgttagtgaagttgtgtcttgtcctagtcttcttaatgagtactttgattcaggagcaacagcacttttggagctaggttgataatatttttgtccttccgtagaggccctgcttctctctggagcctctgtggctgtagcattccaacctgcagcctcttctaggttatgactaccaggtcccaaactccacaaatggtacagcctagcctttcttaacctagtctacattttcagtgcctctgactgcttacaaccccggtacaggagtactcattttcggcaggatttcacattgtaagactatgtttatagaaatgctttccatcagtcacctcttagcactagcttctaatacaaactgttcccttttggaaaccatatcctttctcagagagcattggttttgttgtggtctgtttagagggaaacagaaaatctcaatgctgactaatcaggtcttgcaagggcacataggcattagcctcttcctctggtgagtgggaagcaaatgagtctgtgtgagaggaacctgcaagatcctgactctgggaggcactagcaacatccttgtttattggcctcctgtcctttcattctgaatgcattattttgccagtcttgggcagctagcatgtggtcccaaagcgtggcttctttctctgaagtatttttcttatcaactggttttggtccttttatgtggcactggttcttgttgtgtggcactattcattttctctcctcttgaggaatagatccagatacatttcaggatccccaaacatttcctgctgtcttccttagggctttgagttgcaagtacttaattttagaatgtgtcctctgacaggatctggcaggtcagggattattaatctcacctttgtttgcacctgcaattctatgctagtgccgggagtacaaatggtcaagcatgactcctgtcctcatagaccttcagtctggtgggaaagcagatatgtaaacaacatcaaagtatgattaactctcttgggggagagcgattggtggtgatacctaagtggttgcctagaatagctggattatttaaaagccctgtaaaccactggatattcagttggcctgacaaccttctcttttcagtcaggtaccaggagtctaagagaatatacgcttatggagctgcttgtggtaagtgcataaaggagatgctgaggttttcagcagcccctgacccactatgaggcccggccttttctgcctgggttagggacatggggtagtcagagatctgtgatttgaaggtgagatggtcatttactgttctcacccagtataagcctgggccaattaggaaaaaggcactaagggaggctggacttgggaggtatgtgaaacactctggggagagaaatggaggtttctctgctgggaggagttgggctgatgggcagtatgttgaattacagatgcacatggaagaaccttgttttgacttccttcgaaccaagcagacccttgggtaagtcagctggcagggccactgagctcaaataagggcctagggcttactttgcaggctgttcatcagatatccctactgagcagcctgttagagcttccttccatctcatagggtgatatttagtcatccaaacttttggaatttgtatctttgactgtaatcaggttttcagtttggtcaagtttcaagataagaaaaaaggctagtttgtggtccccaattcaggagaggtatggacaccttaacatttttgggtcctgtttcaggacttccagttccaataaggatgggcagaaacttttcccactcctatctagtgcctccaaggccagggcccagatgatcacctgagctcatataacttttctctctggcttgtaggtaccatgtctaccctacctgtaggaacacatccgggattctaggattttctgtcactgtggggactcaggcaaccaaatacaagtgagtgagtgagtgaatagatgagtgtaacctattatggacatggagagtaggggctacatgtgtttccttaaaccttgggcaaccctgaccaagcaggtttgctctatttagtcagtggaagctgggaagatgggggttgttatagatggtctgttccaggactgatcaatagttccagtggccctttcagacttgattcaagtcctgtggtcattgtgtggggcttgccagtgtttcttctcttcaggcagacctgaggacaagaagggaaaggatgcctgatctgacaggcattgctgaaacctgttagttttcagctttggaatggtcatacatggttgtgactgcttcattatgaggataccaggaaactgggctggaggtggggtgagggggagggttctttctctttctgtcctcaaagtcaggtggaatactgaggcctgggaaaacactttagctttttttcctggatatatgtcttagtcttaattccttcttttgccttctgcctgagatcgggtttctgatgacttaattgaagatgttttgttttagttctgattgaagatgttttgtttcagttctgaagttgttgataagaagatagaagagtttctttctagctttgaggagaagattgagaacctcactgaagaggcattcaacacccaggtgactgtgccagcctggtcttttggcctttggcccacacaagcccccagatacaaatcttaacagggcttcgccggccagtttttgagctttgcagccccaccttcctcttacaatagtgtctccctagcttcatccgtgcctcttatactggcatgtccatcacaagccgggctggacagggcccagtgtgttctgtgggaagtggtatgttgcctcacctgagcatctttctttttggtgggaacaggtcacagctctcatcaagctgaaggagtgtgaggatacccaccttggggaggaggtggataggaactggaatgaagtggttacacagcagtacctctttgaccgccttgcccacgaggtaacatggttttcagagtaagacagctcaaactggtcaaggttcctgattctacaggcatcacaggtctgtgcacaccagcattgtgtggaagagaaactcgaaacactagtcctggcctgattactcgctcacttcctgagttttcagactggcctctctagcaccttaggtggccacgtgagctgggtgctaatccttaccacaccaccaccaatttcaatcagagcagctctatttttatgctatatattgaggtctacaagattttgtggagaaaaagagttttgccgtttaaagaaaattgaggactctttgtctttacggagttcattattccaagtgcatgtgttttgacaacttctattccaaagtagtaaaacctatgaaaaagatctggatcttgtactccagtgtgactttggttaatacatagcccctacatggtgaattaccataggacatcattgctctgtgatgtaaagaggttatttagtaagaggcttcatcttaacacattttagttttcttaatagaagcaaggtagatttcctcaagccgtggtatgcagctaccatgtaattgggaggtgacactaaggggatgtgggtgttgggctcagtgtatggtatttagctgtaattatagcatctgctaacctctcttgccattgtagatgattggtataaaatgtgaaggcatgccagagagcttcatcatcgttttggtctggaaggttaggggtaacctgagaataggaagaataaaatgaggtcttcagatgctaagcaggtccagggacatctgcctgggggttaggtttaagagctatctttcttcttgaatttctttcctatcttcccttcccttgtaagattgaagcactgaagtcattctcaaaatcagacctggtcaactggttcaaggcccatagagggccaggaagtaaaatgctcagcgttcatgtgagtatgtttaactaactccatccattctagggttgtcatttactgagtgagtttgggtggttatcatcagaactcttaaacccctaaatctggtcagcatatttttcacttttgtctttgtcctctttcaggttgttggatatgggaagtatgaactggaagaggatggtaccccttctagtgaggattcaaattcttcttgtgaagtgatgcagctgacctacctgccaacctctcctctgctggcagattgtatcatccccattactgatatcagggctttcacaacaacactcaaccttctcccctaccataaaatagtcaaataaataaactgcagtcacgttggcctgaa

SEQ ID NO: 289 - DNA, 28394 bp, Homo sapiens
  source 1..28394: mol_type = genomic DNA; note = NC_000018.10:45724127-45752520 SLC14A1 [organism=Homo sapiens] [GeneID=6563] [chromosome=18]
acacagagcagagtggggctctgagtatataactgttaggtgcctccctccagcaccatctcctgagaagcactctcccttgtcgtggaggtgggcaaatctttatcagccactgccttctgctgccaggaagccagctagagtggtgtaagtactcatccttatttctattcatttccaactattcatcatttggggcttgtcttcacagttctaagttttgctctttttcttaatgaagaaaatgttttatatcaccggaattgatcagaagtagcaaaatcagagttctggtagactagaaagcaatttaccaaagccacaggcttcttcctggaagctcaaaggcatgcctttattcgtgatttctgaagcaaggtgcatgcagcacctgagctgatgtggaagagggtttgcagggaggtgtccacccaatgtgctcaatgattctgggttaatcaacactattaggagtttcaggttgtgttcttgaaataataatttgggctgtgttcttgaaataagttcgaggcgagtgtctacaagactcaaaagaaaaaagtgggccactgggaatggccctttccagtgatggatttatggactcctctgtgtgtgctgtcatgctgaagggaatgttcttgtgcacccatcgggagaacaagtcagtcacaactgaagccacgaatttggcagcttccttgcagctgcactctctggagtctggaatcaagacttctgggagtagtgttttccaaggagggaagtgttttaaccaggacacaggaatatctgacagcattttctttgtttccaattacagctttaaagaaaactgggcatctcctgctacttaaaatcaaaaactacctaaaataaagattatagtaagtaccaaataagtgtcaatgctgaaagtctctttattatgctagaccatgagtgtttaaatgctttcttctatatccatatccaacacttcatattatttttaaaagtaatagctgaagcatggaaaattgaagacttcaggtctctccaattgcacaaatttctaatacatgctggcaatagaatatattttatttcgtgtaataaaatagaggatattagttgacctgaaatcttgatattgccttgtattaaaatgctaagcactgcttcattttactagtgatctggggtatgaaaagtgctttttgacttctgctggaaagctcttcaggtgcagcttccaggatattcttgggatgttaacttcagcacacataagccttgctgtagatgtgtcagctttgaggcacagggagacatttgtttgtcagagagtaactgcttctggcaagggcatagggtgaaactggggatagcagagctctttctttgtggttgttcaacccccaccccaagattagttcaaagtgaccgtgaagatagtctgtgcccaccgcatcgctaagtcctagccctctctgcatactccagcacacagaaactgctgcttcacttgtttgttgacttgaaccgaaccttgggtggcattaatgtgcctggcccaagactgaaaaattaagaaccaccagagctgacctattccataagacccagtctgcctgccacgtactgagtgaatctggatgatgcccactctgatccttggttttctcttctataaaatgaaggcttgaactacgtggtctctaaaatcctacctagctctcaaatttctcttggttctaggaaaatattgatgttgagctcaaggaaggggttctccaaggtgtgtgattttggtggtagaggaaaggccggtgccaggcaggggcagaaggagacgctgtctacactgagaaaatgtgacaacccctgcttgtctcttttttcattcttcattgtttcttatttctttgtttttagctttatataacatgagagccctaccactgggtttcttaaccatttgttctttatcaaataaaaatattcataatgcaacatgcaggcacatcagtgtggtacagaactagccagctagtttactataggtaaatatacacacatgcatgcacacacacaatttttacctgagacatgtcagaagtgtttcctaaaattgtggatttttctgagtcattctggtaaagggtaggttttcaggttttaggccaagccagaagaagaaagtaaaaacagaataaacaacagggggagaaaaagagaaataccacacacacaactggaacttctggtaaaagagtgatattcttggatgcaatggaagttttaaaaaggaaaaagaaaatttataaaaagctgccacatttgtggaattcaactaaaaactgtttattattaacaaagtgatgttcaaaatttaagagttcttggcctggcatgatgacttatgcctgtaatcccagtgttttgggaggctaaggtgggaggatcacttgaggccaggaattcaaaaccagcctggacaatacaatgagactttgtctctaaaaaaaaataaaataaattaaaataaacacagctggatgtggtggcacaggaaaaaaaaataccatttaggagtctcttaaaggcagcttgtgaatgcttacaaagcgtggctagtatcttattacagaaaacagagcccacatcatgcatccttcttctcacatttcataaacaaggccaagggaaactgctgtggggcaacctgttgctttggtgttggtccccaagatgcagccctcacaatctgcccccaaacgtgtcagaacatgaaccccctcctccccctctggaagaagcaacctcagatccaacagcagagacacgcagcagaacaaaatctgggcattggtccctgtgtaggatggcttcccgttattttttttttaagcaaagtaaatgaacatcaaatttccatagtcagctgctgtctttctgcccactgagagctctttggtgaaggcaaagtcctccttcttcattagcggtctcccatgtggggccacatcttccctcaccaggaacccagtgggcgcgctccagcccccctcagcttgccttttgcgtggtcattagagctagggcacacgtcatgctgattcacatatttttgccctttgtcatgtattgagaaaaagtaaggatgaatggacggtctttgattggcggcgctggtgacgcccgtcatggtcctgtttggaaggacccttttggaactaaagctggtgacgcagcgcgcagaggcatcgcccggctaagcttggccctggcagatgggtcgcaggaacaggtatgcttccttcgtgcagcctctggctcggggaacctgggagcctgctccaaactctggtgtatcttttccgggcagagcctgggaagtgggggttggctgtgagctaagccaaaggcacagggatcttggtccaaaaagccccatggcgctcaccttggtttagaggctagaccattgagctgagaagttttgacagccatggaaaagctggggataagtcacctggggttttacgtttaccctgtgtctattttattagagtgccttttacttattgtcccttcttcttagttgaaattaatggcctgcttcactggggctaagatgtttgaacattagcagaaggtcctggctgcatagccttgccttgtcttcccagttaggatgtaaggactcttaaagttccctaagaaatgcaaatattttagcatggcaaaattctaggccaactacaactgtaagtttcgtatttctcctaagtggttctcatgcctgacttctggagcaaggagtcaggtctcccaggggctctagaagggttcagctgttcagaataaatggttcctggggactctaaaatagcagcaactgtctgcccaggtcatgagaagacccctctctgcaggacatcctagccctacaacccatcccaattatgttgaaattagattcacaaatggcaataagtcttctatatgttgggctgtcgatttggagaaaactagtttaatctttacttaactttgggtggctcaacaggagactcgggccgctcaggctctcaatcacgtctggccagttctattatcaggtttcgaatctgtatctccaaaatctctgaggtgatgggatatttcaagccctctaaaataaataaatatatgctgggaattttgagaacatgaatttgtttattctgaaatggtccatgttcctgctttgggagttgatggaaaatgccacttgagtgttttcatttgatgctgccaccttagggttttatagattcagttccagaaactcaaggcatttatctctttgggctgcttgtccttgcctgagctgaagcctgatgcctcccataagttggtatggctttgaaaatgggtcactacagcagaggcatgggcttatcaagcaatatgttcagctatgaaatttgaagagggagataatctgaaaataaatgacagccaccacttagattatgaaatagaagtactttttcataagtgcttaattattcatacggttttttatctttaactatggagccaactcagctccatatggacttaattttggttcctgacctccaagattcattgcaagtcacacagatgttggtatctaacattgttttaccgagataaaatgaccttggtctggaatgcattgtataaaaagctgcttttttgtgtaaagattaatagtttggcattgtttaaaaagcagaatggttagttgggcagtgaggtaatacaattgaaatgtaattgctaccaataaatcagttacccatattgatttctttactgggattaatagaagccaaagctagagttcaactttttttaataggtataacttagtatctgttcattgctatttgttagctatggtaaatggaacaatgatggggccagaaatatccatgaggaccatttgatcacagcctggcaacacagagaagacaggctggtttctctatgtgggctttcagtgtttctttggtagtgtcttatgtggctgtggcttcaacattccacaattatgccttccagggtctgatgattttggcgtttccctgcttcccaattgacctggctgtgctgttggctgttcttgcacactcaaggtggttttgccattggcttcctccctcagcctgcctctgggattatgccactgctattcttttttatctaccatcagcacaatgaaatcatcatttttgtcttcaaggtaccaaattctggtgatattggtgctttcttgcagctacttatcatgagaagtgaatggtctcatagtgaacacagtcatggttatagtgttcatacgttccagagacatgtttcctataattatgccctgcacatttttctatcatacaatccttagattacagctctttggttttcaacagctttgtccaattccatctttcccagtttctctaccttgatgaaatatccttcttgcctggttttacatatttaaataacaaattccaaaagtaaagagtatctgaggcagtcacatgacataaggacaaattcaagccatcttggacttgcagagggtggggagaccgtgtcaacacacacaattttaaaaatttcttccctttcaatcttttaaaaacaaaactttttataaaataaaaatgtaatttaaaaaggctacctgtcttggcaagtagctgatcagcctgcattggtgagcaggccattccataacctggtttcttgctccttaattgacagcatggagctaacgtacttaatttcagctctttctacgtgatttgactcattctgttaacattaactgtttttcagtcttctcaactagactgaactccttaagtgcaagaaatacacgcttagtaaatgtttgttggaccagacactgcaccttatgaaattaaagaccagaacattctcatggtagcattacagacactgatggcaaaggtactgtgggatttgggtttggctaataagctctgtggtggtgtttcagaaggaaaatggtgctctcttagttctatggaacatagtggtccagatcttctactgtaaccaggcccaaagctggctaatctggagggctctgccttagggatacttataagctctgtccttccctcaaggagccagaggaagagatagccatggaggacagccccactatggttagagtggacagccccactatggttaggggtgaaaaccaggtttcgccatgtcaagggagaaggtgcttccccaaagctcttggctatgtcaccggtgacatgaaagaacttgccaaccagcttaaaggtatttatcctttcacattttggagagacaggagaagtagctttgggggaaatggtttcctggtacttctacttatacctttagttatattctccaactttttatagatctctttactcaccatttttctacttttatcttttaacctgcaaacctctccatttttttttcttatggagacagtagccagggcccagctcatattagaaggcacctggcttcatcctgtagtttcagtacttaaaacttaaatttattcctttggcttcagaatttgtacctataagcatgaaaataagtgcattagatgctttcaggagcttagattctaggaggggcagtgtgggttgagcatacagtagatagaggctttcagggatctgggtgccactaatgcaacaatgggttgagagagaaatattaaagaaatatcaaaaatgtttcacttccaggaggttttgctgattttgctcagggtgggcctgtggttgaagagtatcacttggcagcttccttagctctgctttacctcatcccttccagacaaacccgtggtgctccagttcattgactggattctccggggcatatcccaagtggtgttcgtcaacaaccccgtcagtggaatcctgattctggtaggacttcttgttcagaacccctggtgggctctcactggctggctgggaacagtggtctccactctgatggccctcttgctcagccaggacaggtaggtgtaccctttcaagccttctcagctcccttctgagacacaggggctgaccagttactgtgggcaacagtgataaaaccacatccttcccaggataaacaacatttagtccacagaactgtttatatttgtttttagtcagaggtcagggaatcagttacagtctcttgctcttgatatctgaataaatggctggtctaaatgatgccagattcttgtggcattacgtgctaaccagaactaagctacaagtatttccctggagaggttctgaagggatcttctttaatgattgataaaattatttgtcgtcagcattctatttgggaaaaagtgcatatgaattcagaaaaagttttagtggcttaataacccccgttatatcttgttgctatgatgagtttaggaaactcattcttcatagacagtgcaaaggtcagctcagctcctggagaaaagaataaccatgaattccaattgagtggattctgacttaagaagccttagtgagtcttctgatatattgattagattaaaaatagcacacactttataaattgatctgtcattgaagaagtgatgagctgactctcaccagggcagtagatagctccccactagccagttcctttagggagggaaccagtattccaggtgtctgagatcaacgcataatcccaatccccagtgtggtcattacacaactaagctcttgtaacactggctgcaaattgcctaaagaggtccgtggggagagagttagcaaatgctccacttttctatcaatttcaaggagtctgatttgctccctgtagaaggggattttatagcttaggttaaactctattccaatgcatgccaagaaaaggtctcctcagtttggggatggagtctataattgtgccatactgaatattcctttatgattttgctctgatgaaacatgatcaactcattttttgtcagatattatttagaagacaagtcatttatatgtgttagtttcaaatgttttactttccttggtctgaaaagactgcattaaaatggaaattctctgttttaagtaaatatatgtcttcctgtggctttaactatggcattccacaatttgtagatgttgccattaattttccactgatcaaactcaagcattaacatctccaagtcagttgttgagaggacaagtctgcatggctctctactgtcatgtgtagtcccagtctctgagttgtacctttgcaaattgtatcacctcccatttgccctcaaggattatttaagggaaacaaagaacttttgaatagggaaccccacatttaatgttcatctggattaatgtacgtgacatcatcttgcctgttgcaatggtgcctcctggcccagttagaaacaagccaagaagcagctgtcacactatcccttaccagcccctgcagtgtggctcactggctatagcacctcctgctcgagcccagcattaggcctcacctactcacttcaccatctttactcccccatccccctacagacatcatccttgagtgacaggcccttgggaagtggatcctgtgcctttcacggtgccagacgttgccaactctcagagctgtgggaatcctgccttgtcaggtcaatcaatctaggtgcccatcaatggtggattatataaagaatatgtggtgcatatacaacacgaactactacatagccataaaaaggattgaaatcaagtcctttgcagcagcatggatgtatctggagaccaatatcctaagtgaattaatgtagtaacagaaaatcaaataccacacgttttcacttacaattaggagctaaacactgggtaaacacggacatggaaatagtagacaactgggactccaaaagaggagaggaagggaaacaagtgttgaaaacctacctatcaggtactttgttcactatttgggtgacgagttcaatagaagcccaaacctcagtcagcatcatgcaatacatctatgtaacaaacctgcacatgtaccccctcaatctaaagaaggagaagaagacggggaagaaatgagattgaatactaagcaaaaagtaacctcagaaagaactgggtgctcaacatgcacataattaaatgggatacttctccaagtaagagaaaagcaattgttcttctttgcaataactttgaaatgtgcgtttggagacaacaaaatagaagcatcaggacacaaaaatgtatactaacctggaagattaatgttgataagatcaaagacactgtgaaagtgaatttacatttcaggaatcttatatctctcaccaagaaatcaaacttaagcaacagtttcatatgctaaaagcgctcttcaagtcagaggctcttgatttaaaagaataactttccaaaggaaaggctaaaagaaaacagagcagattgccttactaaactcccctttcctctcagccactgtagacctgtctttagccgtgacacctgtagagggagtcattctctatcaggggtccccaacccctgcactggagacaggtacctgtctgtggcctgttgggaactgggccgcacagcaggaggtgagcggtgggcgagtgagcatttccacctgagctccgcctcctgtcagatcagcagaagcattagcttctcataagagtgcgaaccccattatgaactgggcatgtgagggatctaggttgcttgctccttatgagaatctaatgcctgataatctgaggtggaacagtttcatcccgaaatcatcccccattccccatccatggaaaattgtcttccatgaaacctgtccctggggccaaaaaggctggggaccactgatctaaatgcacatttatatttttatctatgtatatttcacttcatgtctttattagtttttgtacgatgcttacgtagactttgaaatacatttccaaatataatctcattttttaatatgaatatgatctggaagttactagtgttatttatgtgcaagtgcaaccaaagctcacccaggaaatgtccgtgctgtgtctcttgccccacaggtcattaatagcatctgggctctatggctacaatgccaccctggtgggagtactcatggctgtcttttcggacaagggagactatttctggtggctgttactccctgtatgtgctatgtccatgacttggtaagttacaattggttttcaaaatgcctttttgaaaaaaaaaacatggcagaaggagggaatgggagttgttatatggcagagtttcagttttgcaagatgaaatatgttctctgaatgtatagtggtgatggttgtacaacaatgtgattgtccttaatgtcattgagctgcacacttaaaaatggttagccgggtgcggtggttcttgtttgtagtccaaactattcagaaggctgagggggaaggatcacttgagcccaggagttaggggctgcagtgagctatgattgcgtcaccgcactccagttctccgaacctccttgcttgggctaagtgaggaggaggaggaggaggagaaggatggaaaggaggaggagtagcaggaggagcaggagggcaaggagaaggaggaagaggagcaggaggaggacaaacagttaaaatggtaaatttaaaattggattccagtagattctgtctattggaaacagaaacaaccattttaaaagatgtatatttccttacaaccagttatttggccttttgtctgatctggctacacatccactaatacctctcaaccagaggtggctgcacattgacacttccatggggaagggaaacagtgctgcaatgaagatacgagtgcaggtgtctttttggtagaaacacactgatgcacgtggcccccacatacacttgactcctccctcccaagactctactgtcattggtctgcggtagcgcctgggctttgggagtttctaaagcttcccagatgactctaaagtatagccaaagttgagacccacttcctccatcattgcctctcaaacttgagcaatatgagaatcacctgcagggtttgttacaccacaggcatctgctccccggccccagggtttctgatgcagtctatctggggtggggcccgagaatttgcgtttctaacgcattcccacatgatgctgggagaaccactgtgcctacgtgaattcccccttacccacctgccccccaggtctcccttagaaaaaatttttttgctgaattccttttttttcaaacccaaatccttcaaactagtttttatgttgacaatgtcttacatcctttttctggaaacaaagatttccttctttctatattgtagttaaatataaaatactaatatgcacataaataagcacagcctgctgtgggcagtgtctgcagaagggatgcccacccttactgtacccacgggtgtgtggacgaggacctacctgtagagctaaactcttcaggaagtaatttgggccctgctctgaagaataggttcgtgggaaggaggcctagcctgtaagtgctcaccacgctcccttccacaatccaggaaaatgggagttctggtctttaagtgatggctctttgattgggccaacaagtgagagcctatgagggacctcgggaccatgcagcccagccccacagtttatgggctctgaggctaaggagatgcgccttgcctaggtcatgcaatttatcaacagctcaaggacacacactctgccccaccaactgtgatatcattttcctccagctcacactacctgcatccttgaacgattgtttctcttttccaaaaataggtatattaaagaaataatatctgccaaatcagaatcagggttgcctctagtggggagggagggacataagagcaagtggagggacaaaggggactttaactatgtagataatattttattttgtatgtcataagtacttcaaaaatatttttaaaatctcaatatatagctcactctgagcaaccccagagtagaatttttcaaaagccaaataagctgagagttgattttttactttatgtaatatttactgcctctataataggatttatcccaagttttctttctgtggcaaatgtgccaacacaacacgtaaggggcctgttggcaggtgaaacaaagcccctccagagtatagcgattccgtgtgtcagcctgctttgtcacatgcacattcttttgctctgttctttttttagcccaattttctcaagtgcattgaattccatgctcagcaaatgggacctccccgtcttcaccctccctttcaacatggcgttgtcaatgtacctttcagccacaggacattacaatccattctttccagccaaactggtcatacctataactacagctccaaatatctcctggtctgacctcagtgccctggaggtaagagacactggcttctcacattcgccctggctctgcaagatacgcaatggcctcctggtcaactgtccacgggtgtcagagtctcctagatgctcaggactatggtggcctttctgccttcatcttgccatttaaagcatttgttctactccagagcattagggtctaagggattttttaaaattactatttagtcaagctgatttttctgccttttcccctaaacatctacagtgctaaccccagagtacagttccactgggagtcactctatcgtaagcttgggggtgggggtgatgggagccagcccttaaggcatgtggcctccagcctggttttaaatcttccatagtctactccctccaatcaaaaaactggatgcttactcttagagcttctgacagaacctctctattctgcttttccttatggcatagctcatagaacatctacaataatttagggttcccaagctttggtaggcatcagaatcacctggggagctttaaatacccaaacaggcttcatctcagaccctctaaatcacaatctctaagggtggggcctggaacctgttttaacaaactccccaaattgtgatgcgggccagagtttgagaaccactgtatcaaggggtgaatcctatgtatctctttaaagatggctataaagagattctgtattttttaaaacctggttaacccaaatcaaattccagctcttcctgttggtgtgtaataaatatgtttaaggtttctggattatcaagaacaagagaacacctgaaattagaagaaaaccaaagaaaccttacctttttaatgtgctctcccactgtcaggttatgaaacgcccttttgtcttctttgttgagtgatcaaaacacacgaggagctcaagtcaccttctccctagcttcttgccagaaaactaaagggagcacctggaaataattcagaaggaaaaaatcaaagattcattagaactacccatgaaaaataacagtataaaatagcattaatcgatctagaactgcactaacacaggagcctctagccccatgtggctatataaatttagatgtagattagttaaaaattgagttcctcaacctctctagccacatctcaggtgcttgatagccacacgtggctaggacccactgtattagacagcacagatacagactattccatcatctcggaaagttatcctgcacagtgctgatctggggcaggggaagccttgtccttctcactctgaatgaacagcccatcctcagcaccaaccccaaccctatggctacctgagagagagttctgcagccaagtccaaaaacaaacaaacaaacaaaaaaagcatatgccatctttgccaagttccctggtctagaaatagcaaaatgtctagacatgaagactcagcatgggctggaagaatttagagtccatcttagggtagagtcaaactcacactatggtctggtgcccttagccaatgttagactcagcctaatataagaggggagaagacacttccccttgtgccaaagctggggctccctctggtagagtcactgcctccagaaggtctttggtacatacacgacctagcaatggtggagagggcaagatgggaactgaggaaaacatctttcagtaaatggccttgctcaaaagggacatgctatggctaattatgcctatcctagccctaccagaagttcagctgtaaagaatgatcacttgttaggttcagttaaaccttgttcactcctgagaactgcaattctgtgaacagaataactaaattcaggcctcagccagaaagtagaattatgacatttccatgtatttttgtgttttgagacctgcttgacagttgttcataactagaataagctaaaaatatctttgtttaaatgaatacatgttccacttaatgacagaaaagtaaattcacaaacttgctaaaaattacttctaaattgtggacaagataacctggctttgggtctctggctttagtgtaagcatccaaattgcatagtgataataatctctattgaacatagggatgcatggatagattaaatcaccctcaacactgatggacatttgaaagcaaaagaagtgtcagctgtggtccttgccatccccagtaggaggcaaggcagatcctcatagccaggagcagtgagtggcaccaagctgggagcttaacagtgaccaaggccaagtgtcagtgcaagcaggagagcacagggggagctttgagaaggcatgtgttgcatgcaccagggaagggctggtgtatctctggggataaagctgaaggatgactgggatttttctgtaatcaaagagagagaattttaaatggtattaacactgttcttgaaagaggtaaggtatgtccaatctaaaattacattgtaggagtttgtgggtgtcctgtgggtttctgttcagttgttttggtagcctcatttttcttaaatttcttttgcagttgttgaaatctataccagtgggagttggtcagatctatggctgtgataatccatggacagggggcattttcctgggagccatcctactctcctccccactcatgtgcctgcatgctgccataggatcattgctgggcatagcagcgggtgagcacaagagcccttaccaaatattgagcacctcctccatcccatgcattgcctcaggcatcttctgtgctccagatcttccttgagatcttggcttcctagggaccaatgggagttcccgggatgcttcctgctaactttcaatcccaccctcagtttccttccagaacatcctgcctttagtcctgagttctgacccctcctgtcttaacaggactcagtctttcagccccatttgaggacatctactttggactctggggtttcaacagctctctggcctgcattgcaatgggaggaatgttcatggcgctcacctggcaaacccacctcctggctcttggctgtggtgagtctcccacgcccctgggggagggctgctcatgactacaggatctcaatcaaggataagcagtaaaaacggactgcatgaaaaatcagggccagggttctggcttgagcccacttgctgtctaagtgtgtgaacaggacaagtgacgtcccctctctgagagcattaaaatcacctctgcctacctctctgatgattgtgaaggcaggagcctattgagtcatattaatatcctaaaacatggatgtttgggaggatagaaaaagaaaaatcccagttattcttcagctttatccccagagatacaccagcccttccctggtgcatgccacacatgccttctcaaagctccccctgtgctcacgggctctccagcttgcactgacacttggccttggccaccaataagctcctagaatggtggcactcactgctcctggctgtgaggatctgccatgcctcccactggggatggcaaggacctcagctgacactccttttgctttcaactgacttgtcttgcgttcttcaaactagttgtttgacccaacaaactaaacgggaataactccagctaaatacagagcaatgtcccctggtaaatcagggttgattacatttacccctttgagtgagcatcacagtaacccagccattctaaaacttcagaatgcatcagaatcacctgaaagacttgttaaaacacaaatcgctgggccccctcctcagtctgattcagcgtcagagataaggggaagaatatttctttttttatttttctaaaaaacagtctcattctgagccaagatcgcgccactgcacttcagcctgggcaacagagcaagacttcatctcaaaaaaaaaaaaaaaagagaaaagaaaaaaaaagaaaaagggtctcattctgttgcccaggctggagtgcggtggtgtgaacacagctcactgcagcctcaacctcctgggctcaagcaatcctgcagcctcagcctcccaagtaaagtagctaggaccacaggcgtgccaccatgcctggttaattttttattttttatagagatggggtctccctatgttacccaggctgatcttgaattcccgggctcaagcaatcctcccgcctccacctcccaaagtgctgggattacaggcataagccaccatgccggcagaatttccacttctaacaagttctcagggggtgctgatgctgttgctctcaggatcacatttcaagaactgctgtattaatcctttctgactcccagtgttctagccagactcagcctgtcagagcgagaaggcatcctgagacctctactccatccttcttactttactgttggggtcctgaggccagagaggctaagggatgtgccgcagggaatctggacagcaatgggtaaatccacccccggaacccacacttaccatccacctccagagttatcccaccgcactcctctgcttcccttttatagcattcaggccctcacggcaacctcttaggtgaaaacagactgcatgtgatttggatctgaaaagctaatagatcccaggtggattttgagtggaggctcattcacccatagcctctggcatgcctaattcaatcaaagtataagcatttaagataatattctagagtggagagaatgagatttgcttgggaacaaaaaggaggagggatagtgtaatgtggagaaattatgtctaatctagtggaaatatatgtctagaatcagtttatcaccagattaatcaagccaaggtatctaaacagttatgaaaacagtgggccatgtatcaggcgggtttagaatagatttctgcactggcagaaaatgggatggtaccaacggtttctaaagacccattccattttgattcgatgctatagcaagggtaacataactcaggttgctgtgatgtagccatgtagatgtcattttgtcaaattctttactattactcagctatttcacctagctgttctgttgaaatgttgaactccttctccatattcgttcacaaggataaaggagaggattacagacaggtgctgtagccacctgagttcagctgggttggaatgtttatcctacaacctttcagctttattctgagattggttaggggtttccacctgagttcagctgggttagaatgtttatcctacaacctttcagctttattctgagattggttaggggtttcaaacctttatttgggatgcatacctttatttttctggaggaagtagccacaaatatgtattaaacacacatgatacaaaagacagtaccaggaagagcaaggggtttagaagctttaggtcccatgcagttcctgcacagagtgttacaatagagggcagaagccaggcaagggagtgagcccaagaggaccatgcaatctttgtgggagaagaagaagtccatagtacaggattctccagggggccatttccactcagaattatcacaaagtacctccaggaagaagggggcttttccataaatgctagaaaataagaggaggaattctgtttggtggaaagtgtggtgcaggccagcatggggacagcctgagcatgtccttcaagatcaaggagaaggcattttgagcacaggagatggcgacgaggtttttgtttttctgggttttttgttgttttttgttttttggtttttttttttttttttttgacagagtcttgctctgttgccaggctggaatgcagtggcacagtggcacgatcttggctcactgcaacctccgactccctggttcaagcggttctcctgcctcagcctcccaagtagctgggcttacaggcacgcaccatcacgcctagctaatttttgtatttttagtagagacggggtttcaccatgttggccaggatggtctcaatcttctgacctcatgatctgtccaccccggcctcccaaagtgctgggattacaagtatgagccaccgcacctggcgggtgctgagttttttgttttatgttgttgttgttgtttgagatggactcttgctctgtagctcaggctggcatgcagtggcacgatctcagctcactgcaacctctgcctcccgggtcccggttcaagcaattcttctgcctcagcctccccagtagctgggattacaggcatgtgccaccatgcccagctaatttttttttgtatttttagtagagatggggtttcaccatgttggccaggctggtcttgaactcctgacctcgtgatccacctgccttggcctcccaaagtgctgggattacaggcgtgagccacagtgcccagctagtgatgaggttttgacagaccatggagaagaatgaagtcgaagctcttgacatgttgtttccccaaagtgggaatctttgatattttctcaattatagaagcagcacagatttattgtataaaacaaaacaaaaatgtaatctgtatagaaatgtatgaaacagaaagtggaaatactccatcttactccctagagagggcttttttgcccccttcttataaggatccttgtgattacattgggtccattcaatagtctaggaaattctctccatctcaaggtctttaacttaatcacagctgctgctaattcccttttgccatgtgaggtcacatattctcaagttctgaggtttaagatgtagacgtctttggagaccattattcttcctaccacactcaccttcctttggatagattttttttttttttaactggtgtagcataatggttgaggcagtcaactgagctaaagagctcagactctggtgccagacagcctggattcaattccagcaggtctgctacttactagcgtatttgcttatgaatgtaagcaaattacttaacctttctatgcctcagtttccccatcttagaaaatggaagttaccatatttaattcatacagttgttctgatgattaagttagttaatgcatgtctgaaactcatagaacaaatagtgtctagcactcgctcagcactatttaaaagtctggaaaaacagtttttctggtggatttgcataacttattaagaatcaagcttgtttattttctcctctcaattgcttaagtttatcaacatctgtatcttctccccaaatatgactgatacccaagcctgcctttacttcctctgagaaggcccacccctgatgactactaaaaccattgatactgtatagaatttttattttggatttgtcgtaagtataagtttttgttttgggtacttgcttatttaggcaactgtaaactttattaacttgcttattcactctgacttagttcatattaaccttctgtacttttttttttttgagacagagtctcactctgttccccaggctggagtgcagtggcacaatctcagctcactgcagcctccacctcctgggttcaagcgattcctatgcctcagactcccaagtagctgggattacagacatgcaccaccatgcccagctaattttttgtactttttgtagagacagggttttgccatgttggccaggctggtctcaaactcctgacctcaagtgatccacctgcctcggcctcccaaagtgctaggattactggtggattactttttcaaagagggtttgcaaagagagttttgttttcttcaaagagggtttgcaaagagaccttgtatgctggagaatatcttcattttaccttcatttaaattttagtttagctagctaccaaactcaagatttaacatttttttctcaatattttgaaagttgtcctcaaagactactccattgtcttcttatacccaaaattgctattaagatgtctgaaaagaaactaattcttgttaaaattgattttatttttctctctggactctctgaattttctctttgcatatgagatatatatatggttttatttcactattatctgtctagatgtaacttttttttctatgctagtaggtactcaagtcctctcaacatgagccctcatatcttcctttaattctggaaacatcatcagtttttactttgtcaaatcttttcaatttttcccctctccttctgtgatttctagtatttgagtacaatactttatgctaagtttttcataactcttgactttttcttaatattttccatctatcttttcctgaggcccttcagttcagctgattggcccgatcattctttggctctgtccattgcaccgatcacattatctgttgagttctccatttctggttcattaattaaattttactggctgggtgcagtgactcacacctgtaaacccagcactttgggaggccaaggcgggtggatcacaaggtcaagagattgagaccatcctggctaacacggtgaaaccccatctctactaaaaatacaaaaattagctgggcgtggtagcacgcgcctatagtcccagctactcaggaggctgaggcaggagaaccacttgaactcggaaggcagagctgcagtgagctgagatcatgccactgcactccagcctgggtgacagagagagactctgtctcaaagaaaaaattatcgactgtaggttgttcagtttgttgtccttcttttatggtatttgctctcctgggatgtcccctttccttgtcctgggagctcacgtttccctcgggataccagctgtttgggtgagtctctgggcagagatggaagcccaggttggagctgcatttttcctggtgcatctaaggaaaaaggggtcccctgccacagggtgtagaacctccattgctcaaggctgtggagatggtgactgtgtagacattttatatgataagtgcccttttgctgggggaagttcagattgcttctagtttgaaatcattacaaagagtcctgaaatgaatatttttggtacaaatgtccttgtgtactttgtacaagcatttctgtaagaaagaagattcaccttcttttcaagaagctaaattgatgggttaaagggaatgccaattttgatttcagtggatgccaacttcatctccaaaagagccataccagtttccactgctgccagcagtgtgtgagagtgcccactgggcccccacaaggtacaatcagacttttaaatctctgtgcatggatttttgagacagatctccagccccccttggaaagcaaatctcacatgtaaaatgccacagcaagtttcagcttgtccacatcaccctgatactgccaaacaaaagaccaaccctcttagccaacataaataagtgacagacatttattacagagctgtttttttatcagtccccagtggctttatcaggaagtggactcaggaaactctgacagaacctggcactgctgtctttctggcctctaagccagagcaactgcgtggccagagaacatctcaatgttgttgttttaccagtggagagtgtaaacatattgtgtatctcttcccaatggttgggttatcgcagtgggactcacctgtggcagtccattggaagggacactatccaggaggagctgaaatccagtttccccttcagtactcaagggccttttcttccctcagctaccaagaatgctgtcagggtcattgcctacaaactgatgatgctgtgcagaattgcgcctctactgtaaggctttcccggtcctacttggcgagtcttaattgacatacctaccattaaataatctatcacttgtactatggagagaaaagcaactttgaattggagatcacttcacagcagcataacagtatgagacgtaaacgtgccaaaagtgagccttagaagtgtaatggatattttaaaaagagagaaagcaacaaggcctcatgtgctcaggggtggtgttgtggtagagggggcactcaagagatcagggacagagggccccagtgcttggcagagggccaatgaatagttgttaaattaattgattaaatttcaacaatgaatgaaattggtgtaaccaaggagagaaacccttctaagccaagccatgagcacccttctgctcagagcagtagctcagtcccatggtgaaagagatgcatttacagctgtgtttatggaaatacaagctctcatttgagattcttcacctcccagtaaggcagatcttcaaggtgcctttttacagatgatgaaactagattccaagacagtgatttgttatacaacaaataaaatggcagagctgggatttgaaaccagtactgtttccaaagaccagcctttcccactagtgtgagacaattcatacgtgaaagaatttgatatactattgaataagaaacaccaggataaaaagacaaaatattggtaaaaggacagaagtctatggtaaagtaaatgaggatcacagagcctctcccaccatgtctgccacatccccacacaccaagatagctgacgtaccagacatgaagacgagatggtgagtgtgtctcacggtgagctccggtggcccaagtggctgtgtggccattatatgaaggtcattcttcaggctgtccccatgaaacctgagggcttccctgagcctctgtgagccttctcttcaaccaaaactgaggaatagataattagctggttgagatctttgcttttgttgttttacactgaaagtcacccatatactcgaattactgattctacaattttttggccactcaaagcaaataaaaacataagacgttggctgggcgcggtggctcatgcctgtaatcccagcactttgggaggccgagacgggcagatgacaaggtcaggagattgagaccatcctggttaacatggtgaaaccccgtctctactaacaatacaaaaaaaaaaaaattagctgggcgtagtggtgggcacctgtagtcccagctactcgggaggctgaggcaggagaatggcgtgaacccaggaggcggagcttgcagtgagcagagatcacgccagtgccctccagcctgggcgactgagtgagactccatctccaaaaaaaataaaaaataaaaaaaaagacgtttattcattgattttaatggtattggagaagatgttatcaaggggaggaatctcaagtttgtgttcagttcctgctgttctctgagttctttccttcttattttgtaaacatggttttgttttggtttttagtacacaggctgccaaagcaagcactatgattttttgtagctgtgaattcaattcattaatatgagaatcctagatgctatctcaagaaacattcataggtttcattttaattcagctatgcttggataaaacatcagagaaatttatttgccatggaaggcctttcccttaagtattagcaataacaacaaaatagtaaccataaaaaaactacctttattgagcacttactgtgtgctaaacacatgcattatttcctttcatcctcacaccaacaccatgaaaaatatattcctcttacttccattgtacaggtgaggaaatggaggcttaaaacagagcccatggagctcctaagtgatggagccaggatttgaacccaggactgctgactttaggctcatgcttgtaatcagggcactgtgcattccaggtgatttatattggaaggcagcctttcctgtgattaaaagtgcatctacgaagcattgttctttccctcctttttttttctgtagccctgttcacggcctatcttggagtcggcatggcaaactttatggctgaggtgagtttgctttagtctcacttttcattagcgtaattgaccagcttacaactatatgggaaatgctcctgaagtccactgggctggcatccagtggcaggatccatgaccatgagaagcactgctctcccttctcctggagctccctggcctttctttcagcatcacagcaaactttagtccaaaccacaatcacccagttgttacaagtatcagattgcttggtttaaaaaaaaatgaaacgtaggttgtataacatattatcaagttcagagtctaactctaagtgataagaagtagactttaggatatcttttacttaaacagaaagccagatattccattgcaggtgatgcagggccggtttctgatagcttagtccatgttgatgtggtcatggctgctaaggagtcaaggcagtatctagcccttttggcagcagcatggagattttatctgggagggtccttaaggagacacagtgtctttctggtggaaagccaaagtcccattacacacatgcatgatggagagtacatcagagcacatggggcccttcacatgtcaacaaagaagattcacaggcatcagtcccaggacccaaatgggcaagctgcacaccagagtcagctaggaagacagaaaaatatggagccttaggccctgtcctttggtatttctgatagagtaggtcttgtatgatgcttgaacatctgtgtttttttttaactcccccagatgattctgatgtgcagtcagattagggtacccctacactccatcacaccccagggaggtccatgcatcaggtcagagctaaccaatggtgtatgctcagaattgtgtgagtttccatgagcagcacaaagaggacctaccctcaaggaacttagagtctatttgggagacagaatggaaagaaacaaagcaagtcaagtctaagatctagaccaggcagaagtcaaggtcagagaggtcactgtgggctggactaatcagagaaggccttgtggacatgaagactggtcaggggccatttgcagtttgcaagtgtcatctctgtcaaatgttctcttggcacatctggtgcaggaagtctgaatatatgagagggagagaaagacatacaagatagagacataagtggctgccctaaagaatggatgtcaacattccaacaactcaatgccctgagattgtaaattcagtctccacgagcatgcacagaatccagagcaatgcccccagtggttcatccccctgggctgaatgcaagtagagggggatgccttgtgcagctcagctgtcagatgggatctgaaaggagcgtgtggctttctcttcttccccaggttggattgccagcttgtacctggcccttctgtttggccacgctattgttcctcatcatgaccacaaaaaattccaacatctacaagatgcccctcagtaaagttacttatcctgaagaaaaccgcatcttctacctgcaagccaagaaaagaatggtggaaagccctttgtgagaacaagccccatttgcagccatggtcacgagtcatttctgcctgactgctccagctaacttccagggtctcagcaaactgctgtttttcacgagtatcaactttcatactgacgcgtctgtaatctgttcttatgctcattttgtattttcctttcaactccaggaatatccttgagcatatgagagtcacatccaggtgatgtgctctggtatggaatttgaaaccccaatggggccttggcactaagactggaatgtatataaagtcaaagtgctccaacagaaggaggaagtgaaaacaaactattagtatttattgatattcttggtgtttagctggctcgatgatgttaacagtattaaaaattaaaccccataaaccaactaagccttatggaattcacagtcacaaaatcgaagttaatccagaattctgtgataagcagcttggctttttttttaaatcaatgcaagttacacattatagccagaatctgtatcacagaggtgcaagctgacagcagagctcagtccccacttcctgcaaacaatggcctgcaccctatcccttgtgtgtgtgacattctctcatgggacaatgttggggtttttcagactgacaggactgcaagagggagaaaggaattttgtcaatcaaaattattctgtattgcaacttttctcagagattgcaaaggattttttaggtagagattatttttccttatgaaaaatgatctgttttaaatgagataaaataggagaagttcctggcttaacctgttcttacatattaaagaaaagttacttactgtatttatgaaatactcagcttaggcatttttactttaacccctaaattgattttgtaaatgccacaaatgcatagaattgttaccaacctccaaagggctctttaaaatcatattttttattcatttgaggatgtcttataaagactgaaggcaaaggtcagattgcttacgggtgttatttttataagttgttgaattccttaatttaaaaaagctcattattttttgcacactcacaatattctctctcagaaatcaatggcatttgaaccaccaaaaagaaataaagggctgagtgcggtggctcacgcctgtaatcccagcactttggggagcccaggcgggcagattgcttgaacccaggagttcaagaccagcctgggcagcatggtgaaaccctgtatctacaaaaaatacaaaaattagccaggcatggtggtgggtgcctgtagttccagctacttgggaggctgaggtgggaaaatgacttgagcccaggaggaggaggctgcagtgagctaagattgcaccactgcactccaacctgggcgacaagagtgaaactgtgtctctcaaaaaaaaaaaaaaacaaacaaaaacaaaaacaaaacaaaacaaaacaaaacaaaacaggtaaggattcccctgttttcctctctttaattttaaagttatcagttccgtaaagtctctgtaaccaaacatactgaagacagcaacagaagtcacgttcagggactggctcacacctgtaatcccagcactttgggagatggaggtaaaaggatctcttgagcccaggagttcaagaccagcttgggcaacatagcaagactccatctcttaaaaaataaaaatagtaacattagccaggtgtagcagcacacatctgcagcagctactcaggaggctgaggtggaaagatcgcttgtgcacagaagttcgaggctgcagtgagctatatgatcatgtcactgcactccagcctgtgtgaccgagcaagaccctatctcaaaaaaattaattaattaattaattaattaatttaaaaaggaagtcatgttcatttactttccacttcagtgtgtatcgtgtagtattttggaggttggaaagtgaaacgtaggaatcctgaagattttttccacttctagtttgcagtgctcagtgcacaatatacattttgctgaatgaataaacagaaatagggaagtaaacctacaaatattttagggagaagctcacttcttccttttctcaggaaaccaagcaagcaaacatatcgttccaattttaaaacccagtgaccaaagcctttggaactatgaatttgcaactgtcataggtttatggatattgctgtggagaagctcaattttcagtgtttgaactgaaccctttcttgttagggaacgtgtgaaagaagaattgtggggaaaaaaaagcaagcataaccaaagatcatcagcagtgaagaatctaggctgtggctgagagaaccagaggcctctaaaatggacccgagtcgatcttcagaacagggatctaccatgcaggagcttcttgtgctcacacaaatctgtaaatgggaacattgtacattgtcgaatttaaatgatattaattttctcaagctatttttgttactattttcctaaaattgaatatttgcagggagcacttatactttttcctaatgtctgtataacaaatttctatgcaagtacatgaataaattatgctcacagctca

SEQ ID NO: 290 - DNA, 16019 bp, Homo sapiens
  source 1..16019: mol_type = genomic DNA; note = NC_000009.12:c91425063-91409045 NFIL3 [organism=Homo sapiens] [GeneID=4783] [chromosome=9]
actgtcgggaacatggctcccttcgccaaggccagcactgaccactatccgtgtatcggtaaacgcagggagtgtgccacgtgccttgacagtctagcgcgacgacttaagaagtcgcggctaggtgctcttttttccatttttttacgtctcttccgtagcccgggaatttgggagagaagactaccgtatccagttagacgcagaaataacactaagcagctatcagctcaaaatcacaggaagagatcccgcgcggtcgtctcaagccccagcaccaaacgacagtgggcgtcccagcgggggcacccgagcgcggaccttcacatcctccgaggaacgccgcacccgcgtggcgggggtgggtagatggacctcagcgagcctcgtttcccagtcgtgttacgcaacaactttgcagccgtcatcttcgccctaattgtgcagggggcggtgtttgtgcgtggagctttccctcccggctccgggccgtcgcggctctcgggagaggcgccgggacattttaatcgctgcctccgccgcgcagccctgcgcagctgcccggccgcgccaaccccttccccgccgcagcgcgccccgagtgttggcagcttgccagccgccaccccccgccttccctcctgcccaccccaaggtagagggctcctctcgggagtgtgcggggaaggggaggccgaggtccgggccacgcccgggtagccgcaacccgcagtgctcagtcggcaacaggtagcccagcaggctgcggctctcaggaagacaaaaagcgcctctgcgagcaagtgagggtcgcggggagcgcagagccaccgcggcgaccgggagggtgaagggagccaagagcggacggggcggtgggacggggggctcccgggctcctccgcaggctcgctccggtcgtgtcggccgcgtgggccgttgcgcaacactcgttgcgccgggaatggggcgccagccctcgcgggcgctcggacggcggtggccctggccggggagggacgcgagctggtagtggcgccgccgcggagggggagctgagggcggggaggcggggcggggccgcggagtgcccgccccggcccgcccctgccggccgcggccattggcggcgggccgggggcgggtgcgggcgcggcgattggggccgcggccgccagtcacgcggggctggcgggcggcgacgtagcgcggcgctcggaactgacctactaacacacatctctccgcgcggccacggcgcccgcggacccggcgcgcccgcccgcctcccgcgccgcgccctcgccgccgcccgcctcccgccgcggccccggaggcccggcccggcccgagccccgagcgccggcggcccgactcccggccgcccctttctttctcctcgccggcccgagagcaggaacacggtaagcgctccgcccaccgccggccgggggcccggcgaccgctcccagggcgcgctgcgggcgggcgggcgggcgcggggtgcgggccgcgctgtgtgcggggtcgggctgtaagctgggctcgccagcggcggcgagtgcgcgcggggcattcattacataaacttttgctgccttgtcaggatgggactcgccaccttaaggtggctgctttgattgcagcgccttcgcgccggcacgtagtcctggctggtttgcgctctccccccgctgctgttgcataatgtctcctgatttcaggaaaattgatgttttggtaaagaagagcgccaggcaggctgagccctctccgagcgggaagatgctctttcctctctagtgtctttctttctcgttccttctctggggctggcggcgtaggggggagaggaatggggggttgaggaatggggaatagtcttaatttgcttggtgagaaaaagggttggtagcgtgaacggtgacggcattcggagaatgcctgcgcggcgtttgtttgtgtcaggggctgtgtctgcacagacgttttccaccctgtttgtcgtcagcgtgttttacaagccctcgggaaggttgtgggatttgtcctttcatacattgcataatctgcccacggtgaaatgttggcaagaattgcgggctgatgtgggaatatgcgcgtatgtgtgcaatgatttggtaattgaggcgcagcgttggatattagatcgttatttacgtctatattacgtcccaaataaacaggttttaaaacgatactacaaaacctaaaagcaagaattgctcgcattgaattctgatcttgggtactactggggttcgccctttcaatgttctcagctgttatttttaaatctgggacgaaccattgtgacgtttacctccccaccttcctaattttaatgcattccattcgatcagccctttttctcaccttattgtcattgctttttcagacacgacaagacaaatcacataatagtttcctggaaatgttgcattatgtaactgccgaatttgctggcagtgagcatagagagagggagctaattacgtgattttataatcttgctacaaagaaagtaggacagtctcagcctttaagaatgtcactataacagttttttttttttccttaaggatattttaaacaggaaagtagacaaccgggtaagcatggagtttgctcatgctgccgaatgtgtgtcttttgccctaaatgaaacgcacgttcttctaaatttagccctatcacattttaacaattgtggcctcgcagtgctatttctggtgttttctccagggctgtgtgcaaatacaagttcaaggccatttgctgtagttttaactccacgccttcggagacctttgataagattgtatttttaggaaggcatttcgcagcgcccggtgatttgctggatgctggctcccatttatgtttttaaaggacactttaggaaactgctgttctctgagaacagcagggaatggccaagtgtcatcttctgttcttggcttttgtaaataacaacagtaagtgaggtcagaagtatttatttacccccagaccagatatgacctatgggaaacagatataggttagtagattgtttttttgtctggataccctggttttacttatgtgaagatgtgtgaatatgtaatttacccaaatattaaatttcttcctggactgttacatagtgattatgtgtgaatatatgtatatgatgggatgtatatataacgtaacatttaaattaagtgcagggtttttttttgtgggaggtggggggtggacgtctctggaacagagtatattaccccaaataattgcagtcgctttccaagaagctagttgctctaggcccccagcttcagaccccgacctactttgcgagctcgggtgggagtcccaggcctgtaggggccgcgtggcgccaccttccgatcgcgatctccaatggcgagtccgtgcggcccccagtgcgccgctccctcctgcgggccggtggggtctgcgagaatccggggctgggggcgggtctggtagtggcgggcggggacctcgggtcgggaccgagaagcgcctccgaacggcagttatactggggctgctcagtggcctgagctcctccctgccccctccccacattcctttgttctggcgcggggggtcctcgcggcgccgaggccccgctgcgccgcccacccggagggaggagggtctctgggaggcgccgcgtgggggcgcggcccgtggagcccgggcgctagggaccggccggggccggcgtacgggtgcgctctgggttcgcccgggccgcgggagccagggagccagggagccagggaccccggctcccgcacggggcagacaggggcagcgcgggcgacccggagcgcctgcgtctccgcggccctccttccaacagggcaaatccaggggcctgactccgcgcctgttctgcggtgaggttcagaaacctgcagacacctttgttccaagagtcttcattgtatttcggaaccaagcgcgtctccattcttgaagtgaaaaagaccttaagaaaaacctccaaacgtccaccggccacagaaattgggggtggaggcgctccagtattgatagtgattaaaaggaaggcctcagcttgactttggccagttgagttgagccgattttttttaacctttaatttatgtggtcaaaggctagaggagagagaacactgatctccagagttcaaaataaaatctaaacgcccacatagacgctgctgtcctactgtaaaactacagtactttcatcctcgcataaagacttccaagattgtacccatgcagtaattcatggagacatcacagatgttctcctgaagcatatcaacgcaatctgctctttgttgaaaactgaccgaaaacttgctttctttggcatcataccctacaccgctatccctaatcagtttccctcctgttacaggcagtagttagagaacaggtttcggtgaggtacagatcctaagagcgcaggccctgggctcacaagaaccctgggtcccaggccccagcttgttatcttccaacactgtcctgatttccatcactctccagggtaaactgagggaataaaacctgttgacttagttggttgtgaggagttcaataaatgtttcctgtgttattgatcaggaaccagaatctgtgtgtgtgtgtgtgtgtgtgtgtgtgtgtgtgtgtgtatttaccttcatttttctctttgtaaatctcttcgcagtaacagtaaggattcgtgttggaattaagtctgtaagatctttcttgagatactttttttgttctaataatatatatattttttaatttgccatcgtgttcaatgttaatttcagtttgaggggaattcctgacaggattgcagaacctcaaacttcccaagtcattgggttaatgttttggggagctgcttgaaggaatagagagatgagtcgattatagtagcaggaatgacgtgacaattgccatattaatagctcagctttttccaattcccttacacattctgtgactcattttctgtagcttggatgatttctctatctaaaactttgtggtctgagatcagcagtggatggtgagaccccacagataagctctcttgtagggggtatatgtagcctgaaaactaaggccagtcctgtgaaactgttgatatttgacccttttgaccaaattttcatttggtttacccttacacttgcgacataggtcagggcttcagtaagagtcacgagcagcaaaaacagcctggaactgataggcatcgttgccttttgatactgatcattcttcagaaaagagataaagagttagtatttactaaacacatactctgcatgtgccaggcacagtgttgaggggctctgttatcatccacatttcatagatgaggaaatggaaactcagagaaatgaatttgcagcccaggtcgcagagcctgaaaaccagatggggaaatttgcacctcaacaaagtgtattctcacactcactgtagtttttgaaacaatttccttttctgggttaaagacttatttttgtgcagtgcagttataacatcactgtgatgcaacagcctgaaaattaaaaccctttgtgagaggcctttcggacgttgagcaatgtgcctgactcaccagctgagtggatttttctagttgaccttgccttggtcattagagtcaatttcgagatgtaaatgcgattgcagcatggaatggaaaaggtgcagtcatattgcctgggctttatttttacccaggttaaactcatatacttcatgatttccattgtaatccagatgccattgatgctgttaaagttgtttatttttaatttgtattgaggaatgagagcacacttgggattcaattcaaaatataacagaaacaatgtaattgaaattgcctttaatattcatttcttgtttttgtaaggtatgcctgtatttcacggggtttaatacattgtttgatatcctgttatttttctaaattatatttgagttgatttctatccaggttggacttgtatgagaatgttgaaagacgttgacctttgatcacagacattacaatatgaatttttcagtttcaaaatgaatttttattactactaccccagttatctttcacatttctttgtaagtaactttactgtagttaaaaaaaaaaaaaacacccaaaactgtttctcatatggctttaataatagagcataaacttgtttttatgataagaaagtttactagagatttgctagatgccatttgttattaatctgtgctttgaggactcagtttcataggactcagaatgatgtttataagccttttagttatcagaacatgatgtcttttattaattagctttttaggggtcttaaactgtaattaactggccttcaaataaacactacaaataagcatttgaaaatccactctattcataaggtagaaaatgacatttataatcatccactgactggaaaagtggaaaaagaaattaaaaagccaagtgaagcaagttgggatgattctacattatcattagaaactttcaagaattttctcagcctgactgtccccttagcccaccatttttgccatcattacaccatgttgcatgtattacttattcattggggaattttctacaactgggttactttgtgattgttggtgtccttttaagatttcagattagttgctacactgatcagttatcttttcagaagtttcaagatattaatagtccccacatttaagtttctatagatttttaaaaaattattactgttctgtttttcccccatgttactacccatctttagtgagagctgttcttatttctcaagctgtgcagttaattggtcgtgctagcgtgtatgtgcttactctgtgcaggcttcagaataatttaattgtgtattaagtttcaaacactgacgacctcttaaagaagaatgttaagttatactatttcatatttcaattacttaaattacatcagtgatgtaataaaatgcaatgttgtcatcgtatttattaaatttaaatttaattttcagctagtcctttgtcgaacttgaaatattttcatttatcataaactggatcaggctttgacacatttatttacagaggcacccaaatagaaaaagtaggtcaatttgttgctatgatagaatagattctggcagtgtgcgagagtgtgtgtgtatgtgtgtgtgtgcgtcttgcctgtcttgatcaagtgcacatttctctctaactttggggtaagctgcttcttggggacagaatggcccttagagaggtttaacatagttttctcagcttaaaaatccttctctttttcaacgggattagaaaattctcttgcaacttcggtgttttctgactgagttttttcactccccatttcctctgggttgtacatgtatagtgaattcttttcttatttcatctctgcttttaaatactagattgttttctcatccatgaaaagaagtaaagcatttcattgacgcagatactgtgaattttacccacaggaagaaaatgtagggttaacatattgctagtattcatactttaaaagtataaagagatgtgaattgattaattgatttgattttttcatgaaaatgacatttatctaaaaaataagcatctgctgtcttactggagaggtggcttacagtttaacataacttaggtttaccttgaagacatttttttttcctttactgttatctgtattatataacagggagaaaacaatacattcagagagtagagggaaaataagataattctataatgtttccaaatcattgggcatatcaaatagtatttcatcttctattgacagaattttaaaaacaaaatatatattgcaatttgcaataaaacttaccctttatagataattaataacaaaatgttctcagagtagattttaatgtttagactattagtaagatttcagatgattgaaacaaagcatgtttattcttttcttttgtggagcttggattgttaaacattagttctgggagagaccagggaagataaaggtctatcataaacataactaatgagataactcctcaaggataaatttggtctagaattattgttatgaggttatattcttttatagaattttctaaatcaaatcttgtacttaattaaaaacaatagggtaatctgacttaaactttaaaaatctgggcttatgaaatataattcttgctatataattcttgcttagagaagtagtgtgatggactatacaaaagcattaattagtgatggcaccttcggagtatgtatggaaaaatatgtcaactggtaggtaataatacctgctcttaaatttctcttttttatttgtgttttcaaggagagtcatatcatctaatgtgtgtaatgaagttaatcgtgctgaatacactaacatcatagaattggcatgtagtgtcaattattcaccaaaaaagaaacttaagcaatgactaatataccacaacattagatgttgatttgaaaagatgatgcatagatgaagtaattgttaaattaatcataagggaaaatattgaggcttgaaataaatttgttaggttagcataaatcctgaggctttttgaaggcatcgtaaactacttttgcatttgctttaagttcattgttgaggggcataaggagagctcagagcccatctgtgcccaactgctgtgtggtcttgggaaggtcagcctgtcttctagctgattaatctgcaaaatgagagggtcagagagacactgtcccccgcctcatgttgaaaacagattacactcttggatttgttaaaaaaaaaaaaaaaagaagaagatcataggtgacaatgtccacagctatcatatttctttttctctatttaacataattagaatagccaggaggttaaaattttagtaaagatatgaaaattaataaaatgttttctcaattcataaatagtgccagatctgaaacatctaaggaggatggagaaaagttctagatagtatctttgctggctaaagaagttaagacagcatctaagagaagttaaggagccaggcgtgacggctcacgcctgtaatcccagcactttgggaggctgtggcaggcggatcacctgagatcgggagttcaagaccagcctgaccaacatggagaaaccccgtctctactaaaaatacaaaattagttgggcatggtggcgcatgcctgtaatcccagctacttgggaggctgaggcaggagaatcgcttgaacccaggaggtggaagttgtggtgagccaagatcgcgccattgcactccagcctgggcaacaagagcaaaactccttctcaaaaagaaaaaaaaaaaaaaagaagaagtagttaagttagcatagtgccttactgcgcccaaagtaacttagtaaaagggtatgtattactcagaaatgaaagtgacacaaaagagaactgtgtgtaaatgagactgcattgcaaagatgcagaaccacctgtgaaagtgtaggagagagtaaaggaactgggcctgaatgtacgctctgccatttagctatgtgacactgggcaagtcacttgacttctctgagccttagttttcttatctgaaaattgtcaccaaaagtgaatgaaagaaagcaggtcaggctcccagtgcccattctgtggtaagtgttcaataaatggcaccaattatgattgtttttgttattatctccatgacaagaagaaagcctgcaccccaggcccatgtttgtgcaactctgcactcacacctggttcccctctgctcacctgtttgtctcccacccacccacgactgagcgcctggtctcgggagtttggtttttctctccctctttatgtgcccctagtctccccttgtgcccagtacacagtaggtgctccatatgtgttgaataaacaaattaatgaataagagaatctctctgttaataagtaaaatatcttctttacaattcacataacattaaaaagaaagcatcaaaaaagttttctgtttacaaaactctcttatataaggtatatgggtgactgtcaatgaaatgttgagcacctaatatcttcaggtttttgctagaagacaagtatattttaatttccgccctgaagtaattcgcagtgtagttgggcacaaaagacaaacacgtggaaacacacacagtgtatatgattgtgcctgtctccgtatcatcccataatgctgataaactcttttcaacactgcaagattatttgatagataatattacagaaaatatcctaagatagtgtggtgatttgccattgagttgtagagaccatgaatgtaatacatacagatgagagcagaatcacagatttatagtgacatgccatgaaattcaaataggaagaagatgattaaaaacaaatgaggtggcctggcgaggtggctcacgcctgtaatcccagcactttgggaggccaaggtaggcagatcacctgaggtcgggagttcaagaccagcctgaactccccatggagaaaccccatggagtttccccatctctactaaaccccatctctactaacatggagaaaccccatctctactaaaaatacaaaagtagctgggcttagtggcacatgcctgtaatcccagctacttgggaggctgaggcaggagaattgcttggaccctgtaggcagaggttgcggtgagccaagatcgtaccattgcactccagcctgggcaacaagagtgaaactctgtctcaaaaacaaaaaagcaaatgaagttttctgtaggttaatgtaccaacaaagttgtagagatgataaagtagtcatatagtacttagacacctagaagacatgagttaaggaaattttaagacaaatggggctatttcagttaaatagaaataggacctattgtgaaggctccttcccaattgggccccaaccttgaaaaggtcctagaagtttaggaagagtaactaaggcagacagaatggcggggcatttcaaaagcattactgtaaatctagtaagtgaggcaaaataaaggaatctgatttttttttttaagaaggaacaaataagataacacatggaagagaaagattctcaggtggagaaaataaccagaataatagtctgcaagggatcatatgatgtttaaaaactaaaagtggaaaaaagtagtggccaagagtatagtggagatttgaaaggtgccttgggaaaggtcagtgcaattgtcttctttaactgggatatcttcctctttacttctccactcattttactttagcaggaggactttgctgaatggcagagtgcagacttcaacagaggaaagaatccattcaatatgtaaaggaaactgggttttcatattagaggacaaaacctaaatgcaaattagaggaaatagtattgttggccgggcgtggtggctcatgcctgtaatcccagcactttgggagtccgaggcaggcaaatcacctgagatcaggagttcaagaccagcctgaccaacatggtaaaatcccgtctctactaaaaatacaaaaaaattagctgggcgtggtggcgcgtaactgtaaccccagctactcaggaggctgaggcaggagagtcgcttgagcctgggaagcagaggctgcagtgcaccaagattgcaccactgcactctagcctgggcagcagagcgagactcttatcaaaaaaaaaaaaggaaataatattgtttaaatgataaataggaagattccttctctgcaacatcactgctgactgtgacacactccttgccttcatttcctattaaagtttcattaccaaaaaacaaacagaaacttgatattaataatcacaaatttctctgagttacgactagctgttcccttaactatgttggctcagtttaatgggcaaaaacctggcatgaaacattattctttatgatcctgaaattattacataattcctttcattccctggaaaagacaaaagaagctggcaggcttttccaattgataaaagtaaacttcattttattagtcattatgaaactaggcgtaagaaggagatagtggcatcatgtaagaacattacatctttttttttttttttttttgagacgaagtctcgctcttgtcccccaggctggagtgcaatggcgcgatcttggctcactgcaacctccgcctcctgggttcctgggttcaagcgattctcctgcctcagcctcccgagtagctgggattacaggcgcctgtcaccacacccgactaatttttgtatttttagtagagacggggtttcaccatgttagccaggctggtctcgaactcctgacctcaggtgatccgcccacctcggcctcccaaagtgctgggattacaggcatgagccaccacacctggctcattacatctttttagtagggtagaataaagtgccactgtgtgcagatcgtgctgatggaactgttgtaccatgtctatttaacgaaaaatattactgactggaacattaggcagagaatcagtgtctagaaacacagttaaattcaaaagcccccatgcaatgattgctactggaacataacatggattttattatctcgagctaaggcaactgtcaggccaaatttgtagtgtaagtatttcatcaatggaagaggaaactaatgaatgattctatttttgagttgttatattttacttgaaactaattcatataaatgaaagaaatttttttctgtaactatattctcttggtttaaaagaatttcatttcaagaatgcactatacttttaaaaaccccctttgaatagtaagtgtttttttgttttgtgtggggtttttttttttttttttttttttttgacagagtcttgctctgtcaccaggctggagtgcagtggcgtgatctcagctcactgcaatctctgcctcccaggttcaagcaattctcctgcctcagcctcccgagtagctgggattacaggcacacaccaccacacccagctaatttttgtattttttagtagagatggggtttcaccatgttggccaggatggtctcgatctcctgaccttgtgatctgcccgcttcggcctaccaaagtgctgggattacaagtgtgagccaccgtgccccgcctagtaactgttttttagttcaaagctactatgtaactgaaacctgaaatctattttgacagaattttcaagatcacaaaaagcattttggatacttcaatcttgaatgtttgatagaacaaattcaaaggaatcagaaaaaaaaattctaatctcttaaactcagatgcttgtaaagagatggcttgatggagaagaatccttttcatttagttgcagtgagtcacctggtggaatttgctgggatataagcctaccaggcagtcaaggatgtgatgggcaggtttatgtccacgttaaggtgtagattaaaaccaacagctccgttgttaatgtggcttttactttagtttttgtagaagaagtttgtctccatttgtattttattccatataggagtgcagaactttttttttactcacgttaaagtttacttggtaaagtcccttttaagaggtgagcatatctgcttggcagtgatgtaaatattaggtaacattatttagaagcaccacggtatgcatgtactgtttagaaacttaccaaccagaggctatctgtcatttccttcctgtaattgcccacacccaactatttctccatttcgcctcattaaatacagccttcctctacttctctctgggcagaggttattttatttttccctcactttcctggatcacatattctcttactgataggcctcattagggatttgtcctttacagctttatagtttaggtatttgggaacttatttcctttttgaaaatgctaacttgttgaaagaaagaactgtggccatgcctcatctgtgcttgtatgccctaaatgcttagcatatttccttgtacataatttgtaataaacatttatccagtgaataactggttttttttttattcatgtattgcagataacgaaggaggcccaacttcattcaataaggagcctgacggatttatcccagacggtagaacaaaaggaagaatattgatggattttaaaccagagtttttaaagagcttgagaatacggggaaattaatttgttctcctacacacatagatagggtaaggttgtttctgatgcagctgagaaaaatgcagaccgtcaaaaaggagcaggcgtctcttgatgccagtagcaatgtggacaagatgatggtccttaattctgctttaacggaagtgtcagaagactccacaacaggtgaggagctgcttctcagtgaaggaagtgtggggaagaacaaatcttctgcatgtcggaggaaacgggaattcattcctgatgaaaagaaagatgctatgtattgggaaaaaaggcggaaaaataatgaagctgccaaaagatctcgtgagaagcgtcgactgaatgacctggttttagagaacaaactaattgcactgggagaagaaaacgccactttaaaagctgagctgctttcactaaaattaaagtttggtttaattagctccacagcatatgctcaagagattcagaaactcagtaattctacagctgtgtactttcaagattaccagacttccaaatccaatgtgagttcatttgtggacgagcacgaaccctcgatggtgtcaagtagttgtatttctgtcattaaacactctccacaaagctcgctgtccgatgtttcagaagtgtcctcagtagaacacacgcaggagagctctgtgcagggaagctgcagaagtcctgaaaacaagttccagattatcaagcaagagccgatggaattagagagctacacaagggagccaagagatgaccgaggctcttacacagcgtccatctatcaaaactatatggggaattctttctctgggtactcacactctcccccactactgcaagtcaaccgatcctccagcaactccccgagaacgtcggaaactgatgatggtgtggtaggaaagtcatctgatggagaagacgagcaacaggtccccaagggccccatccattctccagttgaactcaagcatgtgcatgcaactgtggttaaagttccagaagtgaattcctctgccttgccacacaagctccggatcaaagccaaagccatgcagatcaaagtagaagcctttgataatgaatttgaggccacgcaaaaactttcctcacctattgacatgacatctaaaagacatttcgaactcgaaaagcatagtgccccaagtatggtacattcttctcttactcctttctcagtgcaagtgactaacattcaagattggtctctcaaatcggagcactggcatcaaaaagaactgagtggcaaaactcagaatagtttcaaaactggagttgttgaaatgaaagacagtggctacaaagtttctgacccagagaacttgtatttgaagcaggggatagcaaacttatctgcagaggttgtctcactcaagagacttatagccacacaaccaatctctgcttcagactctgggtaaattactactgagtaagagctgggcatttagaaagatgtcatttgcaatagagcagtccattttgtattatgctgaattttcactggacctgtgatgtcatttcactgtgatgtgcacatgttgtctgtttggtgtctttttgtgcacagattatgatgaagattagattgtgttatcactctgcctgtgtatagtcagatagtccatgcgaaggctgtatatattgaacattatttttgttgttctattataaagtgtgtaagttaccagtttcaataaaggattggtgacaaacacagaa

SEQ ID NO: 291 - DNA, 14427 bp, Homo sapiens
  source 1..14427: mol_type = genomic DNA; note = NC_000019.10:c38744474-38730048 CAPN12 [organism=Homo sapiens] [GeneID=147968] [chromosome=19]
actgacctccttcttggtgctctgacagcggcagccggtcctccctcagctctgcccgccttctctcctgctgctggccaagcccattaagctgctaccttggccacaactgaaggccccacgccctgggaagaaagctactgaagaggcgtccctgctccccagcaccccaaaccatcaattaatattaacgagggaaggctcctcattgcctaaagaccccactggggctccaatggaagagaggccccgcccccgtgactcaggaggttaaagggcctggtgccggcttgtgaggccagtgtccagatggcatccagcagtgggagggtcaccatccagctcgtggatgaggaggctggggtcggagccgggcgcctgcagctttttcggggccagagctatgaggcaattcgggcagcctgcctggattcggggatcctgttccgcgacccttacttccctgctggccctgatgcccttggctatgaccagctggggccggactcggagaaggccaaaggcgtgaaatggatgaggccccatgtaaagtgtggctggggtctgggctctggggtctgagggaggaggggctggaggcatggactcctgggtctgaggaaggaaggctgggggcctggactccctggtctgagggaggaggggctcgagacctggactcttaggtctgagggaggaggggctgggcctggactcctgggtctgagggaggaagggctgggcctggactcttgggtctgagggaggaggggctggggacctggactcctgggtctgagggaggagggggcttggacctggacttctggatctgagggaggagaggccaaggcctggacacctgggtctgagggaagagggggctggggacctggactccggggtctgagggaggaggggctggacctggactcctgggtctgagggaggaggggctggggacctggattcttgggtctgagggaggaggggctcgggacctggactcctgggtctgagggaggaggggctgggcctggactcctgggtctgagggaggaggggctcgggacctggactcctgggtctgagggaggaggggctgggcctggactcctgggtctgagggaggaggggctcgggacatggactcctgggtctgagggaggaggggctgggcctggactcccgggtctgagggaggagggggctaccatgggactggctcagcacaacttctggagacccagggaagccatgctcctgcccacaggcttccaggcctttcatgggcttggaggccctcactcctctggatgagacctttcctcgctttctcaggctgaggcctggaatcccccaccacccacaggagttctgtgctgagccgaagttcatctgtgaagacatgagccgcacagacgtgtgtcaggggagcctgggtgagaccctgaacccacctggagtcctcagatccagctagtttcagctgagatcctgacagctccatccctttgtccacccactcccggcccctggatccctcctcagtctcttctctccctaggcctctctctccctcctccctccttccttccttccttttttttttttttttttttttgagatggggtctcactctgtcacccattctggaatacagtggcaccatcatagctcactgcagccttaacctcctggactcaagcaatcttcctgcctcagcctcccaagtagctgggactacaggtgcatgccaccatgcccagctaatttttaaattttcttgtagtggagtcttgccatgttggccaggctggtcttgaactcctaggctcacgtgatctttctgccttggcctcccaaagtgctgggattagaggcatgagccaccgcaccaggcctccctccttccatcctcacctaatcctggcctctcctcccaggtaactgctggttccttgcagctgccgcctcccttactctgtatccccggctcctgcgccgggtggtccctcctggacaggatttccagcatggctacgcaggcgtcttccacttccaggtacagctcagttcctctgcccatgcctccgtttcccccatggtgacttggtgatatggatttttctttttttttttttttgagatggaatctcactctgtcatccaggctggagtgcagtggcacaatctcggctcactgcaaccttcgccccgcccccaggttcaagcaattctctgcctcagcctcctgagtagctgggattacaggcacccgccatcatgcccagctaattttttcttatttttagtagagatggtatttcaccatcttagccaggctggtctcgaattcctgacctcgtgatccatccgcctcggcctcccaaagtgctgggattacagatgtgagccaccgcacccggccagccatatggatttcatagttaacgttgacttggggctgtaattcctgactctgggactggcacagcagaggcagggcccaggcagggttggaggttggaagccgagtccggccctgcatcttctcccaccagctctggcagtttggccgctggatggacgtcgtggtggatgacaggctgcccgtgcgtgaggggaagctgatgttcgtgcgctcggaacagcggaatgagttctgggccccactcctggagaaggcctacgccaagtgaggaccccagttccaaccagctgcagccctaagtccccacagcaggcatcaagccacagggggacccagagtcccccaagctctgcaatcctccaaacaccccaccaagaatcccaaaccaagtgacaaccgccagaaccctcatatcacaacatcacctgagcaacttcatgttttttttttttttctttttttttgagacggagtctcactcactctgtcgcccaggctggagtgcagtagcgcgatcttggctcactgcaacctctgcctcccaggttccagcgattctcctgtctcagcctcccgactagctgggattacaggagcgcaccaccatgcctggctaatttttatatttttagtagagatggggtttcaccatgttggtcaggctggtctccaactcctgatctcaggtgatccaccttccttggcctcccaaagtactgggattacaggtgtgagccactgtgctcagctgtaccttcaaatcttaaacccctctctccatcaatatttcacacaaaacattcctggagacccccagtcactcataattcttaaggatcctgaaatctcatatatcaggccctggattcaccaaatctgggatttatcccctcgggtgagctgtatatcttagattgtctctcctggtccattgagaaatctaaagcacccccaaaatattgggggtcaccctgggaccctcaaatctttgccttttccccattctgaggctctgaaattcctgacaagcccccatagggatgatcccccaaagcggacatctaccagaggttcaaggtttcagacagcaccaggactctcagaattctaacacagctctcccatgccccccaccaaaccgaagtcctggtcaccccaaggaccacaggcccaatctccaagggcttctgtatgtgccacagttccccccgtcaagagtctgaattttttttttttttttgagatggagtttcactcttgttgcccaggctacagtgcaatggcgtgatcttggctcactgcaaccttcgcctcccgagttcaagcgattctcctgcctcagcctcccgagtagctgggattacaggcatgtgccaccacgcccagctaatttttgtatttttagtagagacggggtttcaccgtattggccaggctggtctcaaactcctgacctcaggtgatccacttgcctcggcttcccaaagcgctgggattacaggcgtgagccaccatgcctggccaagagtctgaaattgttttagctgggtgtggtggtgtgcacctgtgggcccagctcctcgggaggctgaggtgggaggaggatcgcttgaacccgggagtttgaggctacagtgagatgagatcacgccactgcactccggcctgggccacagggtgaccctggaaaaagtctcaaaacttcaggaatttcccctggggattccacaccctgagacacaggcccctgcagatcccagggcaggggtgcctgagacgcttgtacttgcctcaaccctcaccccagatctgcccccacaggctccacggctcctatgaggtgatgcggggcggccacatgaatgaggcttttgtggatttcacaggcggcgtgggcgaggtgctctatctgagacaaaacagcatggggctgttctctgccctgcgccatgccctggccaaggagtccctcgtgggcgccactgccctggtaagagacctggactcgcatgcggaacccccaccaggaccagagcacagtcaggggtgtggtggggtgggcggagtgcttcctctgttctctgcttccgttactggcttaggctcgctcataaatctaactagtcaaaaataaattcatttgctctcatgaatcaggggcttcaggcacagctggatccagatgctgagggtgttgcaactatgtttatttctcattctgtgttagtgtcactctcagccaggctctcccctcatgggcataaaaggatcccccatagctgcaggtatctcctaccaccctagggtttatttaaaaaaaaaaaaaaaaagtgcctctttctgagaatttcagtaaaagtcccaggattgattctcgtgggcttagcttgggtcatgtgttcatctgtgaccccatgacacactcattcattcactgagttggtctaactccttcactcattcatttacttaaatcctctgagttactgcttctctttttcttttgtgtctgtttctctcttctgtatctttctttgtctctgtctctgtctctctactctttccatcttttttttttttttttttttttttgagacggaatcttgctctgtcacccaggctggagtgcagtggcacgaccttggctcactgtaacctctgtcacccaagttcaagcaattctcctgctttgcctcccgagtagctgggactacaggcgcccgccaccatgcccagctagttttttgtatttttagtagagatggggtttcactgtgttagccaggatggtctcaatctcctgaccttgtgatctgcccgcctcggcctcccaaagtgctgggattacaggtgtgagccaccacaacaggcctctttccatctattttgtttgtttttgtttttggaggcagggtctcatctcactctgtcacccaggccagagtgcagtagtgtcatcatagctcactatagccttgacctctgggctcaagggatcctcctgcctcagcctccagagtagctgggaccactggtgtgcaccaccacgcctgttgaatttttaaaatttttgtagacttggggtcttgctatgttgcccaggctggtcttggactcctggcctcaagtagtccttccacctcgacctccctaagtgctgggattacaggcgtgagcccgtacctccatctccttttgtctcgtttccatctcccttcctctccttttctctttcgccttcagtcactaaccctgacatggtctctgagctgcgtgccattcagttcagtgctctggttggctcctgccttggtggcaggaggttgggggcagggaggagcagctgccctcctgtcccctaccttggcctcaccatcccatcccctgcccagagtgatcggggtgagtaccgcacagaagagggcctggtaaagggacacgcgtattccatcacgggcacacacaaggtaagtgtcccccatgggtggggtggcaggccatgtccaggcatcacccccactgacgatgctgccccaggtgttcctgggcttcaccaaggtgcggctgctgcggctgcggaacccatggggctgcgtggagtggacgggggcctggagcgacaggtgggatgggtctggggtgggtgtggggctggaccccacctgcccgcccctcacaccacagtctctccagctgcccacgctgggacacactccccaccgagtgccgcgatgccctgctggtgaaaaaggaggatggcgagttctggtcagttcgtcagggtcccagctctgcctctgggagggtctctgccaaggggttcagggagggcgagccccagttgaaggatgggtcctaatagggagaaactgtgtacatcggtggtaattttggggccaggttctattttgggaaatcaaggaagaattggtagtaatattagagaacctctgattggagtgggtttaaaaaagtagtaatatgaggggaatttgaaggcctagttatctgtggaggattgaaagggatgggcagtatttagggcaatggaggaaggcttggtgatatttggggcatttcttgagatttggcaatgttgaggggctgaagggtacttgttggtaatttagagtctgagggtcttgctatttgggggttggtggcaatttaacgatatttgggggcagcttgtgaatcttggcgatttgtggggcatgtctgaggacttggaggaatttggcagagctagaggcccaggcatttggggttcatttctggagcctgaagggtatttgacaatatttaagaaatgtgaggggctttgggatctgggagtcatttccgggatcttgggaccccctcgaggtggggccgggcagggtctgactgggccaccgtgcaggatggagctgcgggacttcctcctccatttcgacaccgtgcagatctgctcgctgagcccggaggtgctgggccccagcccggaggggggcggctggcacgtccacaccttccaaggccgctgggtgcgtggcttcaactccggcgggagccagcctaatgctggtgaggcctgaggggccctgagaggcttcctggggtggggggcgctgtggccggctaggaaacccccttttttcctcctcccttagaaaccttctggaccaatcctcagttccgtttaacgctgctggagcctgatgaggaggatgacgaggatgaggaagggccctgggggggctggggggctgcaggggcacggggcccagcgcgggggggccgcacgcccaagtgcacggtccttctgtccctcatccagcgcaaccggcggcgcctgagagccaagggcctcacttacctcaccgttggcttccacgtgttccaggtgaggtcctgggcaaagctgaggctggagggaacccggagggtggaggggcggggccgggccaaggagcgggggaggcatggaggggcggggccagtgggaagaggggaggtgtggagggcggggccaagggggaagagggggagtggtggaggggtgggactgaagaggatcggggaggaggggaggagtggaggagcagggccaagagggggcggcgctgggaggggagtagggggctagtagggctggggggccaggtctcagaggggagagggagctaagggaatgagagggaggggctcagggacagacagagggacgaggttagggacagagagaggctgggggttagaagggccagaggggaccaaggatacagagaaggcgctgggagcgcagatggggaaggaagagttggggaggggtcggcgagggcctgggtcggggactgcggggcaaaggttcaataagggtctaataggacgaagaaggagggagagagcacagaggtgagaaggggcagggaggagaccctgagcggcggccacctctcccctgccccgacgccccttgctcttgcttctttcagattccagaggaggtgagtctgggatggggtcaaccggccctggggcttggtcaacctgccctggggcttggtcaacctgccctggggcttggtcaaactgccctgggggtgggggggcagagccgggtccgggggcaggggaggcgtggacaggggttaggcagggtggacggggcgcgctggagggtgcggggatgaagggccgggggtgagcctggtccgtggtcatgccgccccgtccccagctgctgggcctctgggattccccgcgcagccatgcgctcctgccccggctgctgcgcgccgaccgctcgcccctcagcgcccgccgcgacgtgacccgccgctgctgcctgcgtccaggccactacctggtggtgccgagcaccgcccacgccggcgacgaggctgacttcactctgcgtgtcttctccgagcgccgccacacggccgtgtgagccccgggcacccaaatccgaccccatccctgcctagacaggccccgagacccccgagacccccgagacccccgagacccccgagacccccgagacctgacctgccccgcccccagaacccctgccccgccccgccccgcccccagaacccccgccccgccccgcccccagaacccccgccccgccccgccccgcccccagaacccccgccccgccccgccccgccccgccccgcccgcagaaccaccgccccgccccgccccgcccccagaacccccgccccgcccccagaacccccgccccgccccgcccccagaacccccgccccgccccgcccccagaacccccgccccgcccccagaacccccgccccgcccccagaacccccgccccgcccccagaacccccgccccgcccccagaacccccgccccgcgaggatgagcccagggctccacggtccctacctagaccccacgcgattcctcacctgagaccccgtcccacacagccccagctggggcaaacagccccctccccacttcccatctgtaatttgcagggagatcgacgacgtgatcagcgcagacctgcagtctctccaggtggggactgttcctggaggggcggcatggggcggggatcttggccagcgctaaacttccgccatgcggcagggcccctacctgcccctggagctggggttggagcagctgtttcaggagctggctggagaggtgaggagggggattggactgagggggtatcccgctgcggcctccccttggggaccccccttcccccaccccagcatctcaggtgtctcattttgcttgctttttcctccctccgggcttaaatctcctgaccttttcttgaaatgctcacagctcctccctgcctcagggccttgggctcagtccataccctctcccaggaccaccctctccctcctgacacctccagccaggctcaggtctcatctaaggtgcccagccctggaagctctccctgaccacccccctgccccaggccggtctgctggccccccaccagcaaccacagcccagtgcttcccccgtcacagccctggccctgtggggacaggtctgtctcccccactcctggagctagggctctgaggctctgtcagcccctgccgtgtccctagcacagggcttggcccagagcagctggatgagtaaatggcctcacaagccctctttcctggactaggaggaagaactcaatgcctctcagctccaggccttactaagcattgccctggagcctggtgagttggctgggataggggcaggaggaggggtcttagccaggggtcctgcaaccagagccggtgccaccctatgtctatgaacccaccgcgctgctgggagttgggctcaggaagccagggctcagcctggcagcatctccctgcaggggatcttgtgtgggccccgtgacctgggccacggctgctcgcaagctccccttccgctgaaaggcaaggctgccttgagcacagactgggcaccccctgcctggatttgaatcccagctctgctaggcgcagcagtcactggctccctgtgcctcggcttctataatatgggactgacaacatcacctgcttaagggagtcacatccacccagcccttaaagtggtggccagaatgcaggaagtgctgtggtttgactttgtttttcctgtagccagggcccatacctccacccccagagagatcgggctcaggacctgtgagcagctgctgcagtgtttcggggtacatggggggcagtgcctgggtgagggagggagtggggaaggggacgttggggtctctcctccccttctggagagattgaccttaaccagatgcccccgacccccaacacagcatgggcaaagcctggccttacaccacttccagcagctctggggctacctcctggagtggcaggtgaggtgggagactgggcctcttcccagaaagagagaaacctttactaacagagacataggcaccctgtgggctatcaggtccccagggaacgagggggtactggactaggctgacttggagagatctggctgggatatccctgcccccacccagcctcagcttgtcctctgggtcattgctcttattcccattttacagattgggaaacagaagtcccaagtggctaggctgcttgctgggggtccacaccagaagaaagggagttgggatgggcaccaggctgtcttgcctgggaggccccattggcagccctcttcagggcatggagggcagccctgactcatccttcctgcccaggccatatttaacaagttcgatgaggacacctctggaaccatgaactcctacgagctgaggctggcactgaatgcagcaggtgtggacagggtcctggggtggtcgtggggacaggacctgttctctcccatcccattgtctccaagtccccctgctcagctgtggccgtctgcactgtggccatccacaggcccacaccttagcttgttgccagtccctggcaggggttgggtgaccctgaaagaggccaaataaggaaggagaagggcaaggggcgtgtgtggggtggggaggacatgaaagggggatgtgcctggtaggggttctggggcagggagaggcccctccaggaaggggaagattaggagctggtatctgagagggtctggcccccagggcagcatggtagaatgttctggattctggtgcaccggggttggaatcctcactctactgactccaggaggggccctgggcacttgacttcatctctttgagcctccattttcctctctaaaatggccagggcctggtgtggtggctcacacctatggtcccagctactcaggaggctgaggcttgaggatggcttgagcccgggaggctgaggctgcagtgagccgtgattgtgcctgggtgacagagcaagagcctgcctctcaaaaaaaaaaaaaaaaagctagtacacagggtggtgaggagtcgtccatgcactgcagggcatagcacttagtgattggagaatgcagctttcattaccaaaagccccaaagagagccggccaatggcctctgctactaggctgagttcctcctgatgagctggaacaagcccagcacaacatcctaaccaagaaagagagccagagagaaaggctttccatgggctccaaggcagatgagacagtacagcactgtgaccctcatgtggaggggatttggagagtgggctggggtcagaacttggagttcccagatccccaaccccactctggggcctgtctgccaccacacagcagatggagccacagggagatgggggctggggtgactgtgatggagtcggagagccagagggagagggtttgggtgtggctgtgagtgtgagacccagagaaggtggtcaagtgtccaaaagagccagccgggcgtggtggctcacgcctgtaatgccagcactttgggaggctaaggcaggcagattgccagattgcttgagcctaggagttcaagaccagcctgggcaacatggcggaacccccgtctctactaaaactacaaaaattagccaggcgtggtggtgcgtgcctgtaatcccagctacttgggaggctgagacaggagaatctcttgaacccgggaggtggaggttgcagtgagccaagatcatgccattgtactccagcctgggcaacagagcgagactccgtctcaaaaaagaaaaaagaaaaagcccaagtcaaagggggagaaatggggtcagagacagccaaggattgggagacgtggggcagagagggagaggctgggccggagatagacaggagtggaggtgagggagcaaggactcacagcaggtggcaggtggcaggcttgtgttcacgcatctggcaccagtgagtgcctgttacatgccaggagttattccaggaagaaggaaactgataaagtgcccttgagaatttctcaaacgggaactcctgcagtggcagctgaggggctccagcgccttctcgggtccttccaccccatctggctgggtttccccatagccctgggcatggcagcctccacccctatgcccgagggcagatgaatgccagagggagtgacctggggcaggtcacacgggcaggaagaggctgcaggccacctgccctcctgttaaaacagcacctggcactgggcacagcatgaaatggcacttacttggtagatatttgtgaagagaatgaacacacagaatgggggtgaagatgggctttggaagcagcagaagcccatgaaacggtacttggaactgggtttgtctggccgtgtgggagacaaaggtcatcaggcacaaccttgcatctcagaaggggtcaagaacccattgttttgggtttttaaaagcctccaatgagactccacagcagacatggtttctcagctttagaaatcgcctctgaggtagactgtaaggaaactgactccatatgggattgactatattttttgctgcacagaaatatcctccagtgcccactggcaaggagaaagccccacaggatttaaggagtaacagtacccacacatcgagtcacgtgtcagacgctgtcctgagcgttctgtcttcacacaccctatggggtcggggctgtcttagtccgtttgatggatgaggaaacaggcccagaggattgaagggatcagcctgtactcaccctgccgggatggggcagagttggggtgtgacaccctgtggcattcatgtcctccctgaggaggtggggtggggatgcaatgccaaggtgggttccctgtgggccactgggctcagaagcagcctccccctaggcttccacctgaacaaccagctgacccagaccctcaccagccgctaccgggatagccgtctgcgtgtggacttcgagcggttcgtgtcctgtgtggcccacctcacctgcatcttctgtgagtaccaccccggcatggtggggcatggggggaaggggtacggggactggtgggcactcaccctgcccctctctgcacaggccactgcagccagcacctggatgggggtgagggggtcatctgcctgacccacagacaggtgagccaggtgggagggacagggtggctcaggctctgtcctgcgagctccctgcctcaagccactgtcttccttctcttccttagtggatggaggtggccaccttctcctaggatctccggatgggcgcacctgctgctcagggcagggttgctgagcaagaccacctccctaggccttgcctggcatgggtgccactctctctggcatccacctgtctggggctagtctctggccctcactgctcacggccgggtgaccactctggcctgcgtactcctcactcagaaacaagaacagcgacagcccttctcgagcagatgacacgagctagtccacgttgacagcttaagacagtgctagctctgccctggctctcctagaaggtggaggacagacacaggagaaataaaaaaagatgatgctgcaggaatccttcttaaaaatattacatgttttattatcctgtccccagagggtggtttatccagaaaccaagaaaaaaaatcaatcagaataaactcaaaaaaaaaaggtagggggagcaaaaccatcaaccaccaggcagccaggccatcagcccacctccacctctggagggtccccagagacccacgcccgacgcagacccggaggagcatcagcaaggggcccgggcagagaatcggctatgtcttcattatgagagcaggagagacggcagagatatgttgctaggtgaatatatatttatataataaatccgtaagttaataaagtaaatagtaattctctgaaagtttttaattctttcttttttatagtttttttgtttttgtgattttttttttttttggtttttgttgttttgtgttttttttccttttttttttttggttcttagaaaatctgagacacgtgaggccagacaaagcaag

SEQ ID NO: 292 - DNA, 14251 bp, Homo sapiens
  source 1..14251: mol_type = genomic DNA; note = NW_014040929.1:c154078-139828 CAPN12 [organism=Homo sapiens] [GeneID=147968] [chromosome=19]
actgacctccttcttggtgctctgacagcggcagccggtcctccctcagctctgcccgccttctctcctgctgctggccaagcccattaagctgctaccttggccacaactgaaggccccacgccctgggaagaaagctactgaagaggcgtccctgctccccagcaccccaaaccatcaattaatattaacgagggaaggctcctcattgcctaaagaccccactggggctccaatggaagagaggccccgcccccgtgactcaggaggttaaagggcctggtgccggcttgtgaggccagtgtccagatggcatccagcagtgggagggtcaccatccagctcgtggatgaggaggctggggtcggagccgggcgcctgcagctttttcggggccagagctatgaggcaattcgggcagcctgcctggattcggggatcctgttccgcgacccttacttccctgctggccctgatgcccttggctatgaccagctggggccggactcggagaaggccaaaggcgtgaaatggatgaggccccatgtaaagtgtggctggggtctgggctctggggtctgagggaggaggggctggaggcatggactcctgggtctgaggaaggaaggctgggggcctggactccctggtctgagggaggaggggctcgagacctggactcttaggtctgagggaggaggggctgggcctggactcctgggtctgagggaggaagggctgggcctggactcttgggtctgagggaggaggggctggggacctggactcctgggtctgagggaggagggggcttggacctggacttctggatctgagggaggagaggccaaggcctggacacctgggtctgagggaagagggggctggggacctggactccggggtctgagggaggaggggctggacctggactcctgggtctgagggaggaggggctggggacctggattcttgggtctgagggaggaggggctcgggacctggactcctgggtctgagggaggaggggctgggcctggactcctgggtctgagggaggaggggctcgggacctggactcctgggtctgagggaggaggggctgggcctggactcctgggtctgagggaggaggggctcgggacatggactcctgggtctgagggaggaggggctgggcctggactcccgggtctgagggaggagggggctaccatgggactggctcagcacaacttctggagacccagggaagccatgctcctgcccacaggcttccaggcctttcatgggcttggaggccctcactcctctggatgagacctttcctcgctttctcaggctgaggcctggaatcccccaccacccacaggagttctgtgctgagccgaagttcatctgtgaagacatgagccgcacagacgtgtgtcaggggagcctgggtgagaccctgaacccacctggagtcctcagatccagctagtttcagctgagatcctgacagctccatccctttgtccacccactcccggcccctggatccctcctcagtctcttctctccctaggcctctctctccctcctccctccttccttccttcctttttttttttttttttttttttgagatggggtctcactctgtcacccattctggaatacagtggcaccatcatagctcactgcagccttaacctcctggactcaagcaatcttcctgcctcagcctcccaagtagctgggactacaggtgcatgccaccatgcccagctaatttttaaattttcttgtagtggagtcttgccatgttggccaggctggtcttgaactcctaggctcacgtgatctttctgccttggcctcccaaagtgctgggattagaggcatgagccaccgcaccaggcctccctccttccatcctcacctaatcctggcctctcctcccaggtaactgctggttccttgcagctgccgcctcccttactctgtatccccggctcctgcgccgggtggtccctcctggacaggatttccagcatggctacgcaggcgtcttccacttccaggtacagctcagttcctctgcccatgcctccgtttcccccatggtgacttggtgatatggatttttctttttttttttttttgagatggaatctcactctgtcatccaggctggagtgcagtggcacaatctcggctcactgcaaccttcgccccgcccccaggttcaagcaattctctgcctcagcctcctgagtagctgggattacaggcacccgccatcatgcccagctaattttttcttatttttagtagagatggtatttcaccatcttagccaggctggtctcgaattcctgacctcgtgatccatccgcctcggcctcccaaagtgctgggattacagatgtgagccaccgcacccggccagccatatggatttcatagttaacgttgacttggggctgtaattcctgactctgggactggcacagcagaggcagggcccaggcagggttggaggttggaagccgagtccggccctgcatcttctcccaccagctctggcagtttggccgctggatggacgtcgtggtggatgacaggctgcccgtgcgtgaggggaagctgatgttcgtgcgctcggaacagcggaatgagttctgggccccactcctggagaaggcctacgccaagtgaggaccccagttccaaccagctgcagccctaagtccccacagcaggcatcaagccacagggggacccagagtcccccaagctctgcaatcctccaaacaccccaccaagaatcccaaaccaagtgacaaccgccagaaccctcatatcacaacatcacctgagcaacttcatgttttttttttttttctttttttttgagacggagtctcactcactctgtcgcccaggctggagtgcagtagcgcgatcttggctcactgcaacctctgcctcccaggttccagcgattctcctgtctcagcctcccgactagctgggattacaggagcgcaccaccatgcctggctaatttttatatttttagtagagatggggtttcaccatgttggtcaggctggtctccaactcctgatctcaggtgatccaccttccttggcctcccaaagtactgggattacaggtgtgagccactgtgctcagctgtaccttcaaatcttaaacccctctctccatcaatatttcacacaaaacattcctggagacccccagtcactcataattcttaaggatcctgaaatctcatatatcaggccctggattcaccaaatctgggatttatcccctcgggtgagctgtatatcttagattgtctctcctggtccattgagaaatctaaagcacccccaaaatattgggggtcaccctgggaccctcaaatctttgccttttccccattctgaggctctgaaattcctgacaagcccccatagggatgatcccccaaagcggacatctaccagaggttcaaggtttcagacagcaccaggactctcagaattctaacacagctctcccatgccccccaccaaaccgaagtcctggtcaccccaaggaccacaggcccaatctccaagggcttctgtatgtgccacagttccccccgtcaagagtctgaattttttttttttttttgagatggagtttcactcttgttgcccaggctacagtgcaatggcgtgatcttggctcactgcaaccttcgcctcccgagttcaagcgattctcctgcctcagcctcccgagtagctgggattacaggcatgtgccaccacgcccagctaatttttgtatttttagtagagacggggtttcaccgtattggccaggctggtctcaaactcctgacctcaggtgatccacttgcctcggcttcccaaagcgctgggattacaggcgtgagccaccatgcctggccaagagtctgaaattgttttagctgggtgtggtggtgtgcacctgtgggcccagctcctcgggaggctgaggtgggaggaggatcgcttgaacccgggagtttgaggctacagtgagatgagatcacgccactgcactccggcctgggccacagggtgaccctggaaaaagtctcaaaacttcaggaatttcccctggggattccacaccctgagacacaggcccctgcagatcccagggcaggggtgcctgagacgcttgtacttgcctcaaccctcaccccagatctgcccccacaggctccacggctcctatgaggtgatgcggggcggccacatgaatgaggcttttgtggatttcacaggcggcgtgggcgaggtgctctatctgagacaaaacagcatggggctgttctctgccctgcgccatgccctggccaaggagtccctcgtgggcgccactgccctggtaagagacctggactcgcatgcggaacccccaccaggaccagagcacagtcaggggtgtggtggggtgggcggagtgcttcctctgttctctgcttccgttactggcttaggctcgctcataaatctaactagtcaaaaataaattcatttgctctcatgaatcaggggcttcaggcacagctggatccagatgctgagggtgttgcaactatgtttatttctcattctgtgttagtgtcactctcagccaggctctcccctcatgggcataaaaggatcccccatagctgcaggtatctcctaccaccctagggtttatttaaaaaaaaaaaaaaaaagtgcctctttctgagaatttcagtaaaagtcccaggattgattctcgtgggcttagcttgggtcatgtgttcatctgtgaccccatgacacactcattcattcactgagttggtctaactccttcactcattcatttacttaaatcctctgagttactgcttctctttttcttttgtgtctgtttctctcttctgtatctttctttgtctctgtctctgtctctctactctttccatcttttttttttttttttttttttttgagacggaatcttgctctgtcacccaggctggagtgcagtggcacgaccttggctcactgtaacctctgtcacccaagttcaagcaattctcctgctttgcctcccgagtagctgggactacaggcgcccgccaccatgcccagctagttttttgtatttttagtagagatggggtttcactgtgttagccaggatggtctcaatctcctgaccttgtgatctgcccgcctcggcctcccaaagtgctgggattacaggtgtgagccaccacaacaggcctctttccatctattttgtttgtttttgtttttggaggcagggtctcatctcactctgtcacccaggccagagtgcagtagtgtcatcatagctcactatagccttgacctctgggctcaagggatcctcctgcctcagcctccagagtagctgggaccactggtgtgcaccaccacgcctgttgaatttttaaaatttttgtagacttggggtcttgctatgttgcccaggctggtcttggactcctggcctcaagtagtccttccacctcgacctccctaagtgctgggattacaggcgtgagcccgtacctccatctccttttgtctcgtttccatctcccttcctctccttttctctttcgccttcagtcactaaccctgacatggtctctgagctgcgtgccattcagttcagtgctctggttggctcctgccttggtggcaggaggttgggggcagggaggagcagctgccctcctgtcccctaccttggcctcaccatcccatcccctgcccagagtgatcggggtgagtaccgcacagaagagggcctggtaaagggacacgcgtattccatcacgggcacacacaaggtaagtgtcccccatgggtggggtggcaggccatgtccaggcatcacccccactgacgatgctgccccaggtgttcctgggcttcaccaaggtgcggctgctgcggctgcggaacccatggggctgcgtggagtggacgggggcctggagcgacaggtgggatgggtctggggtgggtgtggggctggaccccacctgcccgcccctcacaccacagtctctccagctgcccacgctgggacacactccccaccgagtgccgcgatgccctgctggtgaaaaaggaggatggcgagttctggtcagttcgtcagggtcccagctctgcctctgggagggtctctgccaaggggttcagggagggcgagccccagttgaaggatgggtcctaatagggagaaactgtgtacatcggtggtaattttggggccaggttctattttgggaaatcaaggaagaattggtagtaatattagagaacctctgattggagtgggtttaaaaaagtagtaatatgaggggaatttgaaggcctagttatctgtggaggattgaaagggatgggcagtatttagggcaatggaggaaggcttggtgatatttggggcatttcttgagatttggcaatgttgaggggctgaagggtacttgttggtaatttagagtctgagggtcttgctatttgggggttggtggcaatttaacgatatttgggggcagcttgtgaatcttggcgatttgtggggcatgtctgaggacttggaggaatttggcagagctagaggcccaggcatttggggttcatttctggagcctgaagggtatttgacaatatttaagaaatgtgaggggctttgggatctgggagtcatttccgggatcttgggaccccctcgaggtggggccgggcagggtctgactgggccaccgtgcaggatggagctgcgggacttcctcctccatttcgacaccgtgcagatctgctcgctgagcccggaggtgctgggccccagcccggaggggggcggctggcacgtccacaccttccaaggccgctgggtgcgtggcttcaactccggcgggagccagcctaatgctggtgaggcctgaggggccctgagaggcttcctggggtggggggcgctgtggccggctaggaaacccccttttttcctcctcccttagaaaccttctggaccaatcctcagttccgtttaacgctgctggagcctgatgaggaggatgacgaggatgaggaagggccctgggggggctggggggctgcaggggcacggggcccagcgcgggggggccgcacgcccaagtgcacggtccttctgtccctcatccagcgcaaccggcggcgcctgagagccaagggcctcacttacctcaccgttggcttccacgtgttccaggtgaggtcctgggcaaagctgaggctggagggaacccggagggtggaggggcggggccgggccaaggagcgggggaggcatggaggggcggggccagtgggaagaggggaggtgtggagggcggggccaagggggaagagggggagtggtggaggggtgggactgaagaggatcggggaggaggggaggagtggaggagcagggccaagagggggcggcgctgggaggggagtagggggctagtagggctggggggccaggtctcagaggggagagggagctaagggaatgagagggaggggctcagggacagacagagggacgaggttagggacagagagaggctgggggttagaagggccagaggggaccaaggatacagagaaggcgctgggagcgcagatggggaaggaagagttggggaggggtcggcgagggcctgggtcggggactgcggggcaaaggttcaataagggtctaataggacgaagaaggagggagagagcacagaggtgagaaggggcagggaggagaccctgagcggcggccacctctcccctgccccgacgccccttgctcttgcttctttcagattccagaggaggtgagtctgggatggggtcaaccggccctggggcttggtcaacctgccctggggcttggtcaacctgccctggggcttggtcaaactgccctgggggtgggggggcagagccgggtccgggggcaggggaggcgtggacaggggttaggcagggtggacggggcgcgctggagggtgcggggatgaagggccgggggtgagcctggtccgtggtcatgccgccccgtccccagctgctgggcctctgggattccccgcgcagccatgcgctcctgccccggctgctgcgcgccgaccgctcgcccctcagcgcccgccgcgacgtgacccgccgctgctgcctgcgtccaggccactacctggtggtgccgagcaccgcccacgccggcgacgaggctgacttcactctgcgtgtcttctccgagcgccgccacacggccgtgtgagccccgggcacccaaatccgaccccatccctgcctagacaggccccgagacccccgagacccccgagacccccgagacctgacctgccccgcccccagaacccctgccccgccccgccccgcccccagaacccccgccccgccccgcccccagaacccccgccccgccccgccccgcccccagaacccccgccccgccccgccccgccccgccccgcccgcagaaccaccgccccgccccgccccgcccccagaacccccgccccgcccccagaacccccgccccgccccgcccccagaacccccgccccgccccgcccccagaacccccgccccgccccgcccccagaacccccgccccgcccccagaacccccgccccgcccccagaacccccgccccgcgaggatgagcccagggctccacggtccctacctagaccccacgcgattcctcacctgagaccccgtcccacacagccccagctggggcaaacagccccctccccacttcccatctgtaatttgcagggagatcgacgacgtgatcagcgcagacctgcagtctctccaggtggggactgttcctggaggggcggcatggggcggggatcttggccagcgctaaacttccgccatgcggcagggcccctacctgcccctggagctggggttggagcagctgtttcaggagctggctggagaggtgaggagggggattggactgagggggtatcccgctgcggcctccccttggggaccccccttcccccaccccagcatctcaggtgtctcattttgcttgctttttcctccctccgggcttaaatctcctgaccttttcttgaaatgctcacagctcctccctgcctcagggccttgggctcagtccataccctctcccaggaccaccctctccctcctgacacctccagccaggctcaggtctcatctaaggtgcccagccctggaagctctccctgaccacccccctgccccaggccggtctgctggccccccaccagcaaccacagcccagtgcttcccccgtcacagccctggccctgtggggacaggtctgtctcccccactcctggagctagggctctgaggctctgtcagcccctgccgtgtccctagcacagggcttggcccagagcagctggatgagtaaatggcctcacaagccctctttcctggactaggaggaagaactcaatgcctctcagctccaggccttactaagcattgccctggagcctggtgagttggctgggataggggcaggaggaggggtcttagccaggggtcctgcaaccagagccggtgccaccctatgtctatgaacccaccgcgctgctgggagttgggctcaggaagccagggctcagcctggcagcatctccctgcaggggatcttgtgtgggccccgtgacctgggccacggctgctcgcaagctccccttccgctgaaaggcaaggctgccttgagcacagactgggcaccccctgcctggatttgaatcccagctctgctaggcgcagcagtcactggctccctgtgcctcggcttctataatatgggactgacaacatcacctgcttaagggagtcacatccacccagcccttaaagtggtggccagaatgcaggaagtgctgtggtttgactttgtttttcctgtagccagggcccatacctccacccccagagagatcgggctcaggacctgtgagcagctgctgcagtgtttcggggtacatggggggcagtgcctgggtgagggagggagtggggaaggggacgttggggtctctcctccccttctggagagattgaccttaaccagatgcccccgacccccaacacagcatgggcaaagcctggccttacaccacttccagcagctctggggctacctcctggagtggcaggtgaggtgggagactgggcctcttcccagaaagagagaaacctttactaacagagacataggcaccctgtgggctatcaggtccccagggaacgagggggtactggactaggctgacttggagagatctggctgggatatccctgcccccacccagcctcagcttgtcctctgggtcattgctcttattcccattttacagattgggaaacagaagtcccaagtggctaggctgcttgctgggggtccacaccagaagaaagggagttgggatgggcaccaggctgtcttgcctgggaggccccattggcagccctcttcagggcatggagggcagccctgactcatccttcctgcccaggccatatttaacaagttcgatgaggacacctctggaaccatgaactcctacgagctgaggctggcactgaatgcagcaggtgtggacagggtcctggggtggtcgtggggacaggacctgttctctcccatcccattgtctccaagtccccctgctcagctgtggccgtctgcactgtggccatccacaggcccacaccttagcttgttgccagtccctggcaggggttgggtgaccctgaaagaggccaaataaggaaggagaagggcaaggggcgtgtgtggggtggggaggacatgaaagggggatgtgcctggtaggggttctggggcagggagaggcccctccaggaaggggaagattaggagctggtatctgagagggtctggcccccagggcagcatggtagaatgttctggattctggtgcaccggggttggaatcctcactctactgactccaggaggggccctgggcacttgacttcatctctttgagcctccattttcctctctaaaatggccagggcctggtgtggtggctcacacctatggtcccagctactcaggaggctgaggcttgaggatggcttgagcccgggaggctgaggctgcagtgagccgtgattgtgcctgggtgacagagcaagagcctgcctctcaaaaaaaaaaaaaaaaagctagtacacagggtggtgaggagtcgtccatgcactgcagggcatagcacttagtgattggagaatgcagctttcattaccaaaagccccaaagagagccggccaatggcctctgctactaggctgagttcctcctgatgagctggaacaagcccagcacaacatcctaaccaagaaagagagccagagagaaaggctttccatgggctccaaggcagatgagacagtacagcactgtgaccctcatgtggaggggatttggagagtgggctggggtcagaacttggagttcccagatccccaaccccactctggggcctgtctgccaccacacagcagatggagccacagggagatgggggctggggtgactgtgatggagtcggagagccagagggagagggtttgggtgtggctgtgagtgtgagacccagagaaggtggtcaagtgtccaaaagagccagccgggcgtggtggctcacgcctgtaatgccagcactttgggaggctaaggcaggcagattgccagattgcttgagcctaggagttcaagaccagcctgggcaacatggcggaacccccgtctctactaaaactacaaaaattagccaggcgtggtggtgcgtgcctgtaatcccagctacttgggaggctgagacaggagaatctcttgaacccgggaggtggaggttgcagtgagccaagatcatgccattgtactccagcctgggcaacagagcgagactccgtctcaaaaaagaaaaaagaaaaagcccaagtcaaagggggagaaatggggtcagagacagccaaggattgggagacgtggggcagagagggagaggctgggccggagatagacaggagtggaggtgagggagcaaggactcacagcaggtggcaggtggcaggcttgtgttcacgcatctggcaccagtgagtgcctgttacatgccaggagttattccaggaagaaggaaactgataaagtgcccttgagaatttctcaaacgggaactcctgcagtggcagctgaggggctccagcgccttctcgggtccttccaccccatctggctgggtttccccatagccctgggcatggcagcctccacccctatgcccgagggcagatgaatgccagagggagtgacctggggcaggtcacacgggcaggaagaggctgcaggccacctgccctcctgttaaaacagcacctggcactgggcacagcatgaaatggcacttacttggtagatatttgtgaagagaatgaacacacagaatgggggtgaagatgggctttggaagcagcagaagcccatgaaacggtacttggaactgggtttgtctggccgtgtgggagacaaaggtcatcaggcacaaccttgcatctcagaaggggtcaagaacccattgttttgggtttttaaaagcctccaatgagactccacagcagacatggtttctcagctttagaaatcgcctctgaggtagactgtaaggaaactgactccatatgggattgactatattttttgctgcacagaaatatcctccagtgcccactggcaaggagaaagccccacaggatttaaggagtaacagtacccacacatcgagtcacgtgtcagacgctgtcctgagcgttctgtcttcacacaccctatggggtcggggctgtcttagtccgtttgatggatgaggaaacaggcccagaggattgaagggatcagcctgtactcaccctgccgggatggggcagagttggggtgtgacaccctgtggcattcatgtcctccctgaggaggtggggtggggatgcaatgccaaggtgggttccctgtgggccactgggctcagaagcagcctccccctaggcttccacctgaacaaccagctgacccagaccctcaccagccgctaccgggatagccgtctgcgtgtggacttcgagcggttcgtgtcctgtgtggcccacctcacctgcatcttctgtgagtaccaccccggcatggtggggcatggggggaaggggtacggggactggtgggcactcaccctgcccctctctgcacaggccactgcagccagcacctggatgggggtgagggggtcatctgcctgacccacagacaggtgagccaggtgggagggacagggtggctcaggctctgtcctgcgagctccctgcctcaagccactgtcttccttctcttccttagtggatggaggtggccaccttctcctaggatctccggatgggcgcacctgctgctcagggcagggttgctgagcaagaccacctccctaggccttgcctggcatgggtgccactctctctggcatccacctgtctggggctagtctctggccctcactgctcacggccgggtgaccactctggcctgcgtactcctcactcagaaacaagaacagcgacagcccttctcgagcagatgacacgagctagtccacgttgacagcttaagacagtgctagctctgccctggctctcctagaaggtggaggacagacacaggagaaataaaaaaagatgatgctgcaggaatccttcttaaaaatattacatgttttattatcctgtccccagagggtggtttatccagaaaccaagaaaaaaaatcaatcagaataaactcaaaaaaaaaaggtagggggagcaaaaccatcaaccaccaggcagccaggccatcagcccacctccacctctggagggtccccagagacccacgcccgacgcagacccggaggagcatcagcaaggggcccgggcagagaatcggctatgtcttcattatgagagcaggagagacggcagagatatgttgctaggtgaatatatatttatataataaatccgtaagttaataaagtaaatagtaattctc

SEQ ID NO: 293 - DNA, 86792 bp, Homo sapiens
  source 1..86792: mol_type = genomic DNA; note = NC_000017.11:c8965707-8878916 PIK3R5 [organism=Homo sapiens] [GeneID=23533] [chromosome=17]
agatgctgcggctcgccgcgcggctccagctggggcgcggtggtcccgacggtcacccgaatcgcagggagtcgccgctggagaggggctcggcgcccggcggggactgcaggtgtgtgactgggcggccagggcggatgcggagggcacgcatgggagctccaggcagagctggagcaagctggggaccgtcggggagagtgggctccgcgagcagccgccgcagcccgagggctggacagatcctgctatcttccggccccgtggacctggcccaccgcgggggcagcgggtctgcaaacctgcgctccagataaccccagagacttaaggggcgtcgcggggaccacttatcgttatccgggtaacctctgctgggcggctctgcgcagctgtgtcctcagcctcctgcctctgacacaggacgccctgtgtcgtagggtcaggtcccctgcccgctccagcggggaactgtccgtgagcgtgggcatcagggctcttgtgccgtcagaacctgggagtcatggaagtgcccgcgtaaggcgccctccgtcgagcctcactcagcctgctagttagccagccttgggcccagacgcggctgctgtcctagagaactgcacgctttctgctctcagaggatctgtgtttacacactggacatccccgcgtgactcgtgtgtgtgtgtgtgtgtgtgtgtgtgtgggcatgcgcatgtgcgcgtgctggcccatcccggcctggggtaaatacacaaaaagttcaggtcagtaggaggaaggagattgttcagaaggaaaaggaaggcgaggttaaagcagcaggatgtggtataaagcgagttaacaagactcggagtagagaggaggggtgggtttaggcagaataagggctaaaagtaggccaagcctgcctccaaggtcctctctggactgacaccctcgttttccttctgtgtcttctcatccaccccacactttccttcctgccctcaggaccacctgtaaggcactggctcccagagctgactgcaggtagggctctcttggagccaaccctacaacgtggctttccagggatgggatctggaatctgtagttttcaaaactttgaatgagctccttaagtgatgatgctgaagccgttgcttgggaaccatgcatgatgtggaaaagagacccaagttccaaccggatccagctgtgtgacctgcagcatcacactgtcccccaacccagcctcagtctcctgattcataaaatgggctgtcatactgacccatagagctgtgtggaattattattattattattattgagacagggtcttgctctgtcactcaggctggagtgcagtggcgtgatcatggctcactgcagccttaaattcccaggctcaagcaatcctccgcctccgcctcccaagtagctgggattacaggtcagcaccacggcgcccagctaatttttgtattttttgtagaggcagggttttgccatgttgcccaggttggtcccaaattccttgagctcaagcgatccgtctaccttggccttccaaagtgctgggattatagacatgagccactgtgcctggcccagtgtggaaaattaagtgaggcatgtatgatgagaacggctgcacgtgggagatgctccgtggatgtttgtagaacgctggcttccgtgtttcctcgttgtggctgtggtggtgtgggtctttgcctgtggacccgtggaagacaaagaagacagttttggatggtcaagctactttcttgcttcagggctccctcccctgctttttgaagcctcacaaaccaggactgtgagggcaggaaggcttggggtctttgtgtgctgagcctcattagggttttaagaacctccctcctttcatctctagcttacgagagggatgattcattatcttccctcctcaggctgcagtagaagcagacagtctctgcctccctgcttgcctttcctccctcccattcactgttgattattgccctcaagaataacaggttgcccagctactcgagaagcttaagtgggaggattgcttgaccccaggagttcgaggctgcagtgagctatgatcgcttcactgcgctatagcctggcagacacagagagaccctatctcaagcaaacagacaaacaaaaaaaaaaaaagaagaagaagaagaagaataggttggatgctaactggtggcactgggtgacaagagcatttggggttgatgttggcatgaggatgagaaggcaggggtgcaggctgctccatacccctgtgttagccatccatcaggggcctgctggctgaggagtgggagaggaggagagccaggatcctttttgcctgggtagcctagagtttggaagccccagcttgggttccactgagcactcaagctgtgctgacttggcctttcttcaaagatgctcatcccaagggactgagctgcgtggccctgtgggacctctgagaaccagaatgcctgtttggcctcagctggtgagctaaaagcctgaaccaatgtgttaagaaagaaagctggccaggcatagtggttcatgcctataatcccagcactttgggaagccaaggctttgaggccaggagttcgaggctgcagtgagctatgatcgtgtcactgcattccagcctgggcaacagagtgagaccctgtctttacaaaaacaaaaaataaaatttaaaaaacagagaaagctcctggaagaagaagatagagtgatccttaacaagtcaagggagaggtgtttaatttgatttttgagcctcagatatagatggggtgggaggagagaaaggaaagagtacatctgacttctgcccaaagggaagatgataccctcccgtagcaaacatatattacatagtaaaatatttcatcaatttgaagatgtacatattttcacattttagcactgaatgtgctaattgtatgaatttcactgaaatcaaggtgcattttactgtttatggcatcttccaattataataggcaacaatatttcttccttattgccacacaaaataacggtgcatcttacaattgatggcatcttagattctattaaatacagtgcactttttatagatttgggggatgtgttagcgatacacaggtccacacagaattatgttgttctcatagctttcatacattaatttttccagtagctctaccttctaagtatcagaacttttcattgtattatgttttaaaagaaatctttgtaaagtatgttgcttgcatttataaatgtagcatgttggatatgattgaataatttcttgaaattttcatcaaatggttctggcctgccattctcttttgtaccctgtgtctttttgtacattcatgcttcgttctctttcatctttctccctgtccttttctcctttggctatgacttcatggtgttgggcactgtgctgagtatgtcatgtcctttaatcttcacagtcacactctgaggtagctacaattattgcccccatttcacatatgagaaaaccgagggccaaggccacacatttaggtggtgccagagctgggctgactctggcgtctgctcttaaccagaattgaccaagcctaagtggtggcctaggtgttcctgtgggtgtcaagcgcatgccccatacaacacaatttgggggcatgaattgtggccacgaggtgcttttgtttggttgcttgcttgtaggatagcagctaggttctggatagttgaggttatcggttaagtgacttccagataagtgagtcacagctacagcaagttacacccaaaagggggttgggggctgatgaatgggaagaaatggatgactttcatggcacagagaagatcctgggtccttcttgagtcttctgagtctatcaagtggcttgctagactttgggccctagagttcggcatccacaggagactcctgcttccatggagcttctctcctgctgccatggtgatgtaagattacacatctgcgtgagtcacttttattttcatttttttttaaattattattttttagacagagtttcgctcttgtcacacgggacggaatgcagtgccgtgatctcggctcactgcaacctccgcctcctgggttcaagcaattctcctgtctcagcctcccgagtagctggagttacaggcgcccgcttccacgcctggctaatttttgtatttttagtagagatggggtttcgccaagttggccaggctggtctcgaactccagaccgcaggtgttctgcccgccttggcctcccaaagtgctgggattacaggtgtgagcaaccgcgcccggcctgcgtgagtcacttttcagctgaaaacgctgcagagctgcatgactttccagagacggtccacacccaccacccatcccaggtccacccctccttcttcctctcctgtagcctgaggagacctctgcacctttgcgtgtgctgttgcttctccccagattgctcttccctgcctctgcctgcctggtgaactgccagttcctcctagaagcccagctcaagcctcatcttctgaatccttccctgatgctcttcctttgcccttcagcactgaccgccccctccttcttcattgtgctttctatgtcttcgcaccatagcactgaccgcccaggcctacagggggaccagtgacctggcacagctatggcctgctcaccctagccacttgatgttcagcatggcgtcaggctgtcactctgaaactccctgggatctcacaagcaaggcgtccatgcacagcaacagcagaagttgccagatcacaggatggggtggggggctgggggtggggcccggagggagtggtgtgcttttcattttcatgtcctcaggagtcttgttgttgttgttgacctaggcaaatgagcttgtgtggtttccttgttagagtgcagggctggggtgtgagggctgaaggtggctcacatggagcccagttcctgccaggctccccaactcctagccacgtgatctttgctaagtccatgtacctctctgcatgtcagtttccccatctgtgggatggaaatctggcactcaatgctttatgtggcccctgcctaatcgctaacatttcacttgttcattcaacacttctgcatggagcgcaccttctgtgagccaggcatgtgccaagctctgaggacactgagcaagacaggcaatgttcctgccccgtggaactcacagtctcatagacaagacatgcaacacacatattgttcaattacaattgtgagaattatgggatactatgagattatggaaagggaactcaatatagttgaggggttaaggaaaggtttctctgaagaagtcatatttgagttgagacttgaaagatataaagtaaaagagaatcataacaatcataatactaatacctaccatgtagtgaatacttgctaagggctttttgagtgcattctctccagcattcttttcaacatctcatgtgtggggtatgtgggctccctctcctgtgaggatcagatgatagcactactggcaagcacccttctcagtgtctgacacagaccagggactcgttcccaccttcctcacccctccccgtattccaaggtccagcttatggacgctgaggtcatcaatactaatgggggggcctctcttctcctttccactgaccatcaccagatagcgtgtcccgctcaggagccctctgcatttgtgcatctccatcaacagctcagggagttgagtccccaaccacagaaaactccaccgtattttttgccaggccttcattctgttcctcttaggagccgctgttctgggagggttcagaagccctgatctggattgtctgtctcatctaggaagtcacttgtccagctcccatatccttcttccaccaaagctttctccccagaaccatgaagtctgtgcagacgtatcactgggtttttggcctgagcatttgttcctgcatggcttggtggtttggcccttttcaggcaaatctccatacagccacttccacccaacctggccgagccagccagcctcctgggggagcgttctgcaaccagatcacatctacactgacaactcttcgaggagagtctcaaactctctctagatagttggcccctttgaaaaactgatgaaagcgaaagatcatctctctcgtcacccataagcacacatgtacatgtgaatgcatgtgcacacacacacacacacacacagtctctctcgctcaaagttttgcataaaattctaaggtcttcttggatctctgcagttcaccaagggacccaggttaataactcctgttctagaaaacatgactttctgtgtgctgatttctttggattatccccagcacagctccctgtgggaggaagctgttgtcagaagcaagctgggggtagtgatggataatgaaaactgtgtagaggacactggtagcgactcactggtgagaaccctgaagcggcgtgctgggggccatctcatgactgcacactgggccactgctctgttgttggatttctcaccaagttttgaattcagcccatttccaagatgattaaagagtgaaagagaaggccctgcgtggtggctcacacctgtaatcccagcactttgggaggccgaggcgggcagatcacctgaggtcaggagttcaagaccagcctgaccaacatggagaaacctcatctctactaaaaatacaaatattagccgggcgtgatggcacatgcctgtaatcccagctacttgggaggctgaggcaagagaatcgattgaacacggaggcggaggttgtggtgagccgagatcgcgccattgcactccagcccaagcaacaagagggaaacttcatctcagaaaaaaaaaaaaagagagagagaaaaaaaaaggtgtctgtggccacacacatgaatataaacagtctacggatcagagaggcatgcatgactgttcctttgccacaaaagtctgcaacctcccaagttcccagggacaggcatgagcttggggctttgtttctctgatgtggtcatagttctttagaaccagtgccttgatgtaaagtgccatgtgtgaaggacgttttcttcaattcctcctttgtaaggatttttaaaagcatgaatggatgttacatttgtccaatacttttttaaagcatctgcaaggaaactcttgtactctttcaccttgtgatagatttatgtgacacattagatcattagcttccacatattgagccctctgcatttctggagtaaactcaattgggtcaaggtgctttattccttcagtactgtgctaggtttgatttgctgtgattttctttaggatttttttttttttttttgagacagtctcactctggagtgcagtggtgcgaacctccacctgccaggttcaaacaattctcatgcctcagcccctgagtacctgggattacaggcacccactaccacgcctggctaatttttgtatttttagtagagacggggattcaccatgttggccaggctgctctcgaactcctggcctcaagtgatccaccagccttggcctcccaaagtgctgggattataggagtgagccaccgcatcccacctttctttaggatttttgcatgaaatgaatttgacctctattttccttttctgtgctgccgttgtcagtttttgatatactgactttgcaaatgattttggaagcacgttaccttctcccacgccctgtgacagcttatagagcggggaatgagctgctccttggaagctgggagaacggctccagtcttgaggtcttccactgtgggattcttggcttcccactccccaagcttccttctcttctctcttcctcagtcctcccaggtacaaatctgtaaacctcagagctcccaggctcatgcccgagagccatctttgattcttggcttccaatgttcagccactaggtcccatgggtccttactttatatgcccttcagctaacaagcatgcctatttccacactgaactgggcatatccaccttgagtgaattccaggtgctgcatttggaggatgctgagcaaccacttcatatccagagataggtgaccaggatagcgatgacagaatatgaagtaattaagaagtagcgaggtttttctccaagaagagaagacagaggagaagtagtatctgtcttcagatgtttgacgagcagtgtcctttgaaaaaggtgaagacttctcaactgggtgtcattctctggaatggaaaagggatgacagaaggaaaattgtaagaaaatagactccagctcactagaaggaagatctcagagaaattcagagcaggtcaacagtggaatgggaggcttcgtggtggctagtttcccgttggggaagtatgcagggaaaatacatgttatatattatggaaatgatagccgtgagaaaggagaccaatatagcttatttttaaagagcctgtagttctctaaatcatggtggccatgtctgactggttgtgtaaacgctggttgttctgagaacatgatttgagtttgagtagttcagtgaccttgaataaacaggtcccaaagctgggcagtttgctcagaaaccccacagccctgcttcacagcccgttctccgcagcagaagcaccttggctgtgagaaaaccatagccattcatggatactgggatcctcgcccacatcctctgctgggagcatgggcttttcttgaggtctcttgttcttggctccttctgatacttggtaaaataaactaattgaacaccatttcaaaattgccttcctccgtgagtgtcccagataagatcttggggccaacctatctcacctccaggttgagctgggaattgatgtcctcttgttcttggggttttcacgtcaatgtttcataggtctttgcactgtgcattcacttctgtaccatgttgagagtttcattttgagaaaacgaaaagctctgcgctctccttggcctgttattgtgcttaagagaacacagggggctgtgatgtgatgtacgggctacaggatgggaataggagatgtaatctctagtcctggcccctaattacttcctcatcttgctgagtctgtttcctcctggaccaactggactctatgattctgaccacctgggagttttcaaagcctgctctccaagagttttcttgtgggagctgctctgatgggctgagcagagaggggacctgctccttccctcatggtgccaccttatgacaggactcccagtgactatgagtccctcttcagacctcaatggcagaaacccaccctctagcccatgcttctgctggaaggcttcctttcaggtcactggtggctctggaatggcaagttccaatagtctcttcccaacctgcatcttttttttttttgaagtctccataaagtctgatgcccgacaaatttttgttttattttttatttttgagaaagggtctcactctgtcacccagactggagtacagtggcacgatcacagatcactgtagtgtcaacctccccaggctcagatgatcctcctgcctcagtctcctgagtagctgggactacaggtgtatgccaccacgcccagctaattttttgtgtgtgttttttgtagagacagggtctcactatgttgcccaggctgttctcaaactcctgggctcaagtgatctacctgcttcggcctccaagtacatgcgggttattttcacttgatgccctatttcaacttgagcaatatccagagcccaactctgcatccacaaagcaggcttcctgtgcagacttccccatttctgtctctgctgaaaccagactcccagccttgaaaccttggactcatctccgagtcctccctccatcttccttgttccccactccccagcccgttttgatggtgcttcctttctccatggctcttgtttctctcacttccccattgttctctctcctacccaatttggctttatttaccatatgcctctggtgggccttttggaccacaggctcttcctctcttcaccaggagattcttcttatgaaaacttctatgtcactgtgttcagatactttgatggcaccccactgcttagggagagtccagagtccttagtcttctgttcaggtttcgaagttgagtcccactcctttctccacgaatcatcacgctctcctccagccagactgcctgactcagttttcccaagacctaacgtgtgttcttgcctcactcatccccttcccaatgagggaagctttccaatcattttgttcagtgctgactctccagtgccttgcaggggccagcacttgtcattcaatcagtgcttgctgaatgagtgattgcctggtcgagcagccagcatggaagaggcccgggcctcagccttggatgactgatgatcgggcaggctgggctgctccccatctgagacctctgtggggttcggtcatcctcccctcaaggaccctccagacatatcactggtcttctgtgcacaactgcaagggcttcagacaccagtggctttgtgatccactgtgggacaaggcaggtgtcctcctctgggctgcttcagacccctgagcctctggcaaactccagatgcaaactccaggtgctgagaaccctctgcttgggaatcttttttttttttttttttttgagacggagttttgctcctgttgcccagactggagtgcagtggcacaatcttagttcactgcaacctccgcttcctgggttcaagcaattctcttgcctcagtctcctgaatagctggagttacaggtgcccgccactacaccaggctaatttttgtacttttagtagacataggagtttcaccatgttggccaggctggtcttgaactcctgacctcaggtgatctacccgcctcggcctcccgaagtgctgggattaaaggcatgagccaccgcacccggcagggaatcttcttaccaccctcccatttagtcagatttaagatgagcagttagctaagtctgagagcaggggaagccctggggaaccttcccccaacaagccactcccagtctggtgacagcttctgcataagagcctggggaagtgtctgtttgcaacacggtgtttacaaggcagaggggcttcctgtcccgcccgtgccaggctgtggggcaatcagggcaatcaggagctgtgttttcagagggagtaaggcgaagaaactgttgagggatttctggagattcttcgaacatcaccagggggtgcctggcctacttgaccctggaggacaagggagatgtaaaattcaggtttaaaaattgggagcaaattaaagtattactaactgattaatttgcatatggtcctttgcaccttgcaaaaatacaaagcatttttcacaaaagtagccctccctctgagtctaatgtggaaatctctagaacaaaaaacttccttttctcactcccaagccgggggagcttgggtcagagtaagcaaggacaaagttatttctttttcttttttctttttttctttttttctttttttttgcagaggaaagagcactttctgggggaaggggagagcggtggaaattactccccaggagcgataactcccccattccaattcagagctcatgcatgatggagagtgacactctctccgtgcatatctgagaaatgggctgaggaggctgatactggaccctctgcctcctccaaggactgtggcagccctaggacacacacctgccaacctggaaccattgccatggctctcacagaaacacgagcttgtgtccagagcccttgttgtctcttgggcctcagtaaaagtatctggaaaggtcttggaaggtgggttgggctttcttggccctggggacaggaatatagtccacttcccctcttcagtgggtgggtaacccaagagtgggtgatcaaaagatggggctcactcttaccacctgacttctgaagacctgaggttgtttttagtggtgaatccatcctctgaacccatttgatgccaaatgtgagctggccagtggtagggccaaggtgcaaaggctcctgtgagttcaacacattagcctgtgggtcacggtgctatgatagctgttggtgtgaggggatttgctttactgtgcaaaacaagagaaaaataagggtgtggccctttaaagaacttgctaataaaaacctcccacttgagagaggcagagcttggcctaaagggtggggttgaggagggagatgatgggtggagttgaacaaggactagccttatgtaagcatcaagaaaacacatttctgaactagtgaggctaagtagctcaggtccaaggcatgtgagacatttgggagttggttcagaaggctgttctagagggtacttgagttgcctagcagatagatggtggggacttgtggaagttgatggaagcaagccctcaatgctggaccatgtaatgggtgcaatgaataaagaaggaggcgtccaacttcccattccctcattctcccaactgtggtccaaggcactgtgctattacagtccagcactctcctctgagatagatgtagctggtcaagaatgctccttcttggaccatggctcaactctgccaggttcccatcaaggctcctgtccaggggctgttgaagggattgggttgcagccatggtaatcatatgataacggccacagttgcaacttgggtccagagctcagtggcctcagagggtcccatctcccctcctccccctacctttcctgcattttcaaagctgcaggcttacttctcgttggctgtgttactccgaagatctgctcagtagatggaggtgaaaatgttatttttcactaaaatatctgaccttgtttaaggagaaaaaattttgtaataatgcccataatttattctcatggtactttattgaccagtaagagattacccctaattcatttataaaaatattactctctcgacttaagtcgcttcaatactaactggccagcccagtttgctccaatgagtgtctggcctttaaatagctcaatccctgctgctctccctagagtaggacacacagaggtggggactccatgtagaaaacctgtgctccagaagtcatgtctgtaggatgacttcaccttttatgaggtgtctctatcaaggaaattttgggtataccgtgtggtctttaagtcagaccataaaccatattctacaaattcaggggaaatccaccagctgtaactaaatggcatagtaacagaaaaacaaaaacatcatttctcttattaggtaactcagcattcactgaaatattagttggtctactggtttctctgttggattggagagacccaaaataatagtggcttaaacaagatagaggtttatttctgtctcaggtagcaagctgggcataagtgatccagacttcacatgacagctttataggttgggaaccaaggttccttttgtgtcattgctctgccttcttcaacatgtagctctcatctcatggtccataatggctgctctagcaattgccatcgcatctgcattccagctagcaagaaggggaaagggggaagggaagtgcatgcctcttccttctaaaagcatgacttggaaattgcacttatcaatgtctattcatattccagtagccagaatgtagtcatatggtcatacttagttacaagagtctgggaaacgtgatctaaaattcctaaaagttatatccccatagaaggaaggagaatagatatggaagaacaattttgagtctcatccacatttgaactttgtgaatcttcactgttacatagatgttctttatcccttctgttgtggagtaagcttgcctcctaagccctgctgaaaactattaataaaaaacagcatgctacaccaaaaggtcaaactaacccaaatgtccattaatggataaatggataaacaaaatgtgtatatacattcaattgaatattattgatccttaaaaaggaatgaggttcaaacacatgctacgatatgcatgaaccttgaagacattatgctaagtgaagtaagccagacacaaaaggataaatactgtgtgattccacccaaatgaggtagctagagtaaactcatagaaacagaaagtagattagaggttaccagaggctggggggagaagtggcggggagttagtgtttattgggtatggagtttcagtttaggaagacgaaaaagttctgtgaatggatggtggggatggttgcacaacattgtgaatgtacttaatgtcactgaactgtatacttagaactgtacgcacaaaactgtacacacacaacctacagaatgggagaaaatatttgcagactatgcatctgtcaaaggtctaatatccagagtctataaggaacttaaacaaatcaacaagccaaaaccaaataaccccatttaaaaacaggcaaaggacatgaacagacacttctcaaaagaagacgtacaaatggtcaacacacatatcaaagataatgctcattatcactgattatgagggaaatgcaaatcaaaaccttaacaagataccatctcgcaccagtcagaatggccactattgaaaagccaaaaaacaacagatgctggcgaggctgtggagagaagggaacacttacacattgttggtgggagcgtaaattagttcaaccactatagaaagcagtttggagatttctcaaagaacttaaaacagagccaccatttgacccagtgatctcattactgggtatattcccaaaggaaaatagctcattataccaacaagacacatgtactcacatgtgttcatcaccccactattcacaatagcaaagacatggaatcaacctaggtgcccattgatggtagattggataaagaaaatgttctacatataaaccatgaaatactatgcagccgtaaaaaagaatgaagtcatgtcctttgcagcaacatggatggagctggaggccataatcctaagcaaattaatgtaggaatggaaaaccaaataccatatgttctctcttacaagtaggagctaaacactgagcacaagtagacataaacatgggagcaatagacattgtggactctcagtggggagagagggaagggtgaggattgaaaaacctcctattgagtactgtgctcactacctggatgcaatatacccatataacaaacctgcacctgtatctaacataaaagttggaattaaaaaaatacttacaatcgtaaattttatattgcatatattttaccacaatcatgctataaaggaccaaaggcagggttctctggcattttaggagcaatgtccctacagatgaagctactcaacaccctttgggtgaggttatgaagccagtaatgaatccatctatctgtgttatcattcgtattttttacatcatcatgaaactatatagcaagacttgctcaaattcagatatgctgctattgtggctgttcttctattacctctttagtcagtgaatccattgatccctattggctgctggtggttcctggatctttcccttagcattcacaaactgtcttttaataatgtatagagaatgttgccaggggactggtggactcagacatgtactttaaaaaattccacttaaaaaaattgtttttaaatttttattttcatagatttttggggaacaggtagtatttggttacgtgagtaagttctttagaggtgacttgtgagattttggtgcagtgtacgttgtacctaatgtgtagccttttatccctcacccacttcccacctttcccctgctaagtccccaaaatccattgtatcattcttatgcctttgcatccgtatagcttagctcccacttatgagtcagaacatatgatgttcggttttccattcctgagttacttcacttagaataatagtgtccaatcctattcaggttgctgcaaatgccattacagaattctccctttctttttctgttcctcacgatgacgacaacattttctaatctgtctctgtctttctctgtctctgtctcttatacatctttcattttctctgattcttcaaagataatcggtagcagctccctttcacaacctcaagtttctttatgactctgagatgcctttattctcttctgcaatcctaaactcattttcagcagcaagcctccctatttggcatcagatgtttcaatatcggaccctttccccgcaatctacctttcaccctgtggctggtacaaccttccaaatccaaaagctgatgtgtcattcaccagctcgaaatttagcagtggctccacatggcgcttgagtaaacccttaagcacttagcttggcagataaggctgttcacagtctaccatgccagcccatgcagcatcatctcccagcgtgccccatgtcatgcctacccttcagtagggctgaactgccagcatttccctaaaggaaccatgctgtctcccgcctcttgcctcagtttattttcctaccatgagattcatgcctgaatctcacccagggcagctcctccttcctgaaatgttatctcgggagtcacctttttggagaagctttgctaatagacattctccctcctccaagttcctatggcacctgtcccatattagcctccactgggacacctaacccactgggtagtttctagtttgagagttattttggatggtgcttctctgaacttcctgttgcatgtccactgggcatgtagctaggaggcatatacctggggcctggagcatgctgaagttgagctttagggtctgatagagcatcttccactgggtatgttgtcgtaccagcgtacattccccgcagcagccgtgagggtttgcgtggcttcacatcctcacaacagtgcttttttttgcctttttcattttggcccttctgctgggtgtgtagtggtattgccttgtggtgggaatgtgcacttcccttctgactaatgaagcggagcacctctccacatgtttagtggccatttggacaccctcttctgtgaagcgtctattcaagccttttgtccagttttctactgggttgtctttttcatatttttctgttgctccttcacattgtgtagtgacctctcaatcctcctcctggccacgagctctgtgagatttctggacccccagtgcctagtgaagtccctcaaatagtagaccctcaatacatattttctgctgactaaataaaacatctgtgattcatgctttccagtgggttaaccattctccttacaatggtaaagcttatcatggtaaagctttagctcctacttataagtggaggaaaagatggaggcaacataggagcgcatttcggctttctctcatgcgtcggccactgtcttgagttactggcctgatttcttctggtttggactctgaaaatagctttacgggtcctttttgatgtatgctgcatttttctttttcttttcttttcttttcttttttttttttttttttttttttaagacggagtctcgctctgtcgcccaggctggagtgcagtggctcaatctttgctcactgcaagctccgcctcccgggttcacaccattctcttgcttcagcctcccaagtagctgggactacaggcgcccgccaccacacctggctaattttttgtgtttttagtagagatgggatttcaccgtgttagccaggatggtctggatctcctgaccttgtgatccaccggcctcggcctcccaaagtgctgggattacaggcatgagccaccgcacccagctgctgtatttttcttaaggcttgctttcatgatacgctcattctctctctttcgtatcaccttaacttggggaccttgattccatcttgacgtatgccccaggaagtcacactggctccttcacatttccgcctcttttctcccttgtgacactctctgacttgccttcagagcttaattttccattttctttccctgttaagccaccctctctgacttccagcctcttgttgttgttgttgttttaatagactagatacgcacggaaacaattcccagccccttggatagctgctttcataaagtctatgactcgcgtctgactatgtctagcattttcttccgtgattactacaaaccccagtcatgggtccttttctccccattttcctctcactgctatttcacaaagctttcattgttcttggtgagaattaaaggcagaagataggacagtaatcttcctcatcactaacttgaccttccaacagatgagatgaccgaggagcagggattcatttaagagcccggctccaacctaatcagctaccaagctgctatccaggcaaagattctgccagtcctaaaccttggctctaggttcattttttgatgcacacgagaaaagccgcatctgtatctcagtcaggcggggtgtgtgatcccatcccatgcgcttctctctcatcttccttcaaacctcttcatctttcaattcattcattcagcaaattatgtgccaggcactcagctggaccctcatggagctcacattctaatggggctgggagttacagaaatataatgagaacagtacaaaagcaaaatgtatcgtatgtccatgggtgagggagatgtgggaaaaagtaaggcaggaggcagccgagatggggcttgtcaggagtcctccttgagaacagaagaagggaaacaagtgaaggagtgagccaggcagacacctagaagaagagcactcaggcagagagaacggcaggcgcgaaggtcctgaggcaggagaggcaggagtgggctgctgtgctgctgtggtcattcgagtcctcagaacatggcggggcacatgctggcatgtgagcagctcagcatttgaaatgaagtgcagtgtattagtcatctttgcagctaccacaacacgcagcaaagcatcttgtgctcatattcacttggtaagaatttttatttgagtaaacacacttaggttggacagcctctgagggcccttctgcctctgaattgctgtgattatcttggatgccttatggatggtgctgtctcatagtagttttcttaggtgcctggcagacggcgccatctcctagtagttttcataggtgcctggtggatggcaccatctcctagtagttttcttaggtgcctggtggatggtgtcacagtaattttctttctagtagttttctttctagcttttccatctggacttttctgaacacgtggtctagtggcttctgggcatgtgacctgatctcggtaagcggctggcactcacaccagatggacctggtctcggtaaggggctggcagtcacaccagatgtgtatgttccagatacattgctgtgtaactacctacctatcccaaaatgcagcagtgtaagattgcaacggttttattatgcccgtggattctgtgggccaggaatttgggctgggcacaatagggatgacttgcctgtgttcagtgatgtctggggtctcagctgggaagatcaaacggctggtaactgaaactgtaaatgagaatgcctacaaggggcctctccatgtggtttgggcttccttacatcatggcaacgtccagatggataatctaatttctcacttgatggctcagagctccaagttcaaaccttctggcaaacaagacagtagctgcatggtctttagtgacctagccttggaagccacacagcatcacttccgctataatctgttttgattgtggcagtcacaagcccacccaagtttaaggggatgggaatagattccacctcttgatggagaagtggcaaggctgtaatgtaaaggagaggtgggatgggagctattgttgggatcatctttgggacataaaatcttataagtactttctatttttctggggaggagttctcattttgtgttgtttctggactacggtggatttgagatgtctgctttgcctcctgtctagcagaaactcccagtgcaaggtggttgctgtgatgcccagccttcctcttcccactgctgctagcagtcctgtcccaggctctctctgggtcaccagtgaagcctcgcttatgaaggagtagccaaggggctgccaggtggagggaatacagccctgggaccagtttctcattccctgaagggtgtgagtgtgtgtgtgtgtggctggggtgggaggcagacctactgattgtaagggaagaatctcttggagctagtgtcaatcaaatgacccaccccagtggctggtttcctggcacaactcctaggccttagctgtgcctcttgagtgtataggaagccagggcctgccagggagtgagtgttcctgcagctggggaggatgtagatcccctcttcgaagtggggtgaggggccgagccagggtttggctagaagcctgccacagctgaaacaatgagaaagctttgccaggtctctgggctgctccacagcagggcttcctggacccccaagcaccagcatcttcctggagaggaagaacctcttccacaccctgactttctcaagtgtattcatttgctgtggacttgctggacgttcatctgctaacctcagcaggaaattgcggaactaacacattagggcgtaagtgtaggccatttttccccagtcacatgtctcagtgcctaggtgtaggtccctggatatagttacctgtgtgccactatcacaaagttccaggatggctagatataggagggtcccaagaattgcacttgagaaggctgaggaactctccagctccgtgtcctggtacttccgttaggatcacccgtgttcctgccctagccaggtgcctttgaagcctgaagacaggtctggagagtaaagatggatataggagtggtcccatgttcccatttcaccagagggtatgttcccactcttcattccccagggaaggaaaaacacaacctcatcattccagaataaaatcatggaatgctagtgcctgaaggagctttattcataaattaattcatcttgctccctttacagaggatgtgcttctgatgatgggcacacaacagatgctcagcaagtatgttccctgtttgagaaatcaccacaatgcatcattctgcatgaagacacatgcatgcatatgttcattgcagcactattcacacagcaaagacatggaatcaacctaaatgcccatcaacagtagactggataaaggaaatgtggtacatatacaccatggaatattatgtagccatgaaaaagaacaagatcatgtcttttgcagaaatgtggatggagctattattctcagcataatagataacataatagaataacaggatgtctgttattcttagcaaactaatgcaggaacagaagacaaaatacatgctctcacttataagtgggaactaaatgatgagaactcatggacacaaagaaaggaccaacagacactggggcttacttgagagcagagggtgggaagagggagaagatcagaaaaaaataactattgggtactaagcttagtacctgggtgacgaagtaatctgtccaataaacccccgtgacacgagtttaccataacaaaactgcacatgtacccccgcacctaaaataaaagttaaaaaaaaaaaggagtatattccctagggtacagcagacaatgtttcagaattattgtcaatttgccaggtgtggtcaggttggaaggttggagaatgtttcttttatttattttttctttttttagatggagtcttgctctgtcactcaggctggagtgcagtggcacaatctcggctcactgcaacctctgcctcctgggttccagcgattctcctgcctcagcctcctgaacagctgggactgcaggtgcgcgccaccacacccagctaatttttgtactttttagtagagacggggtttcacccatattggccaggctggtctcgaactcctgacctgatgatgcatccgcctcggcctcccaaagtgctgggattacaggcatgagccaccgcgcccagccaagaatgtctcttttcttgagagatgtgtgctcaagtattagattgaaccccacgaaattgctaatatcttctcatgtttaatatgattcaatcaaggccaggcatggtggctcacacctataatctcagcactttgggaggccaaggcaaggcaggaggattgcttgaggccaggagtttgagaccagcctggacaacgtattgagactccatctctacaaaaacaaacaaacaaacaaaattaaaaattagccaggctttgtagtgcacacctgtagccccagctactcaggaggctgaggtgggaggattatttgagcctgggagttcaaggttgcagtgagatgtgattgtgtcactgcactccagcctgtgcaacagagcgagaccctgtctcctgacgaaaaaaaaaagaaaaagaaaaaggttcaagctgatgtttaggagtgatgtgctatgatgtccacagcctgcaactcactttcaaatgttttagcaaagtgtgtgtgtgtgtgtgtgtgtgtgtatgacgtgatctgctttgtccagctggcgcagcagccaaataagaataaggctgacagggccgggtgcagtggttcacacctgtaatcccagcactttgggaggccgaggcgggcggatcatgaggtcaggagatcgagaccatcctggctaacacggtgaaaccccttctctactaaaaaatacaaaaaattagccgggcgtggtggcggacgcctgtagtcccagctactcaggaggctgaggcaggagaatggcgtgaacccgggaggcggagcttgcagtgagcagagatcgcaccactgcactccagcctgggcgacagagcgagactctgtctcaaaaaagaaagaaagaaagaaaaagaataaggctgacaggagatgaaggctgcatagcttccctctgtcttccttcctcccacccaagacacctcaccccctcctgcagactgtcttttgaacctgcccctgtcagggtgttggtggggctgagcagagctcctgcagatggggggttgtggcatgggtgaggtggcaggaatgggtgaggcagcagtgggggcaggagctgcaaggaggctccgactatgggtggaacagagaagaggctgcagggtgggggcagggaggggctctccaggggcagctgtgtatttctggatggggtcaggccggcagaggtcaggtgtggtttcctgggaggtggccaagataggaaggggcacaggtcctggggtcactagactgatttcagccccagctcgagggtctgcccttccctctaggggcttttgaaagaccccaggaccctgtgagaccctctgcaatggaagggagagaagctggagatgggatgggagatgagggccccgttgtgaggagctggcagggtgacctcgcctctacctgagctgtcagctccctgtctccaaggaaacccggccccctgagcctccctgaagcccccacgcccatctaacgggaaattctcagagaattcagatggtcatgggaaagtccatacatgtaaatcctcccgaagggtcttctgagtaaatagggggatctttctgttttcccctgtcctactgcctgcatctcgatgcctgcattaatgcagcaggcaggattgagggaggccgtaggatgaactggctgacaggtggtgacaggttgatatccacaggccgcaagcagcagggacaaccacggcaggtgttccctagagggttcctggccacactcctctcgggatcattgccctgcagaccctgccgcctgccccgccacatcctgtgccacggtgccgcgtgggccgctctcgaagcacaggccagatgtgcaaattctgcggctgtgcctgggggcaagcgcagcacagcttgcttttcttggaaatcattggtgatttgttagaaaaacaggaaacattggggctgctggtgtacattttgacttttttgtttttgtttttgaactcctttcatctgtctcagaatcagggtgttttaagggtattattctgttcaacttagtccttcaagccgtctctggtcactcttccctctctgcacatcccctttttttctttctccttcttgtcttctgctgccttcttcccccaacccgaatcactgcgtggggagggggccagatccagagaaccatggaaatgtgctggtgagtcaccttggccacgtgcctctgtggagcctggcctccctgcacctgcctccctactctctgcctccccaccaaccccatatctatcccgctacacccctcagtcatggtggttagacaggaagcaaagtggtctctgcacagtaggacctgctgcaactgggacagctggagtggctcccattgtcctgctgctgacacacagggatgctgtggctgtgatcagaagttgttcttccctgctgggtcacagtggagctggaggggccctcatttctttacccactggaacactgaggctgagagaggagcggggatgccttgaataaagaagaggaaggggtgaggaggtctgggtccacactctggctgtgtcccaactcagctcctccctgcctctctctcaaaaacacagcaggggccaggcacagtggctcgcacctgtaatcccaacactttgggaggacgaggcaggcagatcacctgaggttaggagtttgagaccagcctggccaacgtggtgaaaccctgtctctactaaaaatacaaaaattagccaggcatgatggctcatgcctgtaatcccagctactcggaaggctgaggcaggagaatcacttgaacctgggaggcggaggttgcagagccgagattgcaccagtgcactccagcctgggcaacaagagcaaaactttgtctctaaaaacaaaaacaaaaacaaaaaacaaacaaacaaaaaaaccttagcaggcaggaggctgggaactgtggtcgttttgtgtatgggatcttcaggaaagtgttacaaggctgctgtttgctggcgtcccttcgtgagttttcctgggtcccatcttgtcagggatgagctcttgaggatggccggtggttgctttgggattgttcttaagccttcttgcagcagctctgaacttcataatgtaccacggtggagagactcctctcccattttatggtcaagtaaacaggtccagagaggttctccattccctaaacaggccccagtgaggtgagaagggcagggcctcccacgtgcccagctgcttgccccaggttgggggctcttccctgctgggctctgctcctgggttttcatcaatgcaggaggctctgacaccacaccttcagccaggcccccatctcccaggggaagcaggcttaggggctgcccttgtgaagtcatacaagaagcctgatatgagagattagaaactccccgcagctctctgggggttgtttttaaaaggaattaaactgtcctgagagagatgtgtaagactaagctgagatggggaccaccatgagaactgaaacactctatttggagctttccagaaatacgcagatttgaggaattctggagtagggaaggacattggggcaggaaggtgaccccttctcacaccaggactccagaatacatgaatatcaaaaggcaatgacagtccctgggagagggaggggccacgttcccattcctcttggctgcacagcttctggggagcagagattctcagccaggcatccgtgaacttggatggagaacacgtggcatcgttattttcactcacctgtaactgaagttcgcatttgaacgtaggcaaaaaccacagtcatatcagtagcacctgtgactttgtcaccaacagaaatccagatgttttcgtgtcactttgaggttgcagatacctcaaatgtcattcatgctctttactacgtttaggtgatcacagtgattagactcactgctgggcttttattatttcatgtgttaatgagaagaacgtatactcccatttcataaatctgatgatttaaaaatagtttgaccattgtatttcagtgtaactcatttcctttgcaattctgtgtattttatttcatgcatttaaagcattattctgaagaggggtctgtagatgtcagactgctgaatggtcccatggtgcaaaaaagtttaggaattcctactgctggagcaattgggtagagaattcgaggtgttacctgacagctggggagggctttggtgttcggcaggcctgagttagcatcattgctctcacttgctgcagatcctgagaaagtgactttatctctcagagccatcgtttccttatgtgtaaaacagagatgaagaatgaccacctggaaggattgtcccatgtgaaagtgcctgcctcttccagcagctgacaggtagtaggaactcactgtgggtagtagctgatggcggtggcaccagcttatgtaagcccacaagactcaagcaggattctctttttacagaggaaactccaggctacgttcatttcttactgtccctcatgtagaaaggtaaacttgggtcatacctggatactgtctctcatctttttcttttgctctgagcaagtagctcccatgtatccaatatgaatcttggtccataaattcaagcatttgagaaataaaattacaaatatatacttgaaatgcttcaagtgtatctgagaaattcttggtatgtccacacagtgaaatattactcagtcataaaaaggagtaagtactgttacatactacgacatggatgaacctagaaaacatgcactaagtgaaacaaaccagatgcaaaagaccacatatcataagacttcatttatatgaattgtccagaataagcaaacccataaagacaaaaagtagatgactggttgccagaggataaggggagggagaatggagagtgattgctaataggtatagggtttctttttggagcgatgaaaatattctgggatcagatagttgtgatggttacatacttagtgagtatagtaaaagccgctgaagggtattctttaaaatgttgagtttacgttacatgaattacagctcaagaaaaaaagtaaaaatcactgccaaacctatggacattgaaaagataataaaggaatattatgaacaactctatgcccaccaatttgctaacttagatgaaatggaataatttcttatttctattaaaactcatacaaatagaagtagattatctgaataggcctatatctattaaataaattgaatcaataatcttccaaaacaaaaaagtttcaggcccagatggtttcactggtgaattctaccaaacatttaaagaaaaaatggccgggtgcggtggctcacatgtggaagcccagcactttaggagactgaggcaggcagatcacctgaggtcaggcgttcaagaccagcctggccaacatggtgaaaccccgtctttactaaaaatacaaaaaattagctgggtgtggtggcaggtgcctgtaatcccagctactcaggaggctgaggcaggagaatcacttgaacccaagaggtggaggttgcaatgagccgagattgtgccattgcactccagcctgggcaacaagagtgaaacacacacacacacaaaagaaaaaatgatggcaactctctacagtccattccagaaaatagaagaagagggagtgcttcctaactcattctatgaggccagcattacctaataccaaaaccggacaaaaatattacaaaaaacgaaaactacagatcaatatctttcattaatataggtgtaaaaatcctcaataaaacattagcaaattgaatccaacgatacacgaaaagaattatagatcacagctaagagggatttattctggatatacaaggctgattcaatatttgaaagtcaactaacgtagttaattacatcaacaggctgaagaagaaaaatcataaaactagatacagaagaaacatttgataaagtccaatacccatttatgataaaaattctcatcacactagaaatagagaggaacttcttcagcttgataaatacttatacagaaaacgtacagctaacattatggtgagaaactagatgttttccccctaagactgggaccaaggcaaagatgtcttcacttaccactcatatttaacatcgtactggaagtcctacgtaaagcaaaaatataagaaaaggagatgaaaggtatacagattgggaaggaagtttctgttcaccaaataacatgattgtctatgtataaaatcccaaagaatcaacaatgacaaaaaacaacattcctggaactaagcaattatagtaaggtttcagagtgcaagataaatacacaaaagtcaagtgcttgcctatataccagcaatgaacaattggaatttgaattaaaaatacaataccatttacactagcaccaaaaaatgaaataatcagatatgaatctaacaaaatatatacaagatttatatgagaaaacaataaaatggataaaaaaatctacagaaatctaaataaatggagaggtattccatgttcatgtatagaaagactcactattgttaagctgtcagttcttttagttttatctctagactcgatgcaatctctatcaagactccaataaattactttgtgaatattgacaaactcattctaacacttatatgaaaagaaaaagacctagaataaacaacacaacattgaagaagaacaaagtcagaagactgacattactaacttactaagacctgctatagagacttgtaagacttactataaaggtgcatccatacaatggaatattattcagtgggaaaaagaaaagagctatcaagccatgaaaaaacatgaaagaatcttaagtgcatgcatattgctaaatgaaagaagccaatctgaaaaaaactacatactgtataatcccaactatgtgatgtcctggaaaaggccaatctatggaagcagtaaaaaagaagaatggctaccagatgctggagggagtaggatgaatagatggagtataggggattttctgggcagtgaaaatattctgtgatactgtaatgtgtattgatattatatatttggagaaactcatagaattgtacaacacaaagagtgcaccctaacgcacactgtggacttcagtgactactcttgtatcaatattggtttattaattttaacgaatgaaccgcactaatggaagatattaataatagaggaaactgtgggtgggaggaggaaggagagggagtatataggaactctctgtactttaatatttctataaacctaaaactactttaagaattaaagtctataaaagaaatagaaataaacattgtctcctttttttttttttttttgagatggagtctcggtctgtcacccaggctggagtgcagtggcgcaagctcagctcactgcaatctccgcctcccgggttcacgccattctcctgcctcagcctcccgagtagctgggactacaggtgcccgccaccacgcccggctaattttttgtatttttagtagagatcgggtttcactgcgttagccagtatagtctcgatctcctgacctcgtgatccgcccgcctcagcctcccaaagtgctgggattacaagcgtgagccaccatgcgtggccttgtcttcttatgttgactgaaatccgatgccaagccccatcctgccaggagctgtccgggagctcagagctgttcactttcctgccacaaaccttcctcaggatggttgccttcttatttagcatggggatagggtgaggggagagcacaatgtacagaaagaaataaattaatagaaatataaattatcctgtatttgtactctgaggtcttaggaacagctccggggaagcttgggttctgacctgaatctcttcctttggcctctggcagaggaaacaaggaaggaagcaggtctcccaggcaacctgcccacactgtgggtggccaaaaacgactcgttcaacacctctgaagactgactcactgggacgttgcaatagacgtgatttccccttgaagccagaggaatatcccctattgctcatatggtcataacatcatgggcctatatttgggcggggctttcgtttgcacactcatgtaactttccagggagaatctgcccagaccctgtgccaggcactggggttagaaccattatgttagatgggacattgacgtcagagttgaaagcccgctagagaaataggcagttataacgcaggcacagtggaagcagagatgctctgggagctgaaagggtgggggtggacatccagccaagcctggaggtcagaagatctcccctgaagaagtgacctggaaatggaagacagaagaatgcatattaagatccacatcagaaacaggggaacatggtggaaatgtttcaggcagaggcagcacatgcaggaagaagttttatggagaggaaaggtagaggtttgagactgactagagaagaagggcacagaactcttggggtccagtgagccatgttatgggcttgagttttgactcaaggcaatgaaaacccaaaggaaaggtttcagagggctgggagagaatgatgtaatcagatatgctttctcagggacaaccgtgcatagaacaacatgtatactatggttctatttatgtttaaaaacccatgatacgacttattgtgttgatctacgtgtgcttaaatcgtcagtaccagattgtcttgattactgtagccctagagcaaatcttgaagtcagataggatgagtcgtccaactttgtccttttcccaaactgtattagctattttaagtctttggtatttccatataccgaaggcatgttattcatttctattttttaaagtttgctgagatattgactgggattgcattgaatccatagatgaacttggaggaaaactgacataatatcaatattgagtcttctgactcataaatgtggcatatctctccacgtattcattgatttatcttagcaatgtcttgtagttttaatggtgggggttttccacattctttggtaaattccctaagaattttggctttttgatgctattatgaatggtgtttctaaaaacttcactttcaaattggtagttattaatatgtagaagtacaattgacttttaaatactgactttgtattctgtaaccttgataaattcgctaatggtagtttttaatagattccttaggattttctaagtatacagtcatgtcatctcagagtaaagacagcattacttcttcctccctgatatatacgtgttttttccttgcctcatggcaatggctatgacctccagaacaatgttgagtaggtaagaacagacatccttgctttgctcccaatagtaggtgaaaagcgttcagttttcacctttaagtatgatgttaactgtagatttttcatagatgctctttataagtttgagcagttccctcttactgagggttcttataaacgggggttgagttttttcaaaggctttttatgcattcatgaagtagttatgtgattttttttcactcttctttattaatgtggtgaattacattaatttttgaaagttgactttcagtacaatgactttcagtacaacaactttccaagtacagcattccaagtgggtaagtcccatttggtctttttatatatttttacttatttcggaaatgattatatttatatatttctagacttcatttttaattgttttgataagaatttttgcatcttgaaatgtaaaatgagagatattgatctgtactattctttgtttggtagtgttcttgtctggttttgacatcaggattatgctggtttcatcaatgaattgggaagtgtttcctcttcctctattttatgaaggaatttgagtaagattgatattatttctttcttaaaggtttgatacaatagctttttaaaaagcatttttagtaatacatgtctgctggtgaccatcttttcagcatctttttgtcttcaaatgtctttatcttcattatttaaaaatattgttttacctataactttcttcacttcccaaccctttgattatttttatagttcttttcatgaaaaatttacaaacattaaaatgtaaaaaatttaactgtacaattttgacaaatgtgtacatccatgtcatccacagacctaacaatatataaaacatttcaatcacaccattaagtttcctaacttttgtttttgaagaatatttccactggatatagaattttaggttgaaagtcctttttttgttttgtttttctttaagcactataaagatgtatatcactctatcctagtttgtgttgtttctaagaagtcagtagtttttctcgttgttttctacatacaatgtgtctttttcttctggctgctttttgagattttctctttatctttgattttcagcaattaactatgatatacctaggtctggttttctttgcacgtatccttcttgggtttttagagcttcccagatctatgggttcatattttttattaaatttgggaacattttggccattatttcttaaaatatttttttctgcacccattttctttcttctctctttttgagacatcaattacatatctattagaacttttggttgtgctcagaagtcactgaggctctgttcatattttgaaaaccttttttattttctatattttagtttgaatggtttctatcgtttaagttcactgatcttattcttgcagtgtccagtcttttattcagtccatccaatgaacttttcttttcagagattgtgtttccttttggtaatagatttccatttggttcttttaaaaatagcttccaggccgggtgcggtggctcacacctgtaatcccagcactttgggaggccgaggtgggcagatcaccggaggtcaggagttcgagaccagcctaacccacatggtgaaaccctgtctctattaaaaatacaaaaatcagctgggcatggtagtgcatgcctgtaatctcagcttcttgggaggctgaggccaggagaattgcttaaacctgggaggcagaggttgcagtgagccgagatcacgccactgcactccagcctgggcagcagaatgagactctgtctcaaaaataaaaaaaaaaaggtttccaattcccttctgagatttctccatctgttaacttgctctgtccatttttccttgaaatctctgaacatatttataatagatgttttaaagtctttgcctcctaatttcaacatacctactctctttggtttttattcattgaattacttccctagtaatgaattgcatttttcttcatcttcatctgtctagtaattttttcagtgtattctaggcattatggatgccacactgttgagcgtctggattttcttgtttttctttaaagaattgtattctgccaggcagttaatttataggtggataagcaggatcctttcaagtgtttcttaaaatttaatggatgtctagatgtcaagaattaccttcctaggatctcagatgaatgactgaggtatccagtgaagttcctccaccctggctgattggaaatccaatgtctcccagcactgtgcaacttctagaacctctgttcaactccaggctttccagtagctgtttctgccaggcttcatgaggtcttaccctgcacagcttagtattcagctaatgtcttcttgagctcttctttttcacgtttccctcttttccagttccttgccccacacagtccagccatttgtagagttccaaactccaatttctgtctcctcaactcggaaagccccctgtactctgcttgcattctacctctatgcttcaaacaacggaagtgccttccagcagaaacccagcgaaatcaagaggctccccttgtgtgtttcccttccctgagggattacagtcctgtgcttgcctgttgcccagtgtctataaacagttgcttcagctgttttgggtagtcttataattgttcatggagggaggcttagtccagtgccaattatcccttctcatctgatggtgaaagcaccccttcttttgggtggactctcgaatatcacctcttttatgagataaatctatttgagtatgatctgtgggattttaaaaaataaagtttttagaaggataaagatcagactattggtagtggttattctaggtagttttaaagcttatattttaacattttaaacttatctgtacaaggcttttaagttttgttttttaattagacttttacatcttgagataaatcgtagattcatatgtcattctatgaaataataaagagagatcctttgtacccttttctcagtttgctccaatggtaacatcttgcaaaacaaatacgacaatatcacaaccaggatattgaccttgatacagtcaagatatagaatattgctatcaccacgaggatccctcatgttgcccttttttagccacacccacttccctcctgcacctgccctaatgctaaccctagcaaccaccaatatgttctccatttctataattttgtcacttcaaaagtattgtgcaatgaaataatatgttacgcattcttttggcattgactttgtttttattcagcataattttccggaagttaacccaggttgttgtgtgtatcaatagttatttcctttcaattgctgaataatattccatagtatagatggaccatagtctgtcgaaccatattctaaattgaaagacatttagtttgttttcagtttttggccattttgaacaaagctgttataaacattcatgtacaggttttcgtatgaacataagttttcctttctttgagataaacgctcaggagcacaattgctgggccatacagcagttttaatatatgttattttgtgatataaatttctctctctgaactactttaactgtatcccaccaattttgatacattgtacattcattttcattccttcagtgaatttttggatttctcttgagacttcctctttggcccatgaattatttagaagtttgtttagtttttgagtatttggagatttttctgtgatctttctattattgattgctagtttgattccattgtggtcatagaatgcactctgtatgatttcagttatttttaagtaattgaaagtttggttgttttaaggcccaagatatgatctatcttagtttatgttccgtaagtacttgaaaaaaatgtgtattctgctgttgttaggtggagtgctctaacatgtttattagatcctgttgactgatagtgttgttgaattcttatgcatccttgctgattttctttacagttgttctatcagtggttgagagaaggatgctgaagtctccgattatttcttgttttttactgtttttaaattcgatcgcttttggggtacaggtggtttttggttacatgaatgaattgtatagttgttaagtctgggattttagtggatccaccatctgagtagtgtacattgtacccagtagttggtttttcatccctcacccccttccatgtctcccccattctgagtctccaatgtccgttatacaactctgtatttctttgcaaacccatagcctagctcccacttaaaagtgagaacatgtggtattcagttttctgtttctgccttaatttccttgagataatggcctccagcttcatccatgctgctgcaaaggacatgattttgttctctttttttggctgtatagcattccactgtggcagtccccacttataattatgagtttgtctatgttttctttctgttctctcagtttttgcttcacatatctttttggtgtgaacacatttaggtttgctgtgtcttttagtgaattgaccttatgtcattatataatgtccctctctgcttctggtaattctctttgctctgagctccactttatctgatattaatatagccattgctgctttcttttaattaatgcttgcacgatatatattttcccacccttttacttttaatttgtctatatatttatatataaagtgagtttcttgtagacagcaaatggttgggttatgttttataattcactacaaatctctgtcttttaattggcttatttagtccatttaaatataatgtaattactgatatgttagggctcaagtctgctattttgttattggttttgcattttttcctatggactaactgaacattctttagaattcattttttattttatctgtaatgcttttatatatatctatttgtatagctttttgaatggtcactgcatatattgttacttatcacagtccactgttatcattttaccagtcctagtgaactgtacctccctttatttccctttacctgcctccatttataatatgattgtcttaaatatttactcagcatacatttaatgctacatcagactgtgttattttttattcagccatctaagataacttagaaaactcaagaggagaaggaaaatctattgtatttacccagatttttccctttcttattatttcttcctgatgttccaagatttctttcttttattatccttttttctgtttagagaatttcctttggccattcttctagagtagggatgctggtgacaaattatttcagtttttctccctctgagagtatcttgatttcctcttcattcctgaaggatatttttgctggatattggactctaggctgacagtgcttgtccttcagcaattagaatatgttattccacttccttctagcattcataatttttgatgaaaagtacactgtcattcaaattatatttcatctaagataaggtgttgtttctctcttgatcctttcaagattttttctttgtctttagttttcagaattttgactatgagatgtcttggtgtgtatttcttggctttatcctgtttatggttcacacagcctcttaaaactgtagttttatatattttgccaaatttgacaagttttatgtgattatttattcaagtactttttcagccctgccttctttctcctctcccaggaggttctcctcttcaggttccacactcagcctccattgccaagttttaagtgattatttcttcaagtagtttttcagcccggccttctttctcctctcccactggtactccaatcacatgaatgttagaccttttgtctgacattactaaggggtagagtgggagttccagctacctattaggttttgtctttgtttgtgctgctataaaggatacccaaggctgagtcatttataaataaaagaggtttatttggctcacagttccgcaggctgtacaagaagcatggcatcaacatctgcatctggtgagagcctcaagccacatgcagtcatggtggaaggttaaaaggagctggtgtgaagaaatcacatggtgggaaactgggtgcagggggaaggtgccaggctctcaggggaactaagctggttcccaaccagttctcaggaatgaagagtgagtactcactcactcccatgagaatgacaccaagccattcagagagattggctccaaccatccaaagacctctcaccaggcaccacctccaacactggagatcagatttcaacatgagacttggtgggaccaaaaaaaaacatatctaagttctaacaggcctccactgatacgtctctggctagaaacggtaggagtgcctccttacagctacaatgccaccacagcagaggggatgacctcattacttctgggcagtggtaaaagtcttgactccctgctaggcttcctctgacatcatcttatcatggaggtgtctctttactgtctggtgggggtggaagtccaggctcctcactggtgtccactaacactgtggagtgggagggggctaattaccgctaatggagataaaagacctggctatctacttggcttcttcagacagtggccatggcaggggatttggggaacctcattacggcctggccagggtggaagtctaagccgattaactggcttttgctggtggaggtggcaccacaattttccctgtggagtttggctggaatagagcaggtattgtctaaaagtgtctgtcttgctaagttgcctctttcctcaggctttggctagagagagcaggcttttgtgagggctttattttaaatctgcacccattttttcagattgctggctgttcagctccaagtctggaatctataaggcaaaaagagaagccagggaactcacccatgccattccttgtccccagggtccctagcctgtgtgccttctctctctctttcagggtctcttatgttagttttatatatattgttcagggcttgtagttgtatttcaaatggaatagggaaaagcatatctactccacttacccagcaccattttttaatttatatatatataacctctgttatctatgtgataaaaaacaaggcataaaatatatattatgaaaaatgtttaataaaaaataaaaattattcctatttttacctcccagatataatttctgttagcatttggacgtgtaaccatgttgggtagtgacatggtttggctccgtgtccccacccaaatctcatctccaattgtactcccataattcccatgtgttgtgggagggacctggtgggagataatctgaatcatgggggcagtttcccccatactgttcttgtggtagtgaataagtctcacgtgatttgatggttctatcaggggttttacttttgcatcttcctcatttttctctggctgctgccatgtaagacgtgccttttgcctcctgctatgattctgaggcctccctagccgtgtggaactgtaagtccaattaaacctatttttcttcccagtctcaggtatgtctttatcagcagcatgaaaatggactaatacgggtagtttttcttttgacatcgatatagacattttttttcaaactggaagaaccttagggttcttttggatcctggggcatttcataaacccagctcttctgagcaaagcttcccaaagcagttgcctctctgtcacttctctctccttagcccattccatttggtcttttcttcctgcacttgttctttcatggtcactcaaaccctccatgtcaccagatccagtggccacttctctgccctcatgctgtagaccttgcagtggcattcctcactccctccttgaaacatgcttgttttggatcctgtcacatcgtgttctcctcctgctcatgagctgcatcttctcagtgtctttttgtgatacttccggtgccacctcttaacactggaggtgttctcctcactcttctcgcttcacatggttcacagcctcagtgaccacagcaccatgtgaactcccaaatagagagctgtagcccagacctctccattggggtctgaaggggatagaactcggacaaagcaggactcttgttttcctctcccaaattgtcctctccccaaacttctccatctcagtgaatgtgatgcatctatctgcattaaaggaaaagacaaaaggggatgaagcatccaaggaaaaagtgcacacccacttggggaccaaaatgtactcagccatgatgcaagctgtacccacttattatagagattttggcctgaacctaagcctggattttcttaatccatttccatctgatttagacataatgtcaatccctcattctggcttgtcagtgttggtttcagtttggattgtatgcatgtgtgttccttttttctctatctatctatctatccatctactatctatctactatctatctatctatccatctactatctatccatctactatctatccatctactatctatctatcatccatctactatctatccatctactatctatctctccatctactatctacctatccatctactatctctccatctactatctatctatctatccatctactatctatcaatccatctatctatcaatctactgtctatccatctactatctatccatctactatctatctatctatccatctactatctatcatctactagctaaccatctatctatctacccatctactatctatctatccatctactatctatctatctatccatctactttctgtctatctatctacccatctatccatctactatctagctatctattcatctactatctatctatccatctactatctatctatccatctactttctatctatccactatctatctatccatctatccatctactatctatctatctattcatctactatctatctatctatccatctactatctaactatctatctggtatatttggtgagaagttgggagagactgcatcagtgcctgatgccctaatgtcatagtaagttgtccattagagatctagagagttctagactgggctaaacgggactcttgacatcagcgtttgtttcataaaaagttgtaaaaaccacacctggccaagtatcgggaggagtgtctgatttcagttctgtccacaaacctgatgagtatctgttttcttgttagagaggtttcgctctaaagcatattcatgaatgggatggagggggagaatttgagagatttttcttgcataattgggcaggagttcaaagagagtaaaaaggagactagtgaagatgtgcccgtgtctgagaacaatgacctgctgttggattaatggagagaagacggggtggtaaatggtttatcactctggaagagaagaaaagctgtgcaagggaaaagataatggattggaccagtctaccccaaacttattctgatagtaaagcatctagaagtcacagtgctctggaaggagaaaaatcttccttgcccaaaactatgaaatattcatatctgtcttacaaactagaaatgattctacctgtagaaagtgagcagcctgtgtcaggctgcaggtggctcacgcctgtaatcccagcactttgggaggctgaagccagcagattgcttgagctcaggagttcaagatcagcctggcaacatggtgaaaccccacctctacaaaaaaaaaaaaaaattagccaggcattgtgacatgtgcctgtagttccagctacttgagaggctgaggcaggaggatcgcttgagcccaggaggtcaaggctgcagtgaggtatgatcacaccactgcactccagcctgggaggcagagcaagaccctgtcttgaaaaggaaagggaagggaaggggaagggaggggagggggggaggggaggggagggaagggaagggaaggctgcaatgtcacaactgcaatctttttccacacccagaaggctgcagtgaggtatgatcacaccactgcgctctggcctgggaggcagagcaagaccctgtcttgaaaagggaagggaaggggaggggaggggaggggaggggaggggaagggaagggaagggtgcaatgtcacaactgcaatctttttccacatccagaaaaaccagaaagctgccaatatatgtgtaattggcctttcttgagtttttacatttacattcatttgctgctttattctcctgtgcacattgtctaaccattaagatgggctccatatttaaaggtggtaggattaaacagtctcccgtgtaagtgcccaaggtttagcccaggtgcccaaagaattcggttgctgcctggagcttattgcttgttttattgttatagtcttcctctggtttcccagcttggcagtaatttcagtttgcccacccctggctccagtatagctgctcttacttgcatggggaagctaaattgcctacagcatacttcatttaccagctgagagaatactctgtaccgcagtctcctcatctgtaaaatgggggtaaggagtgtctacctcacatggatttaatgacttaattcatagaaacacctagaacggtgcctgccacatagtaagctttcaattcctattagctgctattattaaaattattatatgaaaaggtgacattgtacatcctgttgtcttttcggtactgtacctgggtagagtggaccagagagaccttagttcgaatcctctctgtgctatccgtatgtccttgggaaagtcttttagccaacaggagctgaacttcctcatctctgcaagttcagagtgtcctagagtggctcaaaataaatgagatcatgtgcttcaagccctaagcatggtatctggcccagggtcagtgctgtgtacacgttagcatctttctccttcccctccttcatcctcatcccatttcttcttggtcttgaccacaactgtggtcttcccaggcattcctgtgccccttccttggtaaagaagggcttgagcaaagatggggggaagtgggcagtcttgcctctgcttcttcagtgtttctttcttttggtacatctctacttcatcttctgccttccctggacctccacaccatgtccacctaccttttcacatttcctccctctcctggccccagagtccttctcctgcccactagctaccgtcactgctgtaacagactcatctggtggctaaatcatcctccaagaatcttacatcttgaaaaataagctaggacagaggaagtgaacagccctaacccaaggagaatgaatcaccaacaatggaaactcagccaatttttatgcaagacgtcttccctggaagcctcaaattacaacactgagacgaaacagtacactcagccctttaagtgtctagaaaccagtagaaatgacttcctatgaacacgacataggaaagaacatgggctttgagagtcacgccaactttgcacagacttcaagctcgggccataggaattgtgaccataggaacttgagtgaataaatggcttaccctccctgagctgcaggaaatgtgaataattatgataatgtcacagggtgattatgattatcaaactaagtaatcaatgtcttggggattaactgaatgttaattcccaagacaatggggattgataatttgataatcaatttgataatcaattatgattatcaaactaagtgaaagcgcccaacatagtacctgacacagatcagccactcaataattaccttcctccttttcttcctccctccctccctccttctctcccaccctcccaccttccctccttccctccttctttcctattctccaggctgaaactcatggagaatgaacaaatcgggtggtttgtttttgttgttgagttatacaggagttctttatatattcaagatggtagcccttaatcagatatacgatttgcaaatattttcttccataacatggcttgccttttcactctgttgattgtatcctttaatgcacagagttttaaattttgatatttaactattttttcttttgttgcctgtgctttttgtgttatatccaagaaatctttgacaaatccaatgtgatgaagcttcccccaatttttcttctaagagttttatagttttagcactttacatttagatctttgatcctttttgaattaattttttatggtattgaatcttcctaacaccagaatatgtatttccatttacttttgctttttcgtgtccctcaaacattttctttataaaaatattgcatatttttaaagtttttaaaaaaatttgtattacttttgttgctgttagaagtggaatcttgtttccccaacataatttatttgcatagttagataatattgatttctatattaatttgtgcctaaccactttacctaactctgttctttggtatgaccatttttcagttgattttcttgggtttctatgaacatttcgagggtgaaaaattatgaattatgccaattctataattggcaaagctataattcatgagccagaatgaatgacatatgacatgtaaagtctcagaaagtacctcacccacatatctgtcctgaaactactcgaaatacttgagtgagcaagacatgaaccaaaataaaggacttataagtaggaatggtagggtacaaaacaaaacagtgagtaataaaataaatgaaacttaaagccactgtccaaaaatactgctgttatcacagttattacatttaatgtaaatgtcaaaaacattgaaagaactatgaagtagtataaaatatttaatacaggccgggtgcagtggctcatgcctgtaatcccagcactttgggaggctgaggcgggtggatcacctgaggtcaggagtttgagaccaacctgaccaacatggtgaaacccgtctctactaaaagtacaaaaattagccagccgtggtgatgcatgcctgtaatcccagctactcaggaggctgaggcaggaggatagcttgaacctgggaggcagaggttgcagtgagccaagattgcgccattgcactccagcctgggcaactagagcgaaactccatctcaaaaaaaaaaaaaagaaaaagaaaaaagaaaaaaaaatacttaatatacatatggacctgtattttaaaagaaaacaagttacgttaaaagaagggctaaaattacagaagtaattgtaaaaattatataggaatttctgattcttgctaattaactttaaaatcttgattaaagtgaatgatattgtcagaaaacctaaatttgcaaagttgacacataaagttcaatacctgaacagaccaataactctggaagaaatttgaaaagggattccaaaaatagccttgaggagagcagctgaagtcactcactgctgggcagcaaggagagtgcgatcctcatctatgcagagggatgcatgattatccttcgttccaggctcagattctacttacagatttactgccgtctgatctgggcaagtcccttcaccactcagagcctttgttttcatatctgtagagtgggaatgttgtactaaatggtacctaaggtgccttcccagtcttagagtcaaatgtgtgtgtgtatgcatgtgtgtgtaaaataaaaagcatgactttccaagtctaactgtgcgtcagaatcatgcaggaggtgttttatttcttggcctagttctgaagacatcaagagttgggcaggtgagatgtgtgtgttaagaaagcactctgggccgggcatggtggctcacgcctgtaatcccagcactttgggaggccgaggcaggtggatcacttgaggtcaggagttcgagatcaacctggccaccatggtgaaaccctgtctctactaaaagtagaataattagcctggtatggtggtgcatgcctgtaatctcagctactcgggaggcaagagaatcccttgaacctcggaggctgaggttgcagtgagccgagatcacgccactgcactccagcctgggcaaaagagcgagactccgtccaaaaaaaaaaaaaaaaaaaagaaggaaaaagaaaaaaagagaaagaaagaaagagagagagagagaaggagaggagaggaaggaaactctgataggtaacagagaacatatattgaatgtttgttatgcactgggaatgtttccacacatttgtctatgttaactcattgtgcttaaccttgagctcttgcagatcccaagcacacacatggtgtgccctgtccttttaggtgacaccaacacggtatgacacaaatgcaaactgggcacggagatctggtaacatttggtcatgaggtggtcatcaagatgttccagaatatattaactatgaactgtatctagactgacattaaaatgaaaacataacttgaacattctcaaagacagcccttaaatcccccacagagccccagaaattctcagccccagtttaggaacttcaggttgggggattttgaggcagccagccttgcgctagtccactgtgactacagaagaaatagcaatgttcaagaagctcatgtaaggtagggaatcatttgataactgcctggaaagatactgaaagggcataaggctatgtaaatatataaaaggtcttagagccatgtctaccattcactcagcttcctctaattaacaacttacataaacatggtgcagttatcaaaaccaggaaatggtcactaacagagtactattaactaaacgacagacctcatttgaatcttagcatattttccccctaatgttctctttctgttctacaattcagtacaggatctcacattgcatttagcctttgtgtctccttagtctctaccaatctgtgatagtcctctatctttccttatctttgatgacctgaacactttggtgaggactcaccatagtgaatgtctatgtggtgagtaatcaccatatagaatgtctccaaactgggttttgaatggtgttttctcatgattgtagttatgtgtttttggcaaaaaaacaaaaacaaaaaaacacaaagaagtgacgtgtccttcccttctcagtgcattacagcaggggatacatgatgctgatatgtatagcttattgctggtcatgttaaccttgatcatatggttaatgtgctgtctgctgggttcctccactgagaagttcttgttttcccctttataagtggtaattatttggggggaaatactttgaggctatacaaatatcctatttgtccacagattttcactaacagatttttagcattcatcagtggatctacaattattaccatggtgtttgcctagtgacaattttctatttctctcattcctctcacattattaattggaattcttttgtaaagaagacctgtcatttctcctccatttatgtttttattcaattatctataacatttaattatctataattatctatagacttgtgggtatttattttattctatgagttataattcatcactttctttgttcattcaaattgtcctagctgtggccattggaagctccttcaggttagaccctatgtccttttgacactccccatggtttttcaaatattgacttattttctggcactacaagatgtgctgggtttattttgtatatttcctgtttcaatcctaggatcagccatgtctccaaggagctctgtttccttttattggaaaatggtatttagaaaccaagatctgggcactaggtgtgcttgttgctactgggatgtcattgcctctgggctttctctgtagacagaactagaaaatgtatgtatgtgtattaatccaagcacatacatctttttaaaatttttctatatgtatttatctgtatatacattaaaaaccatgagttcatactgattctttcaagtctggtccaactccacaaggttcattccagccttcccccttctttatttgtcacatctttctttagctcttattatctatggtttattcacttatttgtctaatgctagtgtacacataaagaactttcagatttctttctttttttttctttttttgacatggagtcttgctgtgtcacctaggctggagtgcagtggcacaatctcagctcactgcaacctccgcctcctgggtacaagcaattcttctgtctcagccacccgagtagctgggactacaggcgcacaccaccacacctggctaatttttgtatttttaatagagacagggtttcaccatattggtcaggccggtcttgaactcctgaactcaggtgatccacccgcgttggcctcccaaagtgctgggattacaggcatgagtcaccatgcccggccccgaacttttagaatttttaactcacattcatatgagaaacatatttaataactggaaaacagtatttgtctatagtttttatttttgactttgaccagtatccagtcaaagtaccattttacaaagttactgaagttagtgctttcattccctatccccgtcagtgtggttatgttagtaattgattatacagttaggttaatttgttattgcttgtctcccacttttggtcccctgcccccatattctggttgatttcgattatttatttaattttgggtatgtaaaatatcgccatggttctaagcgttaaagctatacacacagataatcctcagagaagtgctgttcctccctcatctccagtttcattccttgatcctatccacccttttctcacctccacctcccatagtaactaaccaatctccttaatttctggtgtatccttcctgtgttgggaagaattcttttacttaggtcacggtggagattctgccttatgaaggcatgaggaagggactggggcagagaagggagagtcaagcctcggaaggtaagaagcaggagagggaggagtcatccaggacggaagcaggctgggtcagcccaggactgcatgggcctagaatattccagaacaccaggaaagcagtgtggagagccagccagaacctggaggccccctccatatgagatgcaggccctctaactcctcctttcattactatttagaaacccccaagaggctctcctccctgccccatcgtgggctgccttgggaagctggacccaggcagaccctacacctcctctgaccagccctgcaccagagggaagatgagccctccacatcatggcatcctgtcaacatgggaagaaaaagtggaagcaggactggctctctctgtgccctctggggtcccaccaacccaccccgactccaggcctttctgccccatgcagggtccccagcaaggactatgagtcctctttgctggctcagaagaggaacttggagatgggggaaggccctgttgttggatatttcaacaccacctcaccactggcaggggaattggtggcgggggcgggggggcggggggcggcattcccggcagcagctggaattttacaatgggagctcctctcaacaagatagggagggggcttgggagggtgatgccagggaagccaggccctgcttgcccagcttttgaaaaaaggcgtcatgctgggagagcgggtgccactgtcttcccccctcacctctgccccaaagccgtgaggttctgctgacaagtcataagaaacagctgatgactgactcagacggaaatgagcgtgtcaaaggggtgggtggtgagcccggtgtgctgggttaacccccagggcagctcagctgagggtcccctggctgggttccctctccccatctctcaggctcccaggggctagtggctcaggcaagtcctgcctctgagaagaacttggggcgagctcgagaaagccttggaatgccggggaggctggcacaccagaattccaccagtgcctgaggatatcctgcccttccgtggagaaggctttgatgtgtcccttgagcagggtggggttggggggaaggggcacaccgaggccaggagatgggaaagtcacaggcggccccagaatgagaaagagaagccatgggcagtcaggcattgggtgcggtgtgctagcagcagtcctatggcactgtgttctgcccccttaaggacaggagtgtgcagaagtggtgttggctgagaacattcatttgcatcttgtgtttgcatccattacagtgtgggacacgtaatgagtgagcaggatgactcactcctgcttcatggcataaccagcttggccatcgcagcaggggctgggcagaggggtcttaaaacccagatcacacggttcaggacatgctccaggctagagacgcctgggccccgtgagccaccacggtcatcaccggtggagtccgagagagtgttgctcggtatcccctctggcacacactcctgtgagccttggccttttctctggaggatgcagggctgtgcggggcagctggtgtagatagatgtggtggggctcacaatccccagcaactgagagtctagattttcttttttttttttttttgagacagagtcttgctctgtcacccaggctggcatgatcttggctcaccgcaacctccacctcccgggttcaagccattctcatgcctcagcctcccgagtagctgtgattacaggtgtgcaccaccacacccagctaattttttgtatttttagtagagacagggtttccccatgttggccaggctggtctcaaactcctgacctcaggtgatccacccgcctcagcctcccaaattgctgggattacagacatgcctagcctacctcttaaagcaaaatcaagtcttcacttgttgaagtagaaacatgaattggttttaattttcttccagtaactgcctccgactgtgctgaggggcaatgtattctagtggttgaaaccccagaccccctgggtttataccctggctttgccatctcctagctgtgtgactttaggcaagctgtttaacctctctgtgccaccaatttcccatctttaacctgccccatccagcttcctacaaaattggtccagccttcagcctccttctgataggtttccctcatgctgctggcagccctctagaaaagtaacaacaaaccggctcaggccccacgtttgttccacccctcaccccaatctggagctgctgacttgtccaacagtgggtctgcaagatgccccctctgccccttgtctcagccctgccatggctcacaggcagcaccggagcaggcgagcgagtttgccggctgagtagatagtgacccgaggaacaaagggcagcatcctcagctttgggcatcccagtctgtgtcaggacttctctgaaagccctctgccctcagctttgcggagagaaggaaggatcttccagatgggctgacaaccctttttctcttcccaatcttatgacagggattggcgggtcactgtgctggttctggactgacacctcccagcaagcccaccagagtggctgcgcccacgtccttgacaatactccgtggctcttagaactttagaatgcagaggatttagcaacttttgtccctagaattgggtctcagccacaatttgaaaataaaaagtcctccctgatccccttgtctgtttataccagtgtcaactctctcccagctgcctcgaacaagtcccttatccttcctggacctcagcctccccttctgtaaaatgagggacttgctggggaggcctctgagctccctccaagaacctgctctgggggtaacctgggagaaatcagcctgtgagaacaaagggtcgctgtcacatctgggccagctgttcatgccccaggctcatccatgtgaaggtgtctggtgttctacctcctccagcaggtgccgttagccctgagctggaataggacccacctccagagggtcttgtggtcgggctgccatgggaggcagaaagatgaggcctcatcacaggtgtcagtccccacagatgctcatccatgccaggtgccagcacaatcccaggtcagggaggggtctgcccggtctggctcagggtcagtggactcacgacctgagctacctgtggaggtgttaaacagaagatccaaaggcaactgtaaaagtcacatggaagggcctcaggatgtctttgggcatccaggtgctgctaatggacacacccaaggtcttgagtcaccaatgaaaggttttcttctttttgttttctttttgagatggaatctcgctctgtcacccaggctggggtgcagcggtgtgatctcgacttactgcaacctccgcctcccgggttcaagcgagtctcctgcctcagcctcccgggtaactgggattacaggtgcctgccaccacgcctggctaatgttttaaaatattttttagtagagatggggtttcaagatgttggccaggctggattcgaaatcctgacctcaagtgatccgcccaccttggcctcccaaagtgctgggattacgggcatgagccaccgcacccagccacccgtgaaaagttttctgaactcagctcttcacctccacagccagaaggcatgggacctaatgggttagtctttgtcctgggccagcccggcgccctggcatatactcctgggtccaggttctcagcaagctaattcctgcacccagactgtggcatgggctggctcccctttctccaatactcttccccctcatttgccctggcttcctcatccagcttaaatgtcccttcttcagagaggcctccctgaccccccaacaccctggaggggggtccccacttgtcccactcccagcaccatcctttacagcatgtttcacttcttggaatcacgtctttgtttgctccattgctcagtgtctgtgtctcccaccaaggagcacagctgcttggttcactgctgtctcctctagtctcctctagtgcctggcacatggcagacagtcagtgaacccgtgatggaaccaaggtgcgtgtgccgcttcctgcgtgcccactgctgcactgtccggctttggaatgcatagcctaccacagacactgtgaaaggatgctggagagctcacaaagggcttagttttcacttggcgagtggtgcctcccaggctggggaggcaggaggatttgcctgtgtggggcctccgtaagctgaatactctagccgcgcagctgaacccaggttaggattttatccctctttgtatgtcatctgcatggctcagctctgagctctgtgcttcctcttctggcttccagagctgaactgcagctttctcagcatccctctatggcctggcctgactggccagtgaaggggtctgcccggaaggagtgagtgcagtggcatcccctgaggccagggcgatgatggcaatgactgtagcagggcagctctcgcgtgttggaagcttactcagcgcatctgctacagcattttatcttcccaagagccccatgaggttagcaccattgtcatcccattttacagataagtcaacagaagtttggaaaagttaaagtatttgcccaaagtcacatggctagcaaatatcagagtccaggtttgagtgtaagtccgtcggatgccagagccaagcttaatcactgggccaaatcaccttccgtggcttccccagagacccaggagccctcatacataactaagaagctgggctggccctgctgggggctctcagttccccatacggggctaaaaccctcctgaaattccctcttcagtgactttccagctcagctaagcaccccttggattctcctcagtaggatgaggaaggagggcagggaaggtctttgaatgacaggtaacattgccaagccccaggggaaggaaagaaaaatggcaaaagtggaggttagggcagaaaggaaacagatgcctgtgacctgggcacccaatcagagggagctccctccaagcatattgagggagttgctgtggccttgtcatcaggaacacgctctctgccccatccctggaggtttggaaaacacagcctggaaattcagaaaaagtcctccgagtgattctgattttcccctcaggatcttcctgcccagcccactggggtctgaccactccctgggtacttggcgacacttcccactgcccagtgccctttccacctctctgctcccattcctgaccccttacttcccacacctctgtcccgttctgctgcaggggtgctctgtcctgccactcagatgtggccctccagatgccattcctaccctggaggcagctgtaaggcccctggtcctgtttccacagcacctgagctatagctgggctgggctgatcgcgctgcactgtgagcacctgttgtctttactggaccaggtgctctctgggaaaggagctcgacaagctgaccggcgtctgtcccccatgcaggcgatgacccaggatgcagccaggggccacgacatgcacggaggaccgcatccagcatgccctggaacgctgcctgcatggactcagcctcagccgccgctccacctcctggtcaggtcggtccaagggagccggggaggtgtttgagggctcaaggaagcctcaggggccacggtgggcactggaccaggcatggaaactggcaaattctaggtgaaaccctgtctgtgtgacttgggcaagcctcagccttctcctgggcaggtgcctggcgcagcacttgatgtagtcagacctcagtgtctggcactttctcccttctcccacggcatcttcctcatcctactcagggctggctgccttttacttctggaagaatccatcgaatctgcttagaaaaccacaactgctgattctgaaaaagcagctgggaattcacaggcagctctccccagaattctcctgtttgtttgtttctagttccctcatagtcctatcctcctcttccctatagaataagggaaaactcagcagagctgcagagagcaggaggcctctatgtttcccacctcccaggactaaaaaacagggtgtccgcagtcccgggcagttgcgtctctgaaggctggcgcctggctgtaataattcttatgcttgtagagctttctcatgccccatatctcactggcctccctaacttctccgtgagtagccacccagtgctccttgaacatacctggtccctccgtacctcagcacctttgcacctgctgcctggaactcttccctgggaagtacacatagctggctccttctcatccaggtctcagctcaaatgtcgcttcctctgagaggctgtccttggcctttggaatgagacagacctggattaaagctatctcccattggctttacaaccctgcgcaggccacttatcctcccaggaccctggctctacttgccttgtctgcaaaatgggaataataacaatggaaccacttttctgaagggacagtgggatcctcaatgaagataatgtattcagaggcctagcactgtattggcacatagtaggtggtcaataaatggtagttttctttcttgcctgctacccaggttttgatggaggctaagctcatagggctggggagagggctatcgttaagcaaaagaatataaaaatatctgacctttgcaaattttctgacaacctgtgaccacatggacacattgttagaagcctctagaactttggaaggagcctgtacacgtgagaggtcctggagcttgagctccacgaagttcaagttcaatccatttccactcctgcggctctcactccccactccacacacacatacacacagcccctccctgctcctctgccccaggctgtcgctttaatttttaggggtttacccttgctgactgcagggaaacagagactgacaaaataagaaagtctggggaagttacagagtgacaaagtgctcatggcagcttttaaaatagaactcgtttagcttccccttcctgggctccattgccattcctgggaagctccatggctgctgtagactcagtcttgcgtcttgggatggaactcaccgtggctcctctctgtattcttccagcaatttctgcctctgttctaacctccctgcaactcataggtaccagaacccactgtaggaaaccagggcaggagaggttgtgggagaactggtgcttccacagggagcggagtcatagtgagctcattgtcctctaaagggcttcccagcctgcatctccaatccctgtgtctcttgcatatgcaggaacagggaatttgtcattatgtcttgatggggcatggtagggttgagtgttgatccagcatcttctcctagattcacttactttagaaaggagtgttccaggccgggtgcagtggctcacgcctataatcccagcactttgggagtccgaggcgggcggatcacgaggtcaggagatcgagaccatcttggccaacatggtgaaaccccatctctactaaaatacaaaaattagctgggtgcggtggcacgtgcctgtaatcccagctacttgggaggctgaggcaggggaatcgcttgaacccgggaggcagaggttgcagtgagctgagatcgcaccactgcactccagcctggcgacagagcaagactctgtctcaaaaaaaaaaaagagtgttccagtgcaataccacagaaaaatgttccagcataaatgccccttctttacagcccctgcctgagtgtgactggaagacaccagaactgaccccttgcctctctctccttttccagctgggctgtgtctgaactgctggagcctgcaggagctggtcagcagggacccgggccacttccttatcctccttgagcagatcctgcagaagacccgagaggtgagggggagtcaggaattgaagggcagatctggggtcggcctcgtagagtggagaaataggtcccagagaacatcattcctgggtgcctggacctccagaggggctgggcaaaggccctgggaacctgtgagttttgtgtttcggtagcacttgcatatgagaggtttctaagaagggggtgcattcagtaagaacacatcatacgcgagctagggtcctgagttcagctacagacatggcttataagtccagatatagactaggaagggagaagacactttacccaattcctttcctcaaaaagatccataaaaacaaagacaggaaagagaaaactgatcggaaaggtaaactgaggcctcctctcttagttcagtcaatggcttcatgacaaagaagaggaatgggtttagtgctgagctgggcttgggttccagaatagctgtgagtcccaaaagaggatttgggctcttttgtaaagaattctcttttatggttgtgtgtgtgtgtgtgtgtgtgtgtgtgtgtgtgtgtgtgtgttttaattattttaaatacatgtgatttggaaaacatgtcactttcactctcggctacctatccctgtaagaagatgcccaaggttacagttctggccccactatttacctggtagttttttccttcatcataagccaaccagctcagaagagctgaaccacctctggagcgcataacatataaacccaaatggaaagtctggatcaccgtgtagcaaaagaggagggtttcatagaaaggtctgatctgcaaggcttggtagacacattgtctattaaggataaagagaaggaagattctaaatttgagcctactgggctcatctagcagagaagacatgatggggctttctctgtatctccaacccccatgagttccaaaatggaccgagaaaccttctgaccaatgaattctaaatcatgtggtgtgcacatgtgtgcatgtggtgtggtaggttgtatcagagaggcagttcacaaaaggagaaatagaagttgtaaacaaatatgaaaaagcgatactaaaataaatgcaaattaaaaccataatgagacaaactttgcctaacaaattagctaaaaaacaaaaggtaaggccaggtacagtggcttgtgcctgtaatctaagcactttgagagactcaggtgggagaaatccttgagcccaggagttcaagaccagcctgggcaacatagcaagacctcgtctctacaaaaaaatacaaaaactagccagttgtggtggtgcacacctgtaatctcagctacttgggaggctgaggcaggattgcttgagcccaggaggtcaaggctgcagtgagccaagatcgtgccactgcactccagcctgtgcgacagagcaagaccctatttctctctctctctctctttttttttttttttgttaaaaaaagataaaaaccaatgcaggaaaagcatggtgaaaatcgtacttttatatatatagatagtataaatggcaaaatccttttggaaagcaatatgacaatatgtctcaaaggtcataaaagtctataaacatgttgataatctttgatctgttgactccacttcttgaactcctttctagattaataatccaaattatggaaaaaggaatgtgctgcatagtagtgttcattgcaaaatatgtaaaataccaagaaaataatcttgaatgtccacaatgaaactaataagatgccaggcatggtggctcacgcctgtaatcccagcactttgggaagccaaggcgggcggatcatgaggtctggagatcaagaccatcctggccaacatggtgagaccccatctctactaaaaaaaaaaaaaatacaaaaattagctgggtatggtggcacgtgcttgtaatcccacctacttgggaggctgaggcacaagaattggttgaacccaggaggcggaggttgcagtgagccgatattgcaccactgcactccagcctggcgacagagcgagactccatctcaaaaaagaaaaagaaactaataagttatggaggtctaccagaaggagtataatgcagctaaaaatgatggatattatccaagggcataaataaaatttaatatatgatacaattacatcataagatttattaaatggcttagggaaaattgactaaacatttggaaaaagatagagtgagatccccaactgacaccatatagcaggtgaaattctagttgcactaaatatttctcctttttttttggagacagagtctcagcctcccgagtagttgggattacaggtgtgcgccactgtgcccagctaatttttgtatttttagtacagatggggttttgccatgttggtcaggctggtctcgaactcctggcctcaagtgatccacctgcctcggcctcccaaagtgttgagattacaagcatgagccactgggcccagactaaatatttcaatttcagaaaacgaagcttcaaagaagataagaaagtatatatgaatatttacatgatccttgcatgcaaaagcaaaaatccatgaaggaaaaatcaacacctgtaatttctgtacatcaaaaatatttataaaattaaaaggcaaacaaccaactggaaaaaaatatttataacacaaataacaggtaaatgtataaccagaagggaaaaaaggtggtcttagagaccgtatagtaaaacagaaatttacttataatactatatgtaaaatacgttaggagtaaaaatatacacacagcttatagcttcgcagacacaggaacagaaaaccaaacaccgcatgttctcactcataagtgggatttgaacaatgagaacacatggacacagggaggggacatcacacaccggggcctgtcggggatgggggacaaggggagggagagcattaggacaaatacctaatgcatgtggggcttaaaacctagatgacaggttgatgggtgcagcaaaccaccatggcacatgtatacctatgtaacaaacctgcccgttctgcacatgtatcccagaacttaaaataaaatttaaaaacaaagaaaagaaaatacatagggcaaaaatggcatcagaagagggacattgaaacagctgtggttgggtttgggaggggaaattgtaagtgttttcgtttacatccattttccaaatgtttgtcatgtgattgcactattttcccctaaaaaaaaaaaaaaaagaaaggctagaatgaggaagaaccactgtattctgcctcagggagccctggaccccgtgaatgaggctcattccccttctcctcctctccacaggtccaggagaagggcacctacgacctgctcaccccgctggccctgctcttctattccactgttctttgtgtaagtccacgtgggccaggatgctggaggtgagggaggagggggaggagcgacctctatctggggcagagccctcacacctctggagataagcagagagagaaactgtcaagcagcggcatgtgaaatgggtttcaacccttagatggcttcagagcagccaccatgagaggcttctggtgactccatgtggccgccatggtgcctggcatctctgggctcccatgttggaactgctgtcactgtctgttcacaggccacaagagatattctatgtccacctcatttttcaccccagtagtcggtttcacccaatgtgatcaccccctgtattcaccagacaggggggcatcaaatgtgtacactgactgaatccatcctcaaaaaataaacatttacctgtaatgaggctatttaagtaaaggtggtttaggcattgaagaccattatccataacaagtgtcagcaatggcaccatttaccagtaaggggacagcctttcagagaggctcactcaagcattgggtaaagcaagtccctcccagtagagacaccctgggtgccatcttgcccatctgtaacccactccctgtgagtaacttccagttccacctgaccttgtcctgggacacgctgcggccaggaaatgtgtgtcttttgtggaatattccagaaagggagcagaagctgtctgggactatctgagccttttctcacctagatctctttgcttgttgcctgcctccatcctagacaccacacttcccaccagactcggatctccttctgaaggcagccagcacctaccaccggttcctgacctggcctgttccttactgcagcatctgccaggagctgctcaccttcattgatgctgaactcaaggccccaggtaagcactgaggcagctggcacgggggacagggctcagaaggtcagaatgcttccaactcctctgaaactgttttttgtgaccctccttaccttgcatcctttgattcatctctgccaacgccttggttcacaaacatggagtctcctcttcacagcaccatcaagcatctgatggttgaatccacacaagatgaaagtaaatatgggaggtaactcgaggagggattgttaggggaagtaggagcaggcactcagggcaaggagaccccaccttggcctgtgcctctgatctggttagtcaaggggtctccaaggctacccagatcagacagagaagcccccaggatgctgacaagagggctttgcatgttctctgtgccccaggaacaagtaggtaattgtgtgtgtgggttgatgcagtttgggttggggaaggtggctggtactaggaacaatgaccactgtgacaaatgtggacaagacccgggactcagttttcatgtgtggggtctgaaaagtaagaattcttcagaaattgcaggtgctgtcatagacatgcaaatcaggtctaaggaagctacagtagtgcaggagaaaacttagcaagtgtgatttactgagaagcggctcagcgaatcagtactcaaaggaataaattcgcaaaagcatctcaatagatgcctctaaaatatttcataaaattcatcatcattcctgatattcaaaacccctcaatatatggaaacgattactctagaagtgcttttaatatggcaacagcccaaggtaaaatactagaggcatgttctttagagccaataatcttcctcttttggcttataggtatttgcctatgcaaaaagacaaaaataaagaatactttctcttctgaagaagagaaattttaattagttggagctcaaacaattggttttctgtcgagactgagagaatcccctgaacaaagaattgtcagaactagaaaacaggtagctaagagctttttttataaaccagcattaaccagtgagaaaacataattttaaaaaatttacaatagcaattaaaaataaaaaataaaagaaattttaataacctatatagagaaaacaaactttgctgaagaatgaataattgaagaatcgtattgctgggttgaatcaatattgtaacgagaccaggtgttaggaaagtaaacgtaaccacaatcaaaataccaagatatttttaaaatttataaaatatatgtaaactaaaaaacataatatataaatattttacaaataaataaatttatatataaagaaaataaaaaaatctatttgaaagatttatttatgcacttagtatatattcattcatgtatttttaaaggagagtaagaaggaaatatttccattttttgaaggtactatagggctatagttattaaaatagtacactatgggtataagaatagatagataatggaagaagatgtaatatctagaaatatattaaatatacaaaattatattatatgacaaagtggcatcctcaaattactgatgaaaaaatcagtcatttcatagatgatatcaggataattggtagaccataaaaaatattgagttagaagactatctaaaaaggccaggtgtggtggctcatgcctgtaatcccagcactttgggacgccaaggcgggcagatcacctgaggtcaggagttcgagaccagcctgaccaatatggtgaaaccccatctctactaaaaatagaaaattagctgagtgtggtggcatgagcctgtaatcccagctactcaggaggctgaggcaggagaatcacttgaacccaggaggtggaggttcaagtgcctccgagatcacaccattgcactccagcctgggcaacaagagcgaaactctgtctcaaaaaaaaaaaaaaattctatctaaaaaataaaattaagagttctaatgcaaacataaaaataacttttagatacattaaaggtttaggtgtagaagacaagaccacaaaaactacagaagaaaaataggttgtattagcctggagtggagaagagctgccaaacatattccccagggcaaaaattataaaggaaaagactaacagatatgaaagcataaaatttaaagcttttcatatggcaagcccactttgagtgaaaggtaaatgacaaactgagaaaaatatttgcaataaaaattaatatatcaggccaagtgctgtggctcagacctgtaatcccagcattttgggaggccgaggtgggcagatcatgaggtctggagatcgagaccatcctggccaacatggtgaaacccgtctctactaaaaatacaaaaattatttgggcgtggtggcatacacctgtagtcccagctactcgggaggctgaggcagagaatcgcttgaacctgggaggcagaggttgcagtgagtcaagatcgtgccattgcactccagcctgcagacaaagcgagactccatctaaaaaaaaaaaaaaaaaaaaaaaaaattaatatatcaaacccatgaagaggttttttttttagtccattaagaaataggcaaatacacttatggaaatatgaataaatatgattcaagtacatcaaaaagaaccccccaaaatattcaccctcactactcataaagaaaatgcaaaactaaagagcaagactcttcttccccccctatcaaattggcaaaaattaaaaagaaagaacaaaaatgccagcgctggtgaggaatggggggctgtgtttgctaaagcatcagaaagcataccctttcacccagcaattccattcctcaattttatcctgatgaatccctatggatgtacaaagatgtagctacaaaacaaagacgttcatcaacgcatccttgctaataatcaaccaatgccaaaaaacctaaatattgaacatggttgagtatactgcggcaaagtcatttggtggaatgatattcaattattaaaaatgatattgtagaaatagttactgagctcaaaagatgttgaataactagttgagcgaaaaagcagtccccccaatactaagtatgttataatcccatttttgttttctctctttctaatgtatacatgcaccaggtcctgtttagtactggcagcgtttaattctcaccttacacattaaacacacacagaacagaagtaccaaatcttattccccaacaacttatggaccctagaaagctcaagactggcttgtaaatttctttggaagtgttcataactttcctacccaaccagttacctgatctgtctgcgccccacccagtcagctgacctgtctgtgcctcgcccaatcagctgatctacctgcccccccatcagtcagctgtctgtcattacaaagagcagagcaagtacagctagggatggccaacccccaagtctacctataacaaggtcctcacctcatggtagagacttgggtggagatttaggacatcaggaagacccttaggaggcgctggactctgaaaggtaaaagctgggtttgccaacccagcttcccaaggaaaggaacaaaccagttaaaggaacaaaccctaaaggaacacgccagtttaaggtcaaactccttcattccctcccacactccctcccactgtcccccaaaacaaacagatcagaatgccttctgagcttctggttggtgactgaagttcctttgctaggaggcaatgcctttcttcctttcgagtacgctcagagaaagaatttaaaatgcaaatgtcttggcagggcgttgggtttccaccaaagaccgaaatgattcttttttattttgaaaaggataagagagttgtggggttgggggaggggattacctgtggggagaccacttcccagtttcaagtagaaccggctgtccctcctcagctcaatgcacgctatgccttgagatatttttgcaggcggctgggtagaaactccgttctgggcagcacagaaagcagatgtgccacggaggtgctggcggtggtgaggccctggccctggaatgataacatgtgaagcctgcagcacaagggccaggcagggcagcagctggagccggaagtagaatgagggtcctttggcctcagagcaggggggactcttggaaccatcactcactgctgatggccttttcctccacatccttcccgggaccatgtgaagcttcagatatcctggtgaccaaggagaagtcagatgccccaagagggcagctcaagccaagtacccatggcaggaacctctcctcttccagggaaagcagaaccaaaataggaaaccatcaactctccctcgtttcggggaatcattttcaaacagttccaaaacctcacacatacgtaaatatacagtgagcctgtgcccgctcattaatgaggaaaccagcacgatgatagagctggcttaaaggaggatccaagaaactgagatgagctcctcatggaagctagagtaagactcaaagttagataccaaatagttaacatcacagaggggaataaaaccataacctttgaggttatcttttctattgaacaaaaatctcttgcaacttatctcacatccaccagttaaccttcaattttaaagaacctaagccctaattaatgacagatagttaaacaaaattaccttctacatgacccttaaatgagcttgttgaaaaatactttcgcacgatttttttttttttaagatggaatctcgctctgtcacccaggctggaatgcagtggcacgacctcggctcactgcaacctctgcctcctgggttcaagcgattcttctgcctcagcttcccgagtagctgggactacaggcgtgcaccaccatgcctggctaatttttgtatttttagtagagacggggtttcaccatattggccaggctggtctcgaactcctaaccttgtgagccgcccacctcggcctcccaaagtgctgggattacaagcatgagccaccgcgcccagcctttcctatgattttcaacaggcctgctgcccaattcctgagtccctcccacccccagttaagtggagaaagagctaggatggaggccagggaacttgaatgcttgaaggagaggctgaataacttagtggcttctagtccttgggaccagaccattgtacttgcaaatactgggtctgctacttactaactgtgggccttcagcaagacgtttagcttgtgagcttccgtttcctcatctgtaaaatgggtgtatagcaatgcctccctgtcaatgcagttagtgaggattaatgttggcctaattgatttcacagtgctgggggcagtaagggttgcagtggtgttagcttagaaggtaggtcctggtaaagtcacagggagaaatgagaagggacgtggggaggtgggccctccccccgtgaagtcttagggacccagttgccatggaaatgaatgaaacagtttatcctgctttgatgtggctgggtggcagaggaagtgggcctgttatcaaggctgggggcctccccctgcttcctgactccacccccgtatgatcgcccagtgcctcaattctggaggtagcaggaaacctcacgtcagtgccactgggtcctgcccaccacagccctcttgggctcagcccacatgtttattgaatatttactctatgcctgcatagctgtgccgaccacaatactttcctgcaaagaatttacctgtaaacctgggggatgacatggggcatcttacatgcaaaccgctctgcaattttcaaagcacacagacctcaaggattgcaccttgcctgtaggggaagaaggaaaagtcatattcttctcattataaaatgggaaatgattttgagaagaccaagttcagtatttcttgtttaagctacaaagtgaagtatgaaagagggaacacgaacccttgtatgacagagacctacacttcgtcacttattagttaatgaccttggacaagttccttagactctctgagcctcctggtcaaaagcaggattataattatcgttgatgatgatgacgaggaggacagcaatgatgccagggttgcttatggcatatgaagcaccgtcataggttggtcccatctaaccctcagaacacctccctgggtagttactattattcccatttttcagatgctgaaactgaaggctcgacatttatgtaacttgccccaggtcacatagctgacaagagctctaccacttgaacccatatctctttgataccaaaagtcatatcccatccttttcacatttgcataaagctgtgtttctaccaagaggcactgacagatggctgcatgaccctgggttgcccaggctgtctttttataaacgctctcccccttggggaatttctcctgcccctttccctttgggttgcttaatatggcttcataccctttgacttcctatcaaatggggaacaaacctgggttaggtcagttttgcttatcagcgggtggcaggtgaattcagaatgttcttcagtggtgttacatttctctggggacattactgatcacagacatttggattttatactttttgtctctggttatggaatgaaaggttagacctcttgaaggatgtcaaacatcattgactagtaggtgggggaggtttagggaaaagagtagaggcaggtgttccagaaaccacacggtgtgatcagttaggactgagctggctgcctatagcagaaagccccaaacaactatgccttaaactctcaggggctatttttcttttacacacagacacacagacacacacaccacacacacacacatacacacacacaatctgtatgaaggcaggccagcattggcatggtggccccatgaacatcctggaccagccttccctcatctttccactccaccatccttggcaaaagtcaccatcttcaaggttgcttcttggtctaggatggctgctggagtgctggccatcatgtccacattccagttaacagaaagaaggaggtgaggggggttgcacctaacacattctgcaagggaggttgagaaattgactcatcaactgggtacaatgcccagtgtcccactcataaaaaaacgaggaatggatattgagtagatgcctagaagtctctgccacatatgacttacttgtaagagtagcccataaggcctggattggtcctgttagggtgactctcaccagggtggtgaaagggtgttatgaaaggtctcatctcagttcgcccccacaagcccggtggctctgcaaagctggagacctcatcccacaggcgtttccgtggggtcactgcacctgttcagagcagcatatgtcttgtggtggcactggcctttcattccaagaactcacatctcctctgcctgcatgaaggcctgcccagtgggttccttccccccagtattttcctcttggctttctagccacattccttctcaccttccccctctctgctcctggactcccggtggccagagattccgagcctcccttgttatgtcttctcctttgtttattcacctgaaatccgtgcttcaccttcctgcccaggccctgctgaggcccacagccatgagtccccaattcctccagcctctctggagtccaggaccctggggatggggagcaggaaggcgctatacatgggacccccagtgaggagggaagtgtaagagaaaccctgctgtggggagtggtgtgcctggtgtttgcttcagggtatgaggtaggtcaaactgtccaccatgagttgatattaatcatagttgctggagaaccaaacctgatctagtctcatttggagattgcaatgccgttggggccgggctctgcttccaccctgttgattccgtggaatcttggtgttccccttgtaggaggaaactgagtcagatgtggttgctccctgcctcccccaggctcaagtacccacatcaccctcagcatggacctgtctatccgtgtgtcattaataccagtgcttgcttgatggcagatgtagtgattttcctgtgtcctggatcttcacagtctgctgttctgtgcaggatccccatctatttgcaactttgaaaaagagtggaagctttgatgggtgaacaaggcttaatggcgaagggccttggacacctgggccaggagtttgaacttcactatgagtgtgttctgcccactcaccccgttcttcgcctgtatggggtgacttctctcaatttcttacttgctagagcctgacgtaggaacaacccaggcaagatttttgtttagcccttgcaccaatcttgatctaagaagctaaactcagaaagttgtttccatctgctaaggtgaccaagaaagggtgtgatctaagatcaaagggagagaggtgtctgtggatctgaggctccccagtgcagcctccctgtttggggagtggagggtggagttaagggtggtctcgaaactgacattgcacaccccacttagcattcatggcctccctggcatcaccaggtaacattgtgaaaaccaagcccatggagggtgctgggagatatttccaacctcacagcacataccagcaaatggggactcggcagtacaatctctaagccaggctcaaaggagtcagtctgtacaaaagcttatattatcaaagcctcctccacattgcacagtcttttctaatgtgttcccagctcaggccccagcccaccagttaattaccccaaaaccccacaccccatgctaagcagggaggtccattaccaagagaggccaaggaagggggttgatggtgttttgggggtgagggcgggagtttatctgatgatcataggttctgcttgggaactgttggtaccttgggtattcagcaccagccaaacaactctgaaaatcactctctctgggtcagagtgtgccaagaggcacaggtatcctcctaaatatcccccattaaagcaacgggacacatagagcaacagtcgcgtggagtccacgtagctcatacgaagcagcttctgattctaactgtagcacaatcctaaaatgagactaaggcacacgaatatagatgttagagactgctcctcatcctagagacaagaggagacgaaggagcttcaaggagaaggttgtcaacagtaccaagcactccaaaacaaaagttcaagcagcgtgaggatgaggttgggccgttgggtatggggacggggaaaatgttgccaagcttcaggagagcagggtcaggagggcagaggggttggaagccaatggctgggcgtgttggaagaaagctgatgtggagggagagcgacgtcagagtctactgcttcctggagtatgaccgcctggatgtccttggtcaacagaggcagaagtggcggtgaagaaatggggtcagcggggtgtgggttaatgttaaaagcattaaacagtaaaagaaaagagaaataaggtcaagagaagattttgcgtatctatgtgttttatggtcagggagatggggaatatctgtttgtctccgctatggtagctatggtattatgtagaggtggttggagagcgggtgaggatctcttctctgtaatgcacgtgagtggccaccagatggtgtcccaagtcctgatgtaatagccactgtgtcaaggacttatctggcaaaatggaccaaacgttaacttctaaatatgcgatgattacataaagtaaacatcacgcaaaaggccaaaaatcaaagcaattaggtcccaagttagaagagcattatgtggtaattttctgccttttactaaaggaacctcacagcctttctatttatagctgtctttaaaccccaacccccgccctaccccgcccccgagacttgcacttctgaggggacgtcctgcaggttcccagctcagtcccagttcagagtggccctgctctcgatggggactgccctgggcctatttccaagctatgacaagaaggcgacccaccccgctgggtccccagcccctgctctgtgagggagtgaactcccgctttctgtttcatctccttgtcatggtggaaacagaactgaatgcacactgtaaagcgactactgtgcacaacagagtcaagctgcagaaacaaaaggaaaacctttggtgtgtttcttctcagcatttggaagtcagaggagacagagagggggaagggccagggagaaaggggatgcgggctgggagaggagcctgggatgcagatgcctcagagcacggaggacgccaggccagaccacagtccttcccgatccccggactccaggcagagacggggaggtgcaggtggggaaactcgaaacccactgcctggctggagctaaggcaaagtggatgggctgagaggtgcctggcatagcgggaaggcaccccggaccgggagagggggcagcggcagggaccgaggagtagccctgcggcacaagacggggcagcctcctgggcccaggttctgcctcctgcgatgctccgcctcccagtctctgaagagagaaactttaagttggtcaagccatggtggggcctgggaatcatagactgttaaaggcctcagaggccacggatctaatctggcccttcccaggagaaactgaggcccagggctaaagtgacctggccaaggccacgcagaagagctggaatagaactcaggcttccgacacgggctctcaccctggatctctttctctccagctaggctgcctccaagcctggagccgggacctgagccacaaggggagtggaaagctcttaggaagggagggcagtcagagaggccacgggaatccagaggacagcgaggcccaggaccgagttttggtgttggaggtggaggtggggatatgactcgtgaggtgtaaaaggacgcatagaagcaaactgctaggcaccctggagggtccacagaacagcttctctgcaggttcgcctgagctccatccgggaatttccaacctgattgtccagtgcttggctccccacgaggcacacggacgatgctgaaggaactgatcagcccatgaactcttttcttcttgacccacagggatctcctaccagagactggtgagggctgagcagggcctgcccatcaggagtcaccgcagctccaccgtgtgagtgctcttgggggacggagaaacagtggggagggagtttgggacccctgcactgttccaccttcaccctcctcccccactcaaacatccagtgcccccaccccctgtccaccccagccagcaacaaacaggcttccagggaactgggaaccccctggcactgctggtgatattttgtgtccaggtgtgtttttctaggctgacggtctttcaccagattcttaaagaggtctgtatcaattatgccaggtgttaggcacacagttcccccactttcattattttcagatgaggaactggaggtcagagaggtcaagcaacttccccaaggtcacacagcgagcaagggtacgagccagaatttaaccctcaggcttattcagaagcccatgatatttccacaatctccttctgtctgttactaaaacagtgtttccaaacttttttgaccaggacctataagaaaaatccattttatatgacagcctgatacacaaacacacacacacacacacacacacacacacacacacacagctgaaatgaaatgtatcctggttacataggatgagctctgttctattctatttcatttaagaaacaaatttggctccccagatgatttcattacccactcctgtgtcctgacctgcagtttgaaaagcactagagagggggtgcccattaggaggaccctctgcaggccttgaagagttgggtgctgtctcaccttgacatgttgggagcccagggaccccggccttcaccacctcagaaattataggcccccggccctcctcattcccagccccaggggttcacttcccactcactcccctgagcaacacttcttgacttccctctaggtgaaaacaaacacaaacaaaatgatagatgttgagacagagggaaaggatgctaaaatgttgtagtttagtaagtaaataagattcctctgggggagctggggcaggtgggctgatgaagaatcatcaaagccctttagacctttattcggactccaggcaccatcctaagcatggttacatgtgctgactcatttaatcctcacgttaaccccgtgagaaagggatttttcacataagggaagtgaggcaccgagagatttgtagaaagagcttacagttgggagatggtctcactttcattatctgtaaattgagaatgatgataaattcttcgggagagaaattatgcaagctggtgagggcaggggctcggctgggctcgttacaaggttgtaaggggctgcttatacaagcccacctcctttttcttacagatagagaaatcaaagtgagtttcttcccaaatgatggggactttgacagagactagtcctgtctctgccctgtccccgggcaccgacgtccccagagtgtggagggaatgctgccctgcgtggtgctcctttgcactgggtttaaacgcagtgtggaattgagagagcaagagctctcatcacatgcagctcatactaaagcatttatggatacaaagccgccatggctcgaatttgcttcgaggtcatgcagtgatggaggggttggcatgggggaagtgagaacagccgtgcgttgttaactgtaaacagagtgatcagcgcctcagagcccacgattcttttaatttggggtatgtttgaaagtttccatagtagccgggcgcggtggctcacgcctgtgatcccagcactttgggaggccgacgcgggtggatcacgaggtgaggagttcaagaccagcctggctaacacattgaaaccctgtctctactaaaaatacaaaaaaaaaaaaagttagctgggcgtggtggcgggtgcctgtagtcccagctatttgggaggctgaggcaggagaatggtgtgaacccgggaggcggggcttgcagtgagctgagatcgtgccactgcactccagcctgggtgacaagaacaagactccgtctcaaaaaaaaaaaaaaaagagaaaggttccataataaagaaatgtaaacactggcaccaagagggaatctgggtatccatcgggaagggaggtagcagtggccaggcacacagtcccctcccagccagtgaaagcctgtatcatggctttgggctgattagaaaaggtgtccctcataagctcaggaagaagatgcactctgacttggcatcccctcctccgggcagatgcagccccacggcacgaggaatttcatgtcccgctcgccccagaccacactgcacagcaccacgttgctgtccagctccccctgaaaactgatcgcttggcttcaagtcaccttgcctaaaatatgatcctcatttgagtaatcttgcatccactcagctgtctcataggaaaaaacgtttatataaaaattaagtaaatttagttttaaagaattaagttcaattttgaaaagatctttgaaaacaacagctgaaaaatgctcagcagtgaaccccacgctttcccctggaaacctggaccctggagctgttgcttctgtcctggcctcctgtggtcacctcctcgagctctgcctgggcttgaggaggccctggtctcagtggagctgagcaccagcaggcacgaggggggtggctgcactgtggcatgctgcgcacccctgggtgccatagccggtcccctgtgtccccagcaccgtgctgctgctgaacccagtggaagtgcaggccgagttccttgctgtagccaataagctgagtacgcccggacactcgcctcacagtgcctacaccaccctgctcctgcacgccttccaggccacctttggggcccactgtgacgtcccgggcctgcactgcaggctacaggtatgtacctggggcctggggctctggtggagcacctctctgaggaggtagcaccctctccctgcttcatctcagccacggtctccagggtacacttagtctcctgcacccaggtgacatggcagggtggtggctggagggctgacctcatagagggtgtttctggtgtgctggatcctaaccagctgggtggcagcctgggcagtaggactgggtgctgataactggtgcctcagaagatggcatatgccataagaacgagaatgagctttgggctgaagacctggcatctaggcctggctctgtcacaggtgtcacaggtcggctgtgtcaccccacacagctccttcccctctatggggtacagtgaggagcgctgaagtccctcctaactgcagtgccgtggctctggatctttctctcctgaccatttcctgagaatggaagggcagggagaggcctggctgcctggccagctgtgggtaggagatgggtgatgaggctgggaggggacagatcactgcctccctcagtaagaagctagcaactggaacaggtggacagctagctcacggtccaggagcaaagcccatctcctcctggggtttcaggccaagaccctggcagagcttgaggacatcttcacggagaccgcagaggcacaggagctggcatctggcatcggggatgctgcagaggcccggcggtggctcaggaccaagctgcaggcggtgggagaaaaagctggcttccctggggtgttaggtgaggctcttgggagaatggggttctcccacattccccatggcctattctaggtcccaaggtgcacggtccaggcgggcctggtggctctgctccacacagtcactcagggactcagcttcttcagcatctcactgctctgccatcccctagggtgtctcattcctgtctataggggcagggtgggggtgctatcatgatggcagcttgtgggaagaggaaaagagagtgcttacgagggcaaaggctgggcttttctgttgaaggtgatgcagaagctgggcacatcacttccgctcatgttcctttgagcccgccttggtcacgtggccacatcttgccccaaaggagcctgggaaacatcgtctctatgactccagtaccatagaagggagcacagactttgaggaaccattagcattccctgttacaatattcctcataaaaaccttctgggctagtactattattctcccatgggcacattgtaaaatgaggctcagaggttgtggtttggccacattcgcacagctcataaagggcatgccatctacatggtgtgcttgaaagaagggcctctggcttggagcctggcaccctggctgtaactcagcctcagcctatccagctacatatccttgtgccgatcctgtcccatctctggtctcttctccaaggcaaggggactggactggccaatctccaaggcctcttcccagccctcttctcctatcctccctgttcttacagacactgcaaaaccagggaagctccacaccatccccatccctgtcgccaggtgctacacctacagctggagccaggacagctttggtaaggagccggggccctggtgacacccatgccccacactgcctgagctgtgtttctggtcctgggtccatgcagctcccaccccgtccccaaagctctcccacatgagcaggctctaagcagagcaagggggcagtgctaggagtcctgggctggccctgagtcctgctgtctcccctccaaagggaatatagaaggggatccggggcccagacgcccagacagtgctggccttgcttccctgcagacatcctgcaggaaatcctgctcaaggaacaggagctactccagccagggatcctgggagatgatgaagaggaggaagaggaggaggaggaggtggaggaggacttggaaactgacgggcactgtgccgagagagattccctgctctccaccagctctttggcgtcccatgactccaccttgtcccttgcatcctcccaggcctcggggccggccctctcgcgccatctgctgacttcctttgtctcaggcctctctgatggcatggacagcggctacgtggaggacagcgaggagagctcctccgagtggccttggaggcgtggcagccaggaacgccgaggccaccgcaggcctgggcagaagttcatcaggatctataaactcttcaagagcaccagccagctggtactgcggagggactctcggagcctggagggcagctcggacacggccctgcccctgaggcgggcagggagcctctgcagccccctggacgaaccagtatcacccccttcccgggcccagcgctcccgctccctgccccagcccaaactcggtacccagctgcccagctggcttctggcccctgcttcacgcccccagcgccgccgccccttcctgagtggagatgaggatcccaaggcttccacgctacgtgttgtggtctttggctccgatcggatttcagggaaggtggctcgggcgtacagcaaccttcggtaagagccgtaatgcggagcatccctctgccctgggtaacagggttgttgtgctggtggaatctggggcctgaggcttagggccccagaggaaccaaaagttcccttatttatttttattttattattattattattattattattattattattattattattattttgagacagagtcttgctctgttgcccgggctggagtgcagtggcatgatctcggctcactgcaacctctggctctccagttcaagcgattcttgtgcctcagcctcccgagtagctgggattacaggtgcacaccaccacacctgactaattttttttttttttttgtcttagtagagatggggtttccctctgttgaccaggctggtcttgaactcctggcctcgggtgatccacccacctcagcctcccaaagtgctgggattacaggcgtgagccaccatgcccattccccttctcaccatcttcttcttgccaggcggctggagaacaatcgcccactcctcacacggttcttcaaacttcagttcttctacgtgcctgtgaagcgaagtcatgggaccagccctggtgcctgtccaccccctcggagccagacgccctcacccccgacagactcccctaggcacgccagccctggagtatgtccccagcctgggccaatggtcggggaaagtagagttctggctacctgaaggaagccgattggaagtcatggaaagcaagcacctgtgttgacagggcacctccccctgcctggccctcactccctgcacttggacatgacattttgccatatgacaaagactgaaagttgtcatacttccccaagggcagggagaagctcagcatggggctgcaggtgccatccaaggccctggagctaggatgggcaggcctcctggggagctgggatgatgactcttgttctttgccctaggagctgggcaccaccccatgggaggagagcaccaatgacatctcccactacctcggcatgctggacccctggtatgagcgcaatgtactgggcctcatgcacctgccccctgaagtcctgtgccaggtaagtggccccgtggttgcggaacagggtccactggctgcagtcacccagcctcacttagaaggccctggatttagggaatcaggcttgaggcccccatggaggacctgggccctcttggaaaagatcagggagtgtgggtgagaagcaggactgagcctgaactcaggacactgagtgtgagagctggggtcactgcagtgatggaggagggccctcagaagggtccgggggacctcagatttcagcccccttcctcaactcccgcctttgtctggctaagccagaagcctccctggaggccagtgggtcaggtgaggggcatggaggctgggcaccggccctcccctgcttcctgcttccacctcaccagctccccctgactggctgcctctatgtctctcttctctcttcctccctaattcttgctccttcttaccatctatccacccacccatctggcttggctgccccttccctctggccacagcagtccctgaaggctgaagcccaggccctggagggctccccaacccagctgcccatcctggctgacatgctactctactactgccgctttgccgccagaccggtgctgctgcaagtctatcagaccgaggtaaggcctccctgccccgaaccgcctcttccccacctgccgggcctgcaaggccccacccctgccccgggagagccagcaggtctatgctggaggagccaaatgggcccctccaggaggttcacactgatgtacatgctcctgccctctccagctgaccttcatcactggggagaagacgacagagatcttcatccactccttggagctgggtcactccgctgccacacgtgccatcaaggcgtcaggtgggtactgcctgagcagagacagacggtgaggcggggcctgggacgcgaaacgtggagctctgtggaggtggggttacctgggaggtggggccatgggaaggtggggttgcacaggaggtaggcccctggggagacggggttaccgggaggtggggccatggggtggctgggtgacccggtaggcggggccctggggaggcagggatacgggaggtggggccacgggaaggtagggttacccaggaggcagggccatgagagggcggggttacctaggaggcagggccatggggaggcggggttgtccggtaggtggggccttggggaggcagggttaccgggaggcagggccatggggaggcggagttacccaggaggcggggccctggggaggcggggttacccaggaggtggggccatgggagggcggggttacccaggaggcggggccatgggagggcggggttacccaggaggtggggccatgggagggcggggttacccaggaggtggggccatgggagggcggggttacctaggaggcagggccatggggaggcggggccctggggaggcggggttacccaggaggtggggccatgggggggcggggttacctaggaggcagggccatggggaggcggggttgtccggtaggtggggccttggggaggcagggttaccgggaggcagggccatgggaagatggagttacccaggaggcggggccctggggaggcggggttacccaggaggtggggccatgggagggcggggttacccaggaggcgaggccatggggaggcggggttgcctggtaggtggggccctggggaggcaggggtaccgggaggcagggccatgggaaggtggagttacccacgaggcagggccctggggaggcggtgttacccaggaggcaaggccatggggaggcggggttgcctggaaggcagggccctggggaggcacggttaccgggaggcaggaccatgggaaggggggttacatgggaggtcgggccaggtggaggcaggcttacccagcaggtgggccctggggaggcagggttacccaggaggtggggccctggagaggcaggaccctgggaaggtgtgatcacagcggagatggggccctggagaggcaggaccctgggaaggtgtgatcacagcggagatggggccctggagaggcaggaccctgggaatgtgtgatcacagcggagatgggccctggagtgatggggtcactgaggaggtggagatccccagaacgtggagccagagagagaggcagggccttggtgagacagatccctagggagtcacggtccatgtggtaggggatggggaggtaaggcccagggaggcaaggccactgcgttcgtgaggagccggggaagccaggggtagtgaagggtctgtctgtgtgtggcacaggtcctggcagcaagcggctgggcatcgatggcgaccgggaggctgttcctctaacactacagattatttacagcaaggtaagacccgtgctggggctccttcccctccaggatctgctgctgatacttcctccgccagagcttggacccagagctggactcgtgtgttcctgggccccagtctttacgctggaaggctgcagcaggctcccctggatgctgagagaagcagagaagggaaggagtggatatctctgtgcttcttggcctccaaagcctctctcccaccatgttctctgcccccacccgaatgcgctcagcagcagcccaggggtaggggtctgctgggcctggctacagggctggggctgaaagggggaaagggaagccttccagaggcacctcagggagaagccagggtctcggggggccagtgtgcctggcaggctgcatgcaagatgggattggcgtgagaaaggagtgaggagagctgtggggaggtggagggctgtccatgacatgccagaagacatgagttctctgagcaggtcgcatcccaaggtccaggctgagggaagcttggcctcacaggtgggcttcttccttcggccattccaaagatatcctcttagcacctgcccatgctgcctctgtgctgggcaggggaaaagaggggttgagcagggaagcctaggcctcactttagcttgtctagaggagggagacagacaagaaacgaggaaacaaagaaatagccaagataattccagagagcggcaagtgatgacaaagcaataaaacagcagatggacggtggtgttggggctgcagtgcgtttggcagtgaaggaggtgggcaggaggcaccgacactcactgtagccacatgccaggtgcttgctagacgtcttccacagcccaggcactgttctaggccctggagccttcctaagagtgaacaaaggacagacgtggtcccaggagacctgctggccccctggagtgggtggtaggcattggttcgatgatgcacacgatgtaaaattacaactgtgacacatggatgaggagagggacacgggatgttcctaagtggcaaaccgaacccagtcaggagagttagtagtgaaggcttccttgagaaggcacctgagttaatattggagggaaaaccaggaattaattaggctgagaagagaggtgagtgctctcacagcagcagaaactgcatgtgcaaaggccctgtggtgggaggcagtgtgaacaccttgaagcactctgaaagaagacccccaggctggagcagagacagctggtgggaacatgatgctgaggtgaggctaaagaaatgggggaccagcataccaagagccttaattgcaatgaaaggagttttgtggttttttgtttgtttttttgagacatagtctcgccctgtttctcaggctagagtgcaatggctcaatcttggctcactgcaacatccgcctccctggttcaagcaattctcctgcctcagcctcctgagtagctgggtagcaggtgcccgccaccacacccggctaattttttgtatctttagtagagacggggtttcaccacgttggccaggctggtctcgaactcctgacctcatgatccacctgccttggcttcccaaagtgctggggttacaggcatgagccaccacgcccgacccaatgaaaggaattttatcctagtcctaagagcagtggatatccattaagggggcttatgtttgtggtggggctgggaatgcctgtgacatgattatatctgaggcttggaagctccctctggcagctctgtggaggacagataggaagggtccacaagtgatgcaggaaggccagttaggaggctgttgccatggtccagaagagaaattagggcagcagcctgcactagggtagtggtggcagagctggaaaggaatgggagacagatgtgagtgatgtaatcagcagggcccatggatgggttaggaaaggagaggccagactcctggagtcactcctctgtgactggcagcaccatcttctctggggggaccacaggaagaggccggggtccagttggggaagagcttgagtttgggtcgggacatattattgaggttgagaggccttgagaggtataaggagacagtgagaatagacggctggctgaacgggcctgactttgtggtgaatatgaagatgggtggacagctgctaatggaaaaaggtcacggaggagactcctgaaggggggaagcagggaatacaaagagcagaggaccaaggggagaaccttgagcccttcatgatgtaatggcgggcagagggcagcgatccagcaaagcagagaggcaccagccagagaggcgctagaaaaaccaggaaggtgccatcacgaaagcccaggagaggttttcaaggaggggagagcagtgaactgtaaggtcaagtaagctgaggaccaagaagtgttcttcggtttaacaacatggaggtccctgatgacagagacattcacacaaagacttgaagagggggttcaggtctggctctgccagaaacagcatgtctgtgggcccaacccttcttcactctgggcccggcaggagagcttcaggaccacccctgcaggtgctctcagctcttgtacctttcaacctggtcacagaggctgctgacccctagaccaagccagtgacgtgagctcttccctggagtcatccaggtctatccagggtggtacaggggccctggtgaataagagagggctttctggggatatgctaactagaggcaaccccctgtcactgatgggccttcaaagagaaggcagcaggcaccggggcctctggactcagagggtctggctacactgcatttccagggggccatcagtggacgaagtcgctggagcaacctggagaaggtctgtacctccgtgaacctcaacaaggcctgccggaagcaggaggagctgggtgagtggggtggtcagtgtggggtgtgcagtagggaggtgctctgagcctggcctgagtgtccttgcccctcagattccagcatggaggccctgacgctaaacctgacagaagtggtgaaaaggcagaactccaaatccaagaagggctttaaccaggtacgggcttccctctccttccagccataccctcaagagacttactggagcgtgcatgtgcgtatgtgtgtacgtgtgtgtgcacatgtatgtgtgtgcatgtgtgcacatacacacccgtgtgtacatacttgtgtgtgtgtgagagagagaggagaggtgggggaggagaggcagggtgaggggtatgatttggggatgcacacaggtgtggagtgttgcggggtgtcggggaggtaggggtgccctgtgagaggacgcgtgtatgtggaaaagttgtggggtgggtgccaggagagtcctaagactctgagaccaaagaaagcaggctctggatcaggggacctggggctgctccggtgagggcagcaggcagggcaatgtctcctcagggggcacttgcttcttccagatgctggagaggaggcaggggctgatggaggcctcaggctccctcctgtgacctggccattaaccctggagcgcagtcagacaaacccctgccctcccacacccctagaagtggatgggcagttctgagaaaaggaactgccaggggctggcagtgttggatggccagggatttggggctgacctgggccttccttccagattagcacatcgcagatcaaagtggacaaggtgcagatcatcggctccaacagctgcccctttgctgtgtgcctggaccaggatgagagaaagatcctgcagagtgtagtcaggtaggaaaggggggtcctagggaggggagcagtttctgctcccaccaacccagaggcctggaaggagctggaaggatgggggcctgctctgatccctggcccctgccctgctgcacagatgtgaggtctcaccgtgctacaagccagagaagagcgacctctcctcaccaccccagacgcctcctgacctgccggcccaggccgcacctgatctctgctcccttctctgcctgcccatcatgactttcagtggagctctgccctagtgtgggcccagcgccagactggacagaagccctggggcaacctcctcggccacccctccaggacagtccctctctgtggagaactgaatggccctgtgcagagccatagtcccactgtgggtcctgcaatgagcaggggctgggagtagagggtttctggggcctcagggttctgggaaagcaacagctatcagagagagaagggccagaccccatagcctcttagattcctggcagtagaaggagaaggatgggtaaattgacctctgaagtccctgaccattagcatggtctaggatcctttctagaaggaagatctgaggctctggtgctcagggggatggcttgggccttttctctcaaccttggctgagcctaccccttactttgccaaagacttgaggaccctgtatgtctggagttcagtcccctcctctgtggggctcaggtgattgaaatgtggatgaaacatttctctacttcaagaccacctctccctgcaaacaccacacacacatggcatgcatgtacgcacatgcgcacacacacacgcacacacctcaataatttctctcaagtttcctgagtctccagaaaaacagcactaacgctggacctgtctactctcagaacccggcacagattctctcttgatctccttttggaatctgagattcttagaagacaggatagggttaaatttagtagcagctcagttctagctaaatcactagaggaagttaattaactttaagccttcatttctccagcactaaaatggagtggagagttggggtggaaataagacatccttaaaaggttaaattgtctgcaaagcacctagcccagtgccgagctcccagtaggtgttcagtaaagcttagtgcctgactttctgaacactgattcctcctgtttggagtcactgggatactctcattgccgttgggatgttcctcactccttcccagttcgtggctgaggcagaacccagactgaagagggaagagacattccagaggaggattgccttcgtcagggtaaggggtgggctgctcaggggccctacccttcacccccttctgtatcagattggccctcccactcccatctcactctgcgtgtacaatcttccatatccgcaagttcactggcactcttctggcacctgggcaagatcccagaacagaggatggagtgactggcctcacagagcttagtgcccgactcaggggaaatgggactggtgcatgggaaatggtcagcctaggataggacacgagagtctgaaattcaaagcaaccagcttgaagtggtttgagaagctggaagcaaacatgggctagagagatagggcagaagtcaagacgaggatctggactgatgtggagaaagtagccacggaagcatgaactgtatcctgcacaaagtccctcttccccgcctcctaattcattatgcccaaaaggccttacgtgaaattccagcccagagtactcatgacttgagagacgtggacagagccagcttctaccttgcctggccgtctctcccctgtcttaatgtctgctcttgctctaagctccagaagagtggcgggccatgtatcttcaatatgtttttgctgtatgggcaggttgtcttattatgtgatcaacagatgtccaggaactaatgagtggaatttaatattattgtcaaataaaacttgatttgtcctata

SEQ ID NO: 294 - DNA, 12394 bp, Homo sapiens
  source 1..12394: mol_type = genomic DNA; note = NC_000001.11:26177491-26189884 CNKSR1 [organism=Homo sapiens] [GeneID=10256] [chromosome=1]
aaattccggcgacagcagggcaaaacaggagctgattcgagctggcagagctgggccatggaaccggtagagacctggacccccggaaaggtggcaacttggctgagaggtgggtggggctggggtagagttgggcttgaaggggactaggtgtggtgtcccaccgggaagcgggaggagaggaaaaggaaaaaaaatctgcggactgggtgcgctggttcacacctgtaatcccagcactttgggaagccaaggtgggtgggtcacctgaggtcgggagttcaagaccagcatggtgaaaccccgtctctactaaaaatacaaaaattatctgggggtggtggcaggtgcctgtaatcccagctacttgggaggctgaggcaggagaatcgcttgaacccaggaggcagaggttacagtgagccgagattgcaccgctgcactccagtctggacgacagagcgagattcagctcaaaagaaaaaaaaaaataataaactgcgggctctatcagtcggtcagtcagtcaacaaatatttacagagcacctaacatgttccaggaaccgtgctgggcagagagacagatgagatgaccctggggggcccaaggacccagaagggggcccctcatcatggcagtagcccaagaggcctctagggtgataatggggaggcggtgtcatgaaaacaggagggaggcctgacaggcccacacccactgtatctccttcatcttccctggccccagggccagtgggctgttgttaaatccgtttcttagagtcagaaactgacacacagagccaggaaatgatttgctcagtctctggtgtcattttccccgctccacaccctgagctcctagtgacagaagcagaagccctaggccagactgaagaggttgacacagccccaccctggggctcctatccaaggggcaaggtgctgtccaggctcagcgagcccacacagatgggaagcaacacaccccacaggcagactcagagaaggaagggcctcctgacacacagtgcgaccaggagcaggcagtcaggacacccctcccagagtggggagctggagcgcactagagacaggctcaggaggaccagcccgggtaagggcaggaattcagggctgggttcagactcccaggctggattccaggcccacccccaccgcttgccagctctgtgaccataggtcttagtttttctgtccatcaaatgggaaaggcaactctgaccttatgaagtcgacaaagtgagacaatcatgacatagttcatttgtagctcaatgcctgggtctattgggagggcaccagcccaatacagtcaccgtgcaggaaggaggtggctcaggggcccatagccagggagtgataggttcatgaactcccagtccagtgctctcaatgtgacacagggaacacacacacacacctcccccagtgaaggagcctggcttagaaggggaagaattccttcgaagagtgagcaagctacttaacctctgtgtcagttttcccatctgtaagcaggataatgatagtctttacctcctagaaatgcagtgagaatcaaatgtgttaatatgtgtaaagctcttatagatttgcatagcacatagtaagccctcaatagacacttttcttatttttcagtgcctaccttgtccaggcacaggccgggggttagagacaaatggttatctaaggcctgatctttgaagagcctgtgataaaatgggaaagaccgatggtcaagtgcaggggtttgtggaggctcaggggcagtgggaacaagaggagagccctccatcccactcagcctgggaagttatggaaggcttcctggaggaagttagatgaaaaaggaagtgaaggagatagaagagcaacgccagcaggaggaatagcacttgcaaggacgctgaggtaaaagggtgttccaggagctgcaaggaattagctctgtgcatctgaaatgttgagtttagggggctcttcaggatatgatgctggaaagggaggtagtagcctaatcatacagggcctgtaggtcatggtaaagtctggcaataataatatgatggctattattggctgtctcccacgaaccagacagtggccaaggccttgacatatgttgtgtcattcaatacacacatgattagaaggtaggtacttttattattctcacattacaggtgagaaaactgggcacagagcagtgctattacttgctcaagtgttcacagtgtctcagtgactccatagcctcttgttcttatcccctgtatcattagttctcaaacttaagggagcatcacagtcacctgcattaaaatacaaactgctggctgggcgtcgtggctcacacctgtaattctagcactttcagagactgaggcagtcaaattgcttgagcccaggagttcgagactagcctgggcaacatggtgaaatcccacctctgcaaaaaatacaaaaattagctgggtgtggtggtgtgtgcctgtagtcccagctacttgggaggctgaggtgggaggatggattgagcctaggaggtcaaggctgcagtgagccgtgactgtgtctcaagcccctgtctcaaaaagaaaaaacaaaacaaaaacaaaaaaaagactgctgggccccaacctcagagtttctgattcagcaggtgtggggtgaggcctgataatttgcatttctaacaagttctccggtgagtctgctgctgctggtctgggggccacttttaagaacccatgtcctatactttcctgcttctcaactcagtggcctcatctgtgaaatgggcagaacagcctgggtgtcagagttgtcattagggttagactagagggaaaagagctttgcaggcatgaagaaccatcccaaaaggtcctgacacctctgcttccccgagctgagccttactctccctccaggtcttgacgactccctgcaggactatccctttgaggactggcagctgcctggcaagaacctgctccagctctgcccccaaagcctcgaggctctggctgtgcggtctctgggacaccaggagctcatcctgggcggggtggaacagctccaggccctggtgagtgaatgctggtcacactggctgcagcttccaccaacctggggggtgtgatggggggctggctgctgccagggaggtgacttgccctctttctggcacagagctccaggctacagacagagaacctgcaaagcctgacagagggacttctgggggcaacccatgacttccagagcatagtccaaggctgcctgggggactgtgccaagacccctattgatgtcctctgtgcagctgtggagctgttgcatgaagctgacgccctcctcttctggctcagcaggtacccgggttggggtgacgagtgagggactattgtcatccttggcctccttcagggcgtgggagagaaaaacagatcttggctcttgttcagatatggtgagccaggcgtggtggcttaggtctgtaatcccagcactttgggaggccgaagcgggcagatcacttgaggtcaggagttggagaccagcctggccaacatggtgaaaccccatctttaccaaaaatatacaaaattagccaggtgtggtggtgcgcacctgtaatcccagctactggggaggctgaggcaggagaatcactcaaacctgggaggtggaagttccagtgagccgagatcatgccactgtactccagcctgggcgacagagtgagactccctctcaaaaaaaaaaaaaaaaaaaaaaaagatatggtggagcagggcagagggattaatccacctgtgcaggggcactgggatgccagagttcccaccccaccctccagcttgtaataatcgatctcatcaacaaccactgaatggagagcctccccaaccctgtgcactggctgctgcttgtcctacagaccccacctcaaatgtcatctcggggaagccttccctgttgtacactctccaagctatactattaataaataataaataataacttattataaactcattatccaatgtttcatgatactcattacagccaaagttaaattgatattgatgtatgatgtctttactgtctgtttccccagtgcctagaacagggcttggcatgtggtaggcacatgacaaataagtcctgtgctaatctctttagatgtctcaatcatctcctttactctaaaccaaaacccatcagagcaggtattatccccaagtctctgaggtgagtaattggtgagtaattggctctgagtggttaagcatagtcccttaaccactgtgctattcttcccctgccaggtacctcttctcccacttaaatgatttctcagcatgccaggagatccgagacttgttggaggagctgagccaggtcttgcatgaggtaggagaaccaagggccaggcttggcccatgccctagagaccaagctgggctagagctttttataacctgtgaatcagcccaggatcgagtatgaggattgagacgggcgagaaaggaggagaggaggccctgccactgggtatgggacaatggggcctggggtcccctagctggcaggggaattttgacactcaggacagggaaggaggggagggcacgtgtggtgacttctgggggcctggtatcagggaaacgagccctctggttaaaacgctgaggccctgtggttctgggcagggggccagtgtagggaaggcagggagggactgtacggaatcccaccctgcccccaggagaaggcagtccccttatggcccttgctcaggggaggcccctgctctctcattctacttccaggatggtccagcggctgagaaggagggcacagtcctgaggatcgtgagtctgtggggtgggaagagagtgggggtaggggcgatcgggctcaggctacatagcccgctcccctcccccagtgcagccacgtggctgggatctgccacaacatcctggtctgctgccccaaggagctgctggaacagaaggccgtgctcgagcaggtgcagctggacagtccattggtgagccctgccctcccacctctcacttctgaccccttggcagccttgtctgggccctgaaatagggtccaggatcccacagaaccctgtgctgccatggctggaaagccttttttgtacagatgctaaaatggaggcccagaggattggccagggtctcccgttgctctgcacctccccagtcctgaggggccacgcgggtgtggcctcaggtagtgtgttccagccttgggatggagacggggcaggggcttgggggcagttaggagaaagggagaggatgtgacctttcttggtttaatctttgaccagtggggaagaccagagccctatccctgccctgtccctgcttgtccctttaggaatgttgctgagaagctggtacctcagaaatcagggtctccagcttccctctggctcttagcagaggagaaggcagaggcccacaggagtagcaagtccaaagtcatacagcaagtctgggcaggaccagcttggggtcagctcttgccacagttccacccaccatagagtcctggtgtctggcgggggtcctgcctattggccctgttgccccccagcccccggtgactatagcctctgcctctgcagggcctagaaattcacaccaccagcaattgccagcactttgtgtcccaagtggacacccaggtgagagccccacacccttctcagccgcccatccccgaggcctctcacctgcaagccaggccaacctcaggccccattccccacgtcaggttcccactgactcccgactgcagatccagcctggagacgaggttgtccagatcaacgagcaggtggtggtgcgtgaggagagggacatggtaggaggtgaaggggtcaccgagtggaacccaagtctggtgggtggggaggcaaccaagggttctgaccagggttgtgggagctgccttccaggagatgagccagctaagtctggtgagagcatcctctgcagagcccaggtgatggggcccatggaagcccccaggaggctgcatgagtgggaggcagaagtgggaggctgagagagagctcccagcacgagggtgagagttggtggttgctttagagcctcctgcccaggttgataccagccagtgtttctgtcccccaggtgggatggccccgtaagaacatggtgagggaactgctgcgggagccagccggactcagcttagtgctgaagaagatcccgataccggagacccccccacaggtaccttcccctgccgccccccgacctgccttcagacccccccctccacaggtacctgcccccaccacccccacacctgccttcagaccccccccaacaggcaccttcccctgctgcgcccccctagctcccttcagacccccccacaggtacctgctcctgctgctcccctacccctgttgccccccaacctgctttcagacccctgtctccattgctttgttcctggttgttccccagacgccccctcaggtcctggactccccgcaccagaggagcccatcactgtctctggccccactgtctcccaggtaacaggctctgtccaggtgtgtcttggtggggagaccgtgggctcatctcatcccccttgccctccccagggccccatctgaagacgtctttgcctttgacctgtcttcaaaccccagtcccggacccagccctgcctggacaggtagtctcaaagctccatggatgccccggacacggcatctgggcacccagttctgaccccaagcctgggactgggctcatagactttccctctctctcctccctccctgacagactctgcctcccttggccctgagcccctgcccatccccccggaacccccagccatactcccagcaggggtagcagggactccagggctccctgaatcccctgacaaggtaagctcaggggcttagcaagggggtgggtgggtctggacctagatccttctctcacccttctgctgtcctttcagagtcctgttggtcggaagaaatcaaaaggtatgaggtgcgctggactaggtgggggttcccctgtttgaggagctgttaaaaatctttacatgctgggcaagaccacccccatccttcccacacagcctctcctggaaacagctctgtttctagggtcagacagagctgtgctcccagtctgggcctctcaccagactagaggctaacctgtttgctgtgactgagcaaacaggttagcctctagtcttcagtttgctcatctctaaaataagaagggtcatcccacctcagagatgacacatgtagcattctgagcagagtgtgggttcagagatctcacttggggatgcttgtggaaggcagggagtaggtttagcgggggcaccttgccagcccctcactgcccagcttgtgctgtgctgctacaggcctggcgacccggctgagccgccggcgggtgtcatgccgtgagctgggccggccggactgtgacggctggctcctgttgcgaaaggcaccgggcggcttcatgggcccgcgctggcgccgccgctggtttgtgctcaagggacacacgctctactggtaccgccagccccaggtaagaccccatacacaaaaacaggtaggcaagtgagtcacttccaggcctcgattctcatctctattctatcatccactcttattcctggtccaaggctttgatgtccccatctgtaaaatggggactttattcagagagaaatgagttaatatatgtataaaagcagtttggaaaaggtatcataggaggtatagagaaaaatctttttttttttttttttggagacaaagtctcactctgttgcccaggccggagtgcagtggcatcatctcggctcactgcaagctctaccttccgggttcacgccattctcctgcctcagcctcccgagcagctggaactacaggcgcccgccacaacgcccagcatattttttgtgtttttagtagagacagggtttcaccgtgttagccaggatggtctcgatctcctgacctcgtgatccacctgcctcggcctcccaaagtgctgggattacaggcgtgagccaccacacccggccctgaaaaatctgggcaacatagcaagatggagtcttgctatgttgcccagccttgtctcaaactcctgggctcaagcgttctgcctgcttcagcccgccagaatgctgggattataggcgtgagccaccacatctggccgaaaaatcacgtctattctgcccacttctccttatccttctgatattctgtccatccgaatgatgggccattcatttactcatttattcattcaggattcaggtgcctactgtgaacccagctctaggctgggcactatggacacagagaagaattggatgatttttgcttctccagaacttagaggctagtaggggagagggatgaatacacactcaaggacaatgtagggaccgtgtgctaagataaagggaaagcccaagggatatgtgggagcacagcagaggtgtccagtccatcctgaggagtccagatgccccctgacaatgcaatacctggcagttagttgcatgggaaggggaaagaaaaccaggaagagaaagcagcattcagaaagctcaggggtgtgaagcagtttggtttgtgtctactgaaggaacaaatgcatgagcaagctcttcttgtttggttttttggtttttgtttttgagacagagtcttgctttgtcacccaggctggagggcagtggcatgatctcagctcactacagcctcagcctcccaggttcaagcgatcctcctgcctcagcctcctgagtagctgggactacaggcacatgccaccatgcctagctaagttttttgtttgttttgttttgtttgagacgcagtctcgctctgttgcccaggctggagtgcagtggcgcaatcgcagctcatggcaaccttttcctcccaggttcgagcaattctcctacttcagcctcccgagtagctgggattacaggcacctgccaccatgcctggctaattttttgtatttttagtagagatggggtttcaccatgttggccaggctggtctcgaactcctgacctcatgatctgcccgcctcagcctcccaaagtgctgggattacaggtgtgagccaccacacccgacctaagtttttaattttttgtagaaatgggcttttttcccagtctggtctcaaactcctaggctcaaatggtcctcctgccttggcctcccaaagtgctgggattacaggcatgagccaccatgcccggccttcaggctcctcttttttttttttttggctgtttctctgatatctttggctcccctttcctggcttagaggcatcctttggccacatctcctaccctgaccccagattccagccctgagctccagaaacagagagacttgttagagagcccaggagatgccttctcctctccacaactctcaggagcccgaggggtaactaggagctgactgggccttgagggtattggggttccaacctgaccctcatgctgtgatccccccaggatgagaaggctgagggcctcatcaatgtctccaactatagtctggaaagtggacatgatcagaagaagaaatagttaagtcttggggtgtgatgggctgggggatggagacagaaagggagaggaagggtgatggggtagcagtgggaggtgtggcaagtggctggggcgcccagaatccagcctctctgggctgtgggtgggcacgcccaggctgagtgatgctcctccactacctggcagtgtgtttcagctcacccatgatgtgtacaaacccttcatcttcgctgctgataccctgacagatctgagcatgtgagtgccgcctcccttagcccctactctcatatgattcccaaactctgtgagcttgggagcctaggctcaggagcctggagatacaaattccagctctctgagagtggttggtcaagatactcacttctctttctcttttttttttttttttttttgagacagagtctcactatgtcacccaggctggagtgcagtggcgtgatcttggctcactgcaatctccgcctcctgggctcaagtgattctcctgcctcagcttcctaggtagctgagactacaggtgcctaccaccatacccggctaatttttgtatttttagtagagagggggtttcactatgttggccaggctggtcttgaactcctgaccttgtgatccgcctgcctcggcctcccaaagagctgggattacaggtgtgagccactgcacccggcatctctctttttttttaattaaaaagttttgtggggagatgggtttgccctagctggtctcaaacacttggcctcaagcaatcctcctgcctcagcttcccaaagtgctggggtgacagacgcgagccaccgcacgcagccagtactcacttctctaagcctcagtttcatcatctataaaatgggtgactaagagttcatccctctcagagttgctctgaggatcattagaagatgatgtgggtaaaaagcccccagcatacaagagggccccagtggatggaaaccctgtgagacctgcttgctctccataggtgggtgcgtcatctcattacctgcatctccaagtaccagtctccaggccgggcccccccaccccgagaggaaggtaggtgtctcgcagggttgagtgggaggaaccctcacctgagcctgtgcctttcctgggatgggggctaggaactcaaatgccctaggccactccctggcctcccaaaaacccactgctgctcctcaccccagactgctacagtgagaccgaagcagaggacccggacgatgaggctgggtcccactcagcctcggtgagtggggggctgccgggggtaggaggtggggataaacaacagggcgtggagctcagacagaaaccctctgtgctttccaccctgcctgcagcccagccctgctcaagctgggagtcccctccatggagacacatcacctgcagccacccccacacagcgcagcccacggacctcctttggctctctgacaggtgctgggctggagttgggagctgggctgggggctggggtgggcacatcctcatcctgctcttccctcccacagacagcagtgaagaggcactggaaggaatggtacgggggctgaggcagggtggcgtgtccctcctaggccagccacagcccctgacccaggaacagtggcggagctctttcatgcggcgcaaccgagaccctcagctcaatgagcgagtgcaccgtgtgcgggcgctacagagcacactcaaggtcagctggggggctctgggcacagcaagggactaggctctgggcttcaggctttggtttgcggctgtcacctccaccctgggcaccagactccagactccagactcagctccggaccctgggcttagcagctgacagcgggctcagctgtggactgggccaggctctgggttccgagtggggatttgagtctcacctaggctcctcgtgccacgctggccaggtgctggcttccaggcaccggacctccggagtgaagtctggcctcgggctctgcccacttccctgggtgatcatggtcccttagcccctcctctccacacaggcaaagctgcaggagctgcaggtcctagaagaagtgctgggtgaccctgagctgacaggagagaagttccgccagtggaaggagcagaaccgggagctgtactcagagggcctgggggcctggggagtggcacaggctgaaggcagctcccacatcttgacctctgactccacagaacagtccccccactccctgccctctgaccctgaagagcactcccatctctgccccctgacctcagagagcagcctccgacctcctgacctctgaccctggccagcactctagctcctgacctttgacccgagggccacctcaaccccagcttctgacgtgtccaggacagagcatccctggattctgttcagggtgggaagtagtactgctagtcatggtctcaccccgagctgacccctctgcctgggctttgtgccaccctctcccttgccaaagaagaaactctccccccaaatcctccaacctctggggccacagccctgcccctccagttccttggcagttctcccccaaaccaggtctgtacaggtgttctttattttacatgagggctactttccaaccaaataaagtcaatttttctaagaa

SEQ ID NO: 295 - DNA, 30202 bp, Homo sapiens
  source 1..30202: mol_type = genomic DNA; note = NC_000002.12:c99336385-99306184 TXNDC9 [organism=Homo sapiens] [GeneID=10190] [chromosome=2]
gatatcgcgcgaggttcgcagccaataaggaggcggatgtgacggcccgtttgcagccgccggcagctactgcaaggcaaaagccggagtggacgtgtcttttgaaactgctgctctttcacttctcaggcgtcaccgagagctcaggtgaggcagagggtagtgagaagaatccgaccaccacgtccgggtgctggtgaacattctgctgctccacatccggagcggaggaggggcgcggccccagcaccggtgtcggtgtcctggcagaggctcttgcgcaagcgcaccaggaggcgtcgaagttggggccaccgggactgtgctttcctctgtttccccgggcgcagggagtggccggcttgccattggggaggtacctggggttcagttaaggaccaggccccttgattgttttggcggatacctgtaagggtgtccaggaaatgactagggaatttgaggacgcgctgtgtcccgtcccacccttccagcggagctgtaaaaaggaagaatcagaggctgtggtttgaaaaatgaaaagctaacgaggggttgcatcgtctctttaccccattctcaatgctctgaccaccaacacctacacccagaatagctcttcttaatctcgtctttttccagttatcccataattaaattctgggctcattctataaagttccagggtaggcattctctgtgcttatccctggagcacagcttccaacgttcaattcagtatcttattatcttctccttccagccccctcactgagggtcacagtcctactgacatttttcttgggcgatagggagcgtggaaatctttgctgtgtttgaaatacagcacctttccaattttatagcactcacgaggagcttacaatttggttttttagactcaaatacttttgaaacttaacagtgtagtaatttgaacagaagtcaggcacgtgttcattcaacgttaaatacatgtttattgagtacctgctgtgttctatggagatacaaagatgaaatcaagtatgcttttcaaatccttttcctgtaaagaaaaaggaatcagaattgaagtttgcaagaatatttctcttcagctcaacgtttatagagggcctgtgtgggtcagaatctgtgtcagaagctgagtgaatgaattcacagtttgttgtgaagtttggggtgcttcagtattatttgcaaatgtatcatagttcattgatatgcaacagcctcctgctttgataggcaaattataaatcatttctgcagtaataaccctgagatacacataaacttgccctctaattgttggtataaaatttctcgtacaaaatactccatttcttttaaaagaagtaaaattttggccgggcgcggctggctcacgcctgtaatctcagcactttgggaggccgaggcgggcggatcacgaggtcaggagatcgtagccatcctggctaacacggtgaaaccccgtctgtactaaaaatacaaaaagaaattagccgggcgtggtggcgggcgcctgtagtcccggctactcgggaggctgaggcaggagaatggcgtgaacccaggaggcggagctagcagtgagcggagatgcgccactgcactccagcctgggcgacagagcgagactccgtctcaaaaaaaaaagtaaaattttgtactaattgctagtacaaaatactccatttcttttaaaatatatagtcatgtgccacataaggacatttcagttttatgagattgtaatactgtatttatcgtaccttttctatgtttagatacacaaatgccattatgttacagttgtctgcagtattcagtacagtaacatgctgtacagatttgtagcctaggagtaataggctgtatggcatagcctaggtgtgtagcaggctgtaccatctgggtttgtgtaaatagtctataatgtttgaaacaatatcaaaatcacctaatgatgcatttctcagaatgtattctcattgttttgtgggtttttggtttttggtttttgagacagggtctggctctgttgcccagggtggggtgcaagtggtgcgttctcagcccactgcaacctctgcctcctgggctcaaggtatcctcctcccacttcagcctccctagtagcggggactacaggcacacaccaccgggcctggccaatttttctatttttagtagagacagggttccatcatgtttcccaggctggtctcaaacatctgaactcaagtgatctgcccaccttggcctcccaaagtgctgggattacaggcgtgagccatagcacccagcctagaatatattcccattgttaagtgatgcatgactaattgagataggtcttcctttctaatctgaattagttctattttgaaactctgattttacacagaggagtgatgttggaaaaaaacccaaaatttagaaaagtatttggagtgttttacatcaaagttaacactgtcagtaaatggaaaccagtattaatttttgtgacctcatagacttttttgttaggtaatgggagaacaggaatggacattaatgctcagggaacaccaggcactcttctttacataaatggtaatgagacgtcttaggagttaaatgaaactcatttgggcagcagccatgaaaaaaatctgtgttttgctcaactgtactctgtgtttaagtaaagtttaatatatatatttatgtgtaaaacctcagtaggtataccttcctattgttcgcagttgtttctgatttctctttcccattggtaaagaacactgattgtcagtatatatcactaggtataacttcacaactcatttctctgtggtttggtgatggtcttaaagacttgtcttggctttagtatagtaaaacatatgctaaatcagaagcaccctaaatttgctgtaagtagtttttgagtggtgtgactagaacctactgagaattaaatttaaaaacacataaaaattgttaagcccagcatcaagtgcttggatgtcgttagaatactccatagagtacacattatacacttgccagaatttttgaaaatggtagagaaaaccttgcttattgtttgcattttttaaaatgtattttgtaaatcttctccccagcacccaggctgaactctgtaccatttggaagaatggaagctgatgcatctgttgacatgttttccaaagtcctggagcatcagctgcttcagactaccaaactggtggaagaacatttggattctgaaattcaaaaactggatcagatggatgaggatgaattggaacgccttaaagaaaagagactccaggcactaaggaaagctcaacagcagaaacaagtaacctctctgccctgctttctgaaattgctataacagtatgcgcctaacaacttatatatacatgtgctgtagtagttacatttcgttctttgtgtttagggtttttaaaattcagaatacctattactgttaaaaatttgcccagaaaaaaatatgttttaaagacattcaaaattagcccaatctctatattaatccacagtcgagtaaaagaaagatctgcccaagatcgtttttctgagcttggatttgtttggttgaatggagggctagggagtcattggtttccatttcaggtaatattaaagccgatttagctattttcaaagcaaacgagataagacagatgagataagagcaattaagtcaatttatgttgaaaaatgtatttcaggcatttccaatgaaataattatgtggcatattcaaaagaatgcatgctttgtaacaaaggtggccacagctctatcgttgttgcctcttagaatgtttgtgtagaataaacgcagagttgtaaactctgactgaaaccagtggattaaattctgtaaattgaaatttttttttctgctttttgagatggagtctcgctgtgacaccctggctggagtacagtggtgtcatctcaactcactgcaacctccgcttcccggcttcaagcaattattctgcctcagccacccgagtagctgggactacaggcgcacaccaccatgcctggctaagttttgtatttttagtagagatggggtttcgccatgttggctaggctgcccttgaacttctgacctcaagtgatccgcccaccttagcctgccaaagtgatgggattacaagcgtgagctaccgcacctggccaaattgaattttgattaaaacattttttccactgggttacatggaaatactttatcaccaactctggttccttttcagttgactgtgacttaaacatgaggcttaacttttctgaagaaatagggagttttgaccgggcatggtggttcacatctgtaatcccaacactttgggagtccaaggtgagcggacaacctgaggtcgggagttcaataccagcctggccaacatggtgaaaccctgtctctacaaaaaatacaaaaattagccaggtgtggtggcgcacacctgtagtcccagctactcaggaggctgaggcaggagaatctcttgaacccgggaggtggaggttgccgtgagtcgagattgtgctactgcactccagcctggatgatagagcaagacccagttcccccacaaaaaaagagaaggagttttgtttgtattgctgtagcatcactttgatatgtttacaccctcatgtttagaagagttactacaaaaggaaataatcttttataagtgagtccaaatttttatattttgagtttctaaaatagagtacgttatatggcttttacctgtaccctaccgtattttaaaaaataggctgcttttctttttcttttctttctttttttttttttttttgagagggagtctcactctgttgcccatcctgccttgacctctcaagtagctgggattacaggtgcctgccaccatgcccagctgatttttgtactttagtagagatggggtttcatcatgttggtcaggctggtctcaaattccgacctcaaatgatccgcctgcctcagcctcccaaagtgctgggattacaggtgtgagccaccccacaccaggcccaattggcttcttttcatagtatagggctgataattagtatgcaaaggacggattattggaatttaaggtaatatatgtttaggttctgccacaaactcatatttcatagtcacatttaagtactaattgctaatgtgcaactaaaaataattatttgtaactaggatatttttgtagagagactgaattcacctgatttgcagtgatgaacatacgttaaataatgtcttaaaggaactttttggcagttcaaaacagtggtctgaatataattaaaaccaactaaggcagactggctataagccttttttattattaatgtataaatcaatttaaaatgaatttgtcatcgagtaattcagagggtcttattttagaactttcactgcattttagtaggtcttttattaaaatattttctggaaatagtcaagaaacctagtgatttgtatagatattctttttataagagattatacagtaattagattatgcagtaattttgattttctgatccacgagggtattggggagatcattgtatgcattgacttacagtcggcacttaatagacctaggtgaatctatattcttctgtcagccaagcaccctcctactgttaactagagctggcacacttaggtagggagcagaatagagggataaggtaagaaataggagttaagcagaggcttgggtgacagccactgacagccaggtgctgcccagctgccatgcctcaggtaggcccatcctgcttgattctgttctgcagataccttaggagcacatgctgtccaaaaggggctatgctaagagcacaggggtgtagtgaatgtgtcaggagaggccctgagcattggtagaggtttggaatgggcacatcctccctcaaaggagcccaggacaggttcgggtcttcagcctcttggttaaatacctgagaataaataatgaaaagaaatagcagctttttttttttttttttttttttttttttgagataagagtcttgctctgttgccccggctggagtgcagtggcacaatctcggctcactgcaacctccacctcccaggatcaagcaattcttctgcctcagcctcccaagtagctgggattacagacgcctgccaccatgcccggctaatttttgtatttttagtagaggtggggtttcgccatgttggccaggctggtcttgaactcctgacctcaggtgatccgcccacctcagcctcccaaagtgctagtattacaggcgtgagccactgcgcccggcctagaaatagcagctttttaaaagacaaatacttttttttttgagacagggtcttgctctgtcacccaggctggagtgcagtggtgtgatcttggctcactgcaacctccgccttcggagttcaagcaattattgtgcctcagcccccgaggagctgggattacaggtgtgtgccaacacacctggctaattttcatattttttgtagagacagggtttcgccgtgttgcccaggctgttctcaaactcctgtcctcaagtgatccacctgcctcagcctcccaaagtgctgagattacaggtgtgagccactgcgtccagcctaacaaatactttttaagggcacatatcattggtaagttgtgaaagcagtcatgaaatgtcatatgtcattagggaattgtatttgagagttaaactgtgtgtagaaatttcacataagaaaatatcagggtatcctgcaagtgtcagctcgatgtaaatggatgtgattttgacaccgcagtcatcaatatagtctgggccacgttcactgacgtccagaggaggaagggagatggccctcctggctctttggttggaccccttctggaggctggattcagacctctgtcacattttaagaagacattggtgaattagagtgtgtttagttgatatcctggaagagtaggaactctagaaatcttttcatatgagaacagttaaaaggaactggaagtgttcagtgtggagaagggaaaacttaggcaatatgtgatgtttgaagggcccacgtgggaaagagattaaaactttaatctttatccaagctggaatccacagaccagaattatggatatattgcagttcagtgtgagatgacctttctaacaattagtgcaggtatagagactttttaagcatttataaagtggttatcaaaagcagacagggctcttgagcttcagagctgcagtatcctccttttctccccaagacgaattgggtttatctcataagcattatttttatttttatttatttttgagacagagtctcactctgttgcccaggcagtggcgtgatctcagctcactgcaacctctgcctcctgggttcaagcaattctcctgcctcagcctcccaagtagctgggattacaggcgcctaccaccacagctaggtaatttcttgtattttttttttttttttaagtagagacggggtttcaccatgttggcgaggctagtctggaactcctgacctcaggtgatccagccgcctcagcctcccaaggtgctgggattacaggcatcagccactgcacccagcctcatgagcattatttttaaaagacttgtagtaacttggatcaaatgcttctggttttagtagtttaagagtacatggatagagttaagtggatatttacattctgagtctctcaagtctaaatttttattttgaaagttctgagaaaatagatgttttaagctacaaagacaggtaattgtcttgaacccaggccatgctgtggagacgttcactgtccgtagactagttttgcattgacagtagaaacaggaaagtaaattgctaaaaaacattcatttttctttgacttcagccaggcacagtggctcatgcctataaccccagcacttttggaggacaaggtgggaggattgcttgaaccgaggagtttgacaccagcctgggcgatatagtaaaaaccccgtctctaccaaaaaaaaaaaaaaaaaatgccaggcgtggtgtggcatgcgccagtggtcccaattccttgggagactgacgtaggaggatctcttgagcccaggaggtttgaggctgcagtgagctatgatcatgccaccacactccatcctgggcaactttagcaagacccattctcaaaaaaaaaataaataaataacacttttgggccgggcgcggtggctcacacctataatcccagcactttgggaagccgaggcaggcggatcacaaggtcaagagatcgagaccatcctggccaacatggtgaaaacccatctctgctaaaaatacaaaaagtagctggacatactggtgcccgcctgtagtcccagctactcgggaggctgaagcaggagaattgcttgaacccaggaggcggaggttgcagtgagccaagatcgcgccactgccctccagcctggtgacagagcaagactccgtctcaaaaaaaaaaaacaaaaacaaacaaaaaaaaaacttttttttttaattgacttcattacaaaatacgatggtgatttggacacttaaaatgtcaagtggttctgaaagagatatctcacatgtgtaatgttttgcctctctccaaattaggaatggctttctaaaggacatggggaatacagagaaatccctagtgaaagagacttttttcaagaagtcaaggagagtgaaaatgtggtttgccatttctacagagactccacattcaggtaactttgtttccatctgtgactttttctaaaaaaacacagtgaattgtttggctggagatatactggcttactagagaaatgaagaaaactaaaagaaaaaacttcctaagttgtttcattgtactctctcatatgttatttagtattaagttaagcaggcaggggcccagtgactcaagcctgcaatctcagcactttgggaggccaagtggggggtggatcacttgaggtcaggagttcaagaccagcctggccaacatggcgaaaccctgcctctactaaaactacaaaattagccgggtgtggtggcaggtacctgtagtctcagctactggggaggctgaggtgggagaattgcttgaacccaggagacagaggttgcagtgagcggagatcgcgacactgcacttcagctcgagcgatagagtgagactccatctcaaaaaagaaagaaaaaaaaagttaattgttattttaaagagtaacttaaagaacagttacatgcaaaagtataaatgaatattactgaaagtcaatattcccatataaatggcttatatttttgaattgtattttcactagctaactaaaaacatcttagaaatgtacacttaaaattcttatcaccatgacagtaattatttccctctagtattgtgatgtagccatgatattgggaacgggcaacagctgttgagagtcagtgttccttcagttcctccttgaaggaactagcaactgtggtggggagatggtggcttggccaaacctttcaccagagcagagttgggactgccagtcttggctagaaggagaagtgatttttcttagaccaccctaggtctccaaatttctctaaggaagcagatctcttataaaatgttaatacctcctcagaagaggtcacatcgtaaaccaaaggacccaagcctttgtggttttttgtgcacagatttgattagttgccaacacttaaaaatcgagagataactccttttgaaaatatccacacttagaatttttctttaaaaaatcagaaaacttgctaatagcatagctggaactatgatggcagtcatctgctgactggcacctgcctacccaggacagacaagcactgtgctctagagtctctggcactcactgtggtttcagccctgctctctttctcatttctgtggccttcttgcccctttgtcttgatctcacaacccaacagcttcattgttagttaacacctttcaagaattgattgcctggtattcattgactaagagaataaaaatgaaacaaaatattgagatggtgaaatcccttgtgaggaacagtgagagaagggattaggcaggtagaaaggtatcagagaaacctctgcccttatggtacacaaccatctcgcattggcacacattcctcaagttgccaacctctgacaaatatgatgaggtgatatataaatatactagtatgtaaaatattatttgtccacttgttttttttttgttgtttttttttgtttttgagacagagtcttacactgtcacccaggctagagtgcaatggcaggatcttggctcactccaacctccacctcccgggttcaagtgattctcctgcctcagcctcccgagtagccagggctacagtcacccaccactacacccggctaacttttgtctttttagtagagacagggtttctccagattggccaggctggtctcaaactcttgacctcaggtgaaccacccaccttggcctcccaaagtgttgggattacaagtatgagccacggcacccggcctcacttgttttttttatgtctttcccaactagattgttcgttttgtagaggcagcgcatttgcctgtattgtgacctactgttctctgggatcatagccctaaagcaactgcctgacgcatagtaggtggtcaataaatacatttgatggtgtataaacagtgcatcaccaggagtactcaccttcaaacagaactgaaaaatcaaaatcatccagtgaactttatatattagcaaagttcctagcacatagtaggcaggatgctttcatgtatattatccctagaacattcacaataatcttcagaggcacttattattattcctgtatttcatgtatggaaaccaagatttggagaaattgactcacctagtatcactcagatactaaatgataaaaaaaagagagagattggaacccatgttttaagcctattgctatttttttaatttttaacttttgtgggtagtagtaggtaaatatggggtacatgagatattttaacacaggcatgcagtgtttaataatcacatcagggtaaatggaatatccatcacctcaagcttttatcctttgtgttataaacaatctaattatgctcttttagttatttttaaacatacgtaaaggcctatagctatttataccatgactgttgttttggatttttaaaaattgattgacgggttgggcgccatggctcatgcctgtaatcccagtactttgggaggctgaggcaggtggatcatgaggtcaggagatcaaggccatcctggccaacatggtgaaaacccatctctactaaaatacaaaaagttagctgggcatggtggctcgtgcctgtagtcccagttgtgcaggaggctgaggcaggggaattgcttgaacctgggaggcggaggttgcattgagctgagatcgtgccactgcactccagcctggcaacagagcaagacactctgtcttgctctttaaatacaaattaaaattagccaggcaatggtgcgggtgcctgtaatcctagcttcttaggaggctgagccaggagaattgcttgaacccaggaggtggaggttgcagtgagcagaggtcgtgccactgcactctagcctgggcgacagagcgagactccatctcaaaaaaaaaatacgttccttactgcagttaaagtatggagttgatttatttacaaattttcaggaacatatttctcatataaaggttgatttatcatttgttttgagctttatttaaaaaccatttattaatttgttctctcttaccatttttcactgaaatctcgttactgaactacatgagtaacatatgaaaaaacatatccggggaaaaagtgatgaggcaccaaggttacacataacttatgttagagccaaacttagttcaggaaaaactacatcaagtgcacaaaaagcttactggtaaaaataaccatgaagtattttgtgtgtgagtcatctagaggtagttctcaagctttatttgagcataagaacagctgtatgtttcccaactccactgccagagaattttgattcatctggatattttaaaagttgacggcaggctgggtgtggtagctcacacctctaatcccagcactttgggaggctgaggcaggtggattgcttgaggtcagcagttcaagaccagcctagtcaacatggtgaaaccccatcgctactaaaaatacaaaaattagccgggcgtggtggcaggtgcctgtaatcccagctactcgggaggctgaggaaggagaatcgattgaacccaggaggcagagattacagtgagccgagatcgcgccactgcactgcagcctgggtgacagagtgagagtccaactcaaaaaagatgaataaataaaagttgatcataatgaacacctggggttaagaaccaccggtctaaaagattgttacaatagtctgttttagaaacactcgtgaattggccagttgaaaatgaattttttgagacagagtcttactctgtcgcctagcctggagtgcagtggtgtaatcttagctcactgtaacccccacctcccaggttcaagtgattctcgtgcctcagcctcctgtgtagctgggatttcaggtgcccatcatgacgcccagctaatttttgtatttttagtagagatggggtttcaccatattgaccaggctggtcttgaactcttggcctcaagtgatctgcccgcctcagcctcccaaagtgttgggattacaggcgtgagccactgcatcaggccagaaaataaattttaatgtaaagaagatgtcactttttttgtttgttgagatggagtctcactatgttgcccaggttggagtacaacggcacagtttcggctcactgcagcctccacctcccaggttcaagtgattctcctgcctcagcctcccaagtagctgggactacaggcatgcaccaccacacccagctaatttttgtatttttagtagagacagggtttcaccgtgttggctaagctggtctcaaactactgacttcaagtgatccgcctgcctcagcctcccaaagtgccaagattacagatgtgagccaccgcacctggccaagaaaatctcacttctgtttccgtcttcattggaagatggcttaataaaagttactactggtaggctgggtgcagtggctcacgcttgtaatcctagcacttcgggaggccgaggcaggcggatcacaaggtcaggagatcaagaccatcctggctaacacagtgaaaccccgtctctactaaaaatacaaaaaattagccgggcatggtggcaggcgcctgtagtcccagctacttgggaggctgaggcaggagaatggcatgaaccagggaggcggagcttgcagtgagccgagcttgtgccactgcactccagcctgggggacagggcaatacgccacctccaaaaaaataaaaaataaaaaagttactactggtattttttaatttcctagaagcataatggccacatttatttaaatattattagtaacccttagccttaatgtgcttcttactgacagcgttgcatatttaggagtaagaagtttttcctcggtaatgctgttcagtttttcttcatgacttccaaatatggcaccatgtgtgcacttctgattcttgtaagtctcttccgagttttgtcaagtttcagtttgttcctcttcaagtttcctgtgtaggagataggacaacttcctttatgacttaaagcatatatttaatattttaaaagagaatatcattaatgcaaatctgactttctagaatcttataggctgttttcccatctcgtaatcaggcagctaacctctgatctggaagtgaggtcatctgacacaagtttaagttggctgccatgttatgagagtcaacagaaaaactacataattagatttcccttgatgatatttattttgaaaaaagcgatctgtggttttagcttataattttctatgtgtggtcacttacaggtgtaaaatactagacagacatctggcaatattgtccaagaaacacctcgagaccaaatttttgaagctgaatgtggaaaaagcacctttcctttgtgagagactgcatatcaaagtcattcccacactagcactgctaaaagatgggaaaacacaagattatgttgttgggtttactgacctaggaaatacagatgacttcaccacagaaactttagaatggaggctcggttcttctgacattcttaattacaggtaacttttaacaaaagaagagattgattttaattcatatatagttgatatttttacaaaagatttttgtattgtaacatttattttatgaaattaaggcattttggctgagatgtggaaagtttctcaaaggaaaagcatgtttttttgaagtgtgtaatattagcgtgattttacggcaaaatcagatttacagattaaactgatttaataggtaaaactgagtctcaccgtactcctgactataaaagttttcagcttaacgtatactattgacactaattttgtattaatctggaaacttaaaatggcaatccagtgttgactattccccaatttaagccagattgctcaaatgaattctgacttaagtgattctctttgataaaataaaaattaaaagcagactcttgcaaagaaagttatattttaaaatactagatttttaacatggatatttctgttttacttatagaggctgatgaatagaaaaaggtttctatgcctagcttacattgcttgctatgaagaacagttttagtttgaaaacaatctaaaatccaacttccatttctttgtccacttcttcagacaaataatttatctaattccacaaatcagagcatatcatcttgtcttttttgccttttcttgatttgcaaaagtaacaggtaaaattgtgcacttaccattccagagtcatggtgcctttcaggaagtagaaggttctctcacgtttttctttctcccccatttccctcccgtcttttctctgactctcctagacatgccgaaatcattcctatgttgtagaaattggtttcatttccttaatattaacataaaatattaatatttattaaataaagttatatattttgaagtaattttaagccttaaacaaattgcagccgggtggggcacttgtgtaatctcagaagattacagactttgagaggctgaggtgggagaatcagttgaggccaggagtttgagaccaatttgggcaacatatagtgagatgagacctcgtctctacaaaaaactagtagaaacaaccccctgcagactagtacaacgaatcctcattgaccctttgcccatattacccaattttaaacattttatatttgttttatcattgtctttatagatactatgaagtattttgggaaccatttgagtggaaattgtgaatacagtgtccctttactcctaaagacttccatatatattttctaagaacaagaacattttcttacgtagcgacagtacaattattgaaacaggaattattgtgtaatttaccgctcttatttcaagttttctcattgtcccaataattgtccttcataccaaaaatgcagcacatttagttattacgtctttagttaccattgttattctttggttcttaagactgatgtttttgaagagtacaaactgtttattttggagaacatctcccagtttgggtttgtcttaaatttcctcaagattagattcagattatcgatttttgacgggcatattatggaagtgatgcatcatatcgggaggtgtgtgatggtttctctcatttccggtgacaactgagcactgtgttaaccaaatgttaatccataattaatgataaaaaggaaaataggtctggtgcagtggctcatacctataatcccagcactttgggatgccaaagcaggaggattgcttgagcctaagagttcaagacaagcctgggcaatgtagtgagatgtcatcactacaaaaaatgtaaaaattaactgagcatggtggcacacgcctgtagtccaagctactcgggaggctgaggtgggaggatcgcttgagcccaggaactggaggttgcagtgagctgtgatcacaccactgcacatcagcctgggccacagagtgagaccctgtctcaaaaagaaaggaaaataaaattgatctaaaacattcagtaggacacaataaggtttaaggctattaaccatcaatatcaatataagcattatacctcttccctgacaccagcattttaaagaaattttattctatgttacaggaagaaaacaaagatagatttttgtgcagtttagtatactagtactaaatcataaagaataaaatgcttttttttttttttaagtggaaatttaatggagccaccatttcagaaccaaaagaaatttggaacaaacttcacaaagctggaaaagaaaactatccgaggaaagaaatatgattcagactctgatgatgattagagctcaataattctttgtaaattgtctttttttttctgcttcagatttaaatgtgtttttaaaattctattaatgtctatacattggtcacctaaatactcatattctcgagttttatacagttgtatcacatcgaaaagtgtctttactgttttctgtgtggccatcatgtttaagttgaggaaaactcagttcttaaattatctgggaagggtctggattctctatttttgagattgactttatcacaatatgattcttacatctttataccatttacaattgtgttttagatctacagagttagaaattcgaaaactattccaggactaattcttaatcggcattatttatacaagaggtcaagtaacatttactagcgcaatactgcacttgtaaatgaattataaacgctcttctggaatatatttaaataaccattaaagaactgcttattcattctggacactgcatgttgatgttgaatcaactgatgccagcagaaagctattttgatttgtgaacatactgccttatttaaagggtcctgattgcttgtattttaagacattcattaaaaagaaaccaggaaacacttttgaaataacagcataaggaacttcactgtctctgctcaataaaatacctgtaactggaagtttatgtggaaattgtcataaaagcatacatccaacaaaaacagtttttcaagaaagtcaatcttttagaatagggagtctgtggcattggagccatgaccccattccctctctccagttcccaatcctggactacagtttctcctctggaagagtagattattagcatgcctcattccctgaagctctgtgttgcagaagcccttttgcaagcaagagtagccaagaggtttggcactccttcctccacctagtccccacttacagcacagaaactctaacccaggaatatcagactgagaatactgggccttagttgcttttgccccagcttactcataggatgaaggctctttactcgtacgtagagtgaaggttccatgcaaggagatgcacttggaggagaccaggggttatatcacccctttcccccttgtagactgtgagtataactcctagaaaagcaggccactgtccccacccgtagctctggagcagcagaacagaggttctgtccagtggaaatggcaagtcataaaaacagctctgggccgggcacggtgcctcacgcctataatcccagcactttgggaggccgaggtgggtggatcacaaggtcaagagatcaagaccattctcgctaacttggtgaaaccccgtctctactaaaaatatttaataaagggactgactagaatagaatgagggaagatgttgaagtgtaaaggtgccaccaaatacgttggatctggggaggggagcaattaagagcgtattgacagctccctgatggcaacaagcaaaagggaatgccaacaagctcaacagaaagagcctggcacggtggctcacacctgtaatcccagcacttggggaggccaaggcgggcagatcacttgaggttaggagttcaagaccagcctggccaacatgctgaaaccctgtctctactaaaagtttaaaaattagccaggcatcatggcacgtgcctgtaattccagctattcaggaggctgagtcatgggaatcgcttgaacgcgagaggcagaggttgtagtgggccaagatcacaccactccaccccagcctgggtgacggagtgagaccctgtctcaaaaaaatagaggcagctgttattagtcctaggtttaagacaagcctcaaagatactctacaggggcctgaatttaactggattaaactgcggcgacttgtgccccagagcattgtcagaaacaaaagagtggccaggtgtggtggctcatgcctgtaataccagtactttgggatgcggaggcgggaggaccacttgaagccaggagtacaagaccagcctcggcaacatagtgagaccctgtctctataaaaaatgaaaaaaaaaatgagtggttagctagtaaattagtgggtgctaatagtaggatgtgataacaaaagaggttctaactaactagaacctttcccgaaagatcaggaaaaggtaaaagagagccctatcaaaaccactgtccttggggctagagggagtagtcatggtgactgcacacgcccagactgtactctgaggagggacatcagagcctgcatacttcagggtaagtggacttaactgaaatcatccagccaagaaactaaacaagaagaaatgcgctggagggcagagggtaggggttggagggaaattactatccagagctgctgtgacacagtgtctaaaatatccagtcctcaacaacaaactacaagacatacagaagaacaggaaactaatccatacaaggagcgaaaaagcaatcaaaggaaactgagagggtcaataggttggaagcagataaaaacttcaaagcattattataagtgtgttccaaaaaaaactaaaggaaactgctggaagtaaaggaaggtatgcttacaatattccatcaaacagaatatcaacaaagaaaggaatttaaaagggccaaataggctgggcgcggtagctcacgcctgtaatcccagcactttgggaggccaaggcgggcggatcacgaggtcgggagatcgagaccgtcctggctaacaccgtgaaaccccgtctctactaaaaatacaaaaaattagccgggcgtggtggcgggcgcctgtagtcccacctactggggaggctgaggcaggagaatggcgtgaacccgggaggcggagcttgcagtgagccgagattgcgccactgcactccagcctgggcgacagagtgagactccatctcaaaaaatatataaaataaaataaataaaagggccaaatagaaattctagagttcaaaagtaaagtaactgtaatgaaaaattcattagaggagctctacagtagattgtgttcacagtagaaagaatcagcaaattattggaagaaatgatgcctgaaaatcaaatatttgatgaaaacattaatccaagatcaagttgtaagataacatagaaagatgcataccaaaactatagtgaaaacaatgaaagaaaaaaatcttgaaaacagaaaaaaaaactactcattgtgtataagaaaacccattggcccaatgctgtggctcactcctgtaatcccagcgctttggagcttgaggcaggagtgcttgaggccaggagttcaaaaccagcctgggcaatatagtgagaccccatctctacaaaaaatttttaaaaattagccaggtgtggtggcatccacctcataactacttgagaggctgaggcaagaggatcacttgagcccaggagtttgaggctacagtgagctatgattgcaccactatactccagcatgggcaacagaacaagaccttgtctctattttgttttttgtttttgtttttgttttttcatttttcagtgttcttaagtttaaaacaaaaaaaaaaaaaaaagaaaaagaaatgcaaagctttattttatgagtcagaggacttgatactaagtcttaagattgtaatactgcccctgccaagttaatctgcaaattcaacaaattcaaaaaaacaaaaacctccactcccagatacctttttgcaaaaattgacaagttgatcttaaaatttatgtggacccagagtagccaaaataatcttgataaataacatatttggagtactcactcggatatcaaaacttagggcaaaactacaattataagacaggcataaagataagcgaaataaaagtccagaaataaacccttgtgttttgtagtcagttgatgtttggcaaaagttccaagacaattcaaatgggaaagaatagtctcttcaacaaatggttttgggacaagtaaatattgacccctcctttatgcgatatacaaaagttaaactcgaaatgtaacaaacacctaaatataagaattaaaactataaaactctaagaggaatatctaagggtaaatcttcacgactttgggttacacaaagccttgttgatgtgacaagtcacaaaagaaaaatagatgaacaccaaatataaaaacacttgctgcaattgataccaacagattagaataacaactcagaattggaaaaatatttgcaaatcatatatctgataaaatgtatccggaatgtgtagagaattctttcaacccaataaaaagaatataaatacccaatttaaaaaatgagtaaaggggccgggcgcggtggctcatgcctgtaattccagcactttgggaggccaaggcgggcagatcacgaggtcaggagatcgagaccatcctggctaacacggtgaaaccccgtctctactaaaaataaaaaaaaaaattagccgggtatggtggcatgcgcctgtagtcccagctactcaggagactgcggcaggagaatggcatgaacccaggaggcagagcttgcagtgagccaagatcgcgccactgcactccagcctgggtgacagagtgagactctatctcaaaaaaaaaaaaaaaaaattaaccaggcgtggtggtgggcgcctgtagtcccagctactcgggaggctgaggcaggagaatggcatgaacccgggaggtggagcttgcagtgagccgagatcatgccactgcactgcagcctgggcgacagagtgagagtccgtctcaaaaaaaaaaaaaaaaaatgagtaaaggatctgtacgtcttcccaaaagaaatggacagttgggcagtaagtacatgaaaagatgctcaaatcattaactgtcagggaaatgtaaatccaaaccacaatgacatcccactttgcaccagccaggatgattataataaaaaaggcagacaacatggtgaaaccccgtctctactaaaaacacaaaaattagctgggcgtggtggcatgcgcctgtagtaccagctactcaggaggctgagatgggagagttgcatgaacccaggaggtggaggttgcagtgagccaagatcgcgccactgcactccagcctgggtgacagagtgagactctgtctcaaaaaaaaaaaaaaaaaaaggtgtagtatttgcatgtaacctgccacatattctcctgtacactttaaaacctctccagattatgtataatacctaacacattgtaaatgctatataaatagttgttatactgtattgattagacaataatgacaacaaaaaaagtctacacctaataggtacagacaaagccagatatttttccttttctggaatattttccatctgctgttggttgaatccacagatgcagaacccaaggatatggagggccaaagaagcatttacagaggaaggacagtgtagattcatgaaaactaaggaaggagatttgaaacaggaagacttgattcacagttttaaaggctgcaaaggaggtaaattgaaaaaaagactaagaggccatgtgaaggtcatcaagcatcatccagagagaaattccgcagagcaatcagtgcaaaatccatgttttcattaccaaaaaccaaaaactttatcacagtatgatatgaacttacctatatgaagtctttcagtggccccaaaacaaatcatatatatttaatgaatagccattattgaaaaaatatatactaaaaagtaactacactggaaaacccatgatgtattgttactattgtaattgggagagaagtcagatgttagaatattttaggaatgaaataggtcaaaagaaagaaaaatgtgaaggatatgaataaacagagaaatgtaggagggacaaaaggacaccctctttaaactgtcaatggcaggctagaactgtttgtgcttatgaggacttggagtccctgcagaggtcagggtggcttctaacattgtatgcccacctatatttcatcaggctaacaataattttgatggctgatctgctgagagaagattttttttaagagacaggtcttactctgttgcccaagctggagtgcagtggtggtcatagctcaccataacctcaaactcctgggcttaagtgatcctcccacctcagcttcctgagtagctaggactacaggcatgtaccactgcacccagcacaagatggtcttgattacaggcatttatttagggatacaatttaaaatgactgacttttataaccctatcactatatatcaccatattctaaatgtctagggaaaagtagggggaaagactggattaggccaggcatgattaccagtaatcttagcactttgggaggccaaggtgagaggattacttgaggccgagagctcaagaccaacctggccaacaaagcaagactctgtctctatttcaattaaaaaatagaagaagaaaaaagacttggttggcagttttgtttgttttattgttgttgttgttgtttttgtttgtttttttgagacagagtttcgctcttgttgtccaggctggagtgcaatggtgccatctcagctcaatgtaacctccgcctcctgggttgaagcaattcacctgcctcagcctcccgagtagctgtcattacaggcatgcgtcaccacacccggctaattttgtgtttttaatagagatggggtttctccatgttggtcagtctggtctcaaactcctgacctcaggtgatcctcctgcctcggcctcccaaagggctgggattacaggcatgagccaccgtgcccagccttggttggcagtttttaccattaattatacaattattttttctgattatgaaagcaataaggcatacaatgtcaatcattaaggaaatatgaaatatgtaaaataagcatgttctctagtctcatctccacagataacttctttcaagatttgatgcatttctcccaaatttttattttctagacatacactaacatttgtctttgttaaaatggggtcactgagtacattttattttgcaacttgtttttttcccatttacctgtacagccagcacattttcttatgtcatcacagtagtgccacctctctaattaatgcaaagtgttctattgtgcagatggtacatatgaaaatattttctttctttttttttttttttttgagacggagtctcattctgttgcccaggctgtagtgcagtggtgcgattttggctcactgcaacctccacctcccgggttcgagcaattatcctgcctcagcctccccagtagctgggagtacaagcatgtaccatcacgcccagctaatttttcgtatttttagtagggacggggtttcaccatatttgccaagctggtcttgaactcctgacctcaagtaactcactcacctcagcctcccaaagtgccaagtgaaatattttagtgggaaaatgtccacagaataaggggtgtgggcttggtcagtggagagtggttgaagaggtgagagggaaccaaggctcttcctgctatttctttgctagggctggcccctttaggggcttcccttcccttagagatgactgccagggtcttccatccctactttctgccccttctctgaggggcctgagccccctcagcctcccaggttcatccaaacaaacaacttatggccttcataaaactgtctgattaaatgtgtattattatttttccttttttattatacaggatataaatgcttaactcttttcatgtatttttaaaccaactgacaaataattttgagcttgtcattagcatccttgggctaatataataaaactttgttacttaaaactatggttttctaagttttaaattgcatagcaacaataaggatctgatcataaagacaaaaatcaggctgggcatgctggctcatgcctgtaatcccaggggattgggaagtcaaggacagaggatggcttgaggccaggagttcgagaccagcctgagggctgggcatggtggctcatgcctggaaggccaaggatagaggacggcttgaggccaggagttcaagaccagcctgagggctgggtgtggtggttcatgcctgtaatctcgtctttgggaggtcaaagccgaggatcacttcagcccaggagttcgagaccagcctgggcaacatagtgagaccccctcccccaccatctctacaaaatatttaaaaattaaccgggcatggtggcacgcacttgtaattctagttagttgagaggctgaggtgggaggatcacttgatcccaggagtttgtggctgcagtgagctgtgatcacaccattgcaaaccagtctggaagacagagagagaccctgcctcaaaaaaaaggaggcagggggaccagcctgggccacataggaagaccccatctccacaaaagataaaaaaattctcctgtgtcagaagaccagttggaaaacaaaatttaaacattagcccagtgtggtggcacacacctgtagtcccagctactggggagactgagatgggaggttcactggagcccaggagtttgaggttacagtgaactatgattgtgccactgcactccagcctgaacaacagagggagatcctgtctcttaaaaaaaaaagacacaaattacaactaaagcagggtgaatctcttaagtaaagggaaaaattctgatcaagaagactggaaacagctgggactagcctttgcctctcaggaaggaacggagaaaagattttggcaaacgatggccaagaggcagcagaacccctcctgcagtggttcataaatgtggctgcgttgcccactgctgctgtaaaaattaccacaatgttggtggcttaaaacaatgtaagtttattttttttaatttatttatttttagagacaagagtccctagcgcctggccccttccctctatcttcaaaggcagcaagagctggttccatctctgtgaaactgactcttctgcctccatcttccacatttaagggcccaccttgataattcaggatatcctatctcttttaaggtcagatgatgaggaaccttaattccatctactaactggagtctcctctgccatgtaacttaacatgtacataggttccagggagtaggctggaatcacattagtgattccaatcattctaatgagcagccattgaaaaccaccgctctggccaggagtggtgtctcatgcctgtaatcccagcactttgcgaggccaaggatccagctacttgggaggctgaggcagaaggattacctgagcccaggagttggaggctacagtgagctgccgtgattgggccactgcattccagcctggacaacagagtgagactctgactcaaaaaaagaaaaccccaaaatcttctgctccaaagagatcatatattctatttctacacatgtacctggcactgccatggatgtgtttattctgtacgtcccatttaaccttctcaaagacctatttatttttagttaacaagtaacatttacatgccaggcattgtgatgagttagttgtgctactattgtcatgatctttcacaaatattttattttgagtaatcatcacaacaaccctgtgaagtaggtactctttttattcccattttacagacgacaaagccgactcagaaatttgcccgaggaggctgggtgcagtggctcacgcttgtaatcccagcgctttaggaggctgaggcaggtggatcacctaaggtcaggagttcaaaccagcttgaccaacatggtgaaaccccatctctactaaaaatacaaaaattagctgggcgtggtggtacatgcctgtaatctcactactcaggaggctgaggcaagagaatcgcttgaacctgggaggtagaagttgcagtgagctgagattctaccactgcacttcagcctgagcaatagagtgagactctgtctcaaaaaaaaagcaaaaagaaaaaagaaatgtgcctgaggccatgaagataaaccatgtcggccaggctggtctcgaactcctgacctcaggtgatccacctacctcagcctcccaaagtgctgggattacaggcatgagccaccatgtccagcccctgggttttttgctttttcttttcttttctttttttttaattgaaacaaggtctcactctgtctcctaggctggagtgcagtggcccaaaattgtggaatcatctcaccattataagcctgtaagaatgtctcattagattactctttaatttttaaaattgttttaattttttttttcgagacagagtctcactgtcacccagactggagtgaagtgacatgatctcggttcactccaccctcgacctgcctgagctcaggtgatcctcctgcctcagcttcctgagtagctgggattacaatcgtgtgccaccacgcccagctaatttttgtatttttagtaaagacggggtttcgtcatgcgggccaggctggtctcaaactctagggctcaagcaatccacctgcctcagcctcccaaagtgctgggaaccaccagcaccaggcctattttaaagctatttttaattttttattatttgtactttttaattttttaaaatttttgttttaatgtttttaaatttttttaatatttattttactttggccaggcacggctgcttacgcctgtaatcccagcactatgggaggccgaggcgggcggatcacgaggtcaggagatcgagaccatcctggctaacatggtgaaaccccgtctccactaaaaattagccaggcgtggtggcgagcacctgtagtcccagctacttgggaggctgaggcaggagaatggcatgaacccgggaggcggagcttgcagtgagccaagattgcaccactgcactccagcctgggcgacagagcaaaactccatctcaaaaaaaaaaattattttattttaaaaatgtttaaatttttaaatttgttaaaggcctttccagttgaatcacatcgtactcatcctcctcttgttattctaatcttctccctccctacatacacacacacacgtacacacacacacacacatgcatgtacagcaacattccagcccattgcctcacagattgctatgcaccaacaggcctaaaattaaaatagtaatagcagtgtagtcacaaatataaaataatataaaattattctgccactaagatcatgttttcttgagaaaaatacaactttttagagcaaaaatatagggcagcaacaggaaggctcattttaagctgttatgctgtgtagagctgcaccttcacatggcctgtgaaaatacctattcactgaatttggattgtaatcaataattaccagcctagaagacctctgaaagtttgatcattttcttccctctgggcaggcaaatcttccctgcatagagacactgtgagctggaagggagttccttctctcagtgcgtcctctgtgcctgcttttcccatttgcgtttttgagagttcagaactccaggaaggatcatcctatgctggagatttccccatgaatgtttccttctgcacaaagagcaaatcagagagacttggcccctctgttccgtctatggactctagaggtgtatctgtctttttagtctgttagccgaggctgttagacatgttggccttagttcttacacagcttgcagagaaaataagactgttatagaaccaatactcatggtctatgggttaatgtagcattggcaagactgcccatgagggcaggcaagggatttaccgtctggcaaaatacaaacaccttagtcttttggctttcagttaacaaatatgacgtcgcatttggccctattacagctacagttaagtgcacacacatttcttttctcccattattcgatttgcacatgctcacaaatccaaaagtaatgacatacttgcattaaaagatatctaaattttgatgagtgttgtaatgaacaggaaaaattattctatcatctacaaatcttttcaaacttgggttttctttgcaaggtccttaagtttcgcctgagtccaatatttcttatgcagcagagacacaatcattgccaactgatcaccatacactggattttcatcctcaataagcccgagtgtaagatccatgcctctgcttcacactcacctgtcttcagtcagtgctcctccttagaggtggtgagcccacagcgatttatatagagtcctgttctcttgttaaaagtgttcatctcatcctattttggagagatttatgacatctcataaattataataataatcataataattgtaaatactttgaacttatatagggccttttattcaagaatgtcctggcattttgcaaacattaaccaatttgtttcttgccatacctcagaaggcagatcctagttgtagtttaactttgacacattgaggtccaacacttgtctttattcacatcattttctgggaatgtgggttaggtaagaaaacaaggaaggaagagagagagagaaagagagagagagtgagaaggagagagagagtgagaaggggaagggaggaagggaagaggaagggaggaagggaaggaagaaagaaaaggaagaaggaaggaaggaagggagggagggaattgaacttggtgtgtcagaaactcattattggtttgtatttcaggtaagcagagcgcctagaccaggggttggcagctttttcttacaggcccagacaggtttttgggctacgtggtctttataatgcctctgacattgtagcatgagagtgatcatagataatatttaaatgaatggccaagactgtgttccaaaaaaactttctttactacacaggtggtggccctagggccgtaggttgctggcccctgttctgaaccaccgagagataccagttcacatgtcctcagttcagcaatgtggggagagatgatcggctggatgatgctattttacagacacccaggacctacagcatgttccaaatgtctacatcaataagtactttgagagggttcatatgaagtttccaggaaggattccttcccaagttgtggaaagggtgcatttcacgactgaaagagggagccccctccctcaccacaccctgtgccccagctcaactaagcagcttgattttccccaaacacagcgccattctttgcattaggccttcctacaggctgtttgctttttatctaacccctcagggacaggggctgtgtctcagaaacttgtgctatgagccaccatgtccctggcttgtcctttcagacctcctggatcctcactttttcaagaaaacgttcacacttgtctcaaagtcttattcttgactctgtcatgctgagtgggttcaatgtccatttagatggctggattcaattctctggtctctccttttttgtgtgttttttacttataagaaatcatgaggc

SEQ ID NO: 296 - DNA, 333928 bp, Homo sapiens
  source 1..333928: mol_type = genomic DNA; note = NC_000005.10:c65482663-65148736 ADAMTS6 [organism=Homo sapiens] [GeneID=11174] [chromosome=5]
aatacactccacttgtggcttttcccggttgcactttaaaacaccatccagtctcaccctcatctggaaataatgcaagcttctctcttccttcccccgctccctcctcccctactttttttttttcttcttcttcttcttttaaagctccacataacctgaagtcgataatcaaatggaaaatgtgctggtattagtttactttagtttactttcccttttggtgctaaccttacttgctgaagtatgtataaaacacaggcattttgtacacttgtagctactgagtcttgtgcctgctgcacgaatctaagctttaagtttcctcagaggcactgtttgcgtgcaagttttaacattttgattgtgtggattttaaaaataaaattacacggagaatgacaccagagatcttaacagtgacattagtccatctaaagtcattcatccttctccctcccccttcatttttccaagaaacaactaatagcaaaccaggctagaatttctaagagagtttagaggaggaggaggaaaagaggcggaatgagataggacagagaggttagagaggccagaatttctctcattcacagtgtggaaaagttgacattgtctaagcccttctgaatggctggtagttggttaccccgattgtacctctacctcccctccccctccacgtgacgacccaggacacatgcgcacccgacgcagcccaggcacatctgcagactgacgtcagtgtgctctgcctccgaggaaaagctgccaaaattttctcctgctgcaattcaagttggctgggggccggtagtgagatctagggctacttcaacaaaactttgctgcccttcctgctcctcttgtcttcttttctcctgataccttttgatgctctgcacatgttatttgcatagcaaaggcactaagctttccaggaagagagggcaccacttccacccccaataagtcttttttcccgtcttttctttcttttcctttccttttttggggggtggggagggagagaaagggggtttgcaaaggcagcatctcagagtgatagcctagatgtattgaaggcatctcttattctgccaaatcggaaagtcagttctctaaagcccgggttagccagaccatagggttttattctggctgcagaataactggctggtgtggctttgcaaaggggggcaaaaaataaaaaaataaaaaaaattaaaaaaagttagagaggagagggagtacgtgagtcgtccagtgcaatctctattgtctgaaacttactttttatcagaatttgaagatgaaaacggtaaggaagacttaacaatattcaatggagctttttttttttaaaccaacaacttgtgctttgcttgtcttccgaataacgcttagaaaactttttttctgtgtgtgtgtttttttttttttttttaatggcaatgagtgagcttgactgaactcattttacaaatagatatctttttaactccagacttgtcgggggttgtagaattctgggacttgcagttattttatgatgcaaaaaaaatacgtttattttatgaatatacaatacatgttttgtgaagtggacttgattatgattattgtaatcttttaactgatcaccaaatagtaatccggaaggtaataatgatgtgtgtgttttaaattgatttccagttttcttacagaaaagtcttatgcattttgtagtttcatgtcagtgtcgttaagtcttcagacaagtgcatattttatgcctgggctcagagggtagcattaatgtgctagctgtagccccgatgctctaggacatgttaagctcttaataggctaatcaaagagatggaaacgtgtgtttttgatttacttttggccacttgggacgtgctagactcataaccctccggagccttgtttatcggggtaggtctgtatatatggtgtatgggaccaaagttcagggattgaggagggagagtgagagtgcaggaatggggtattgggaagcctctttctgataatatgtgctacaattcctgtctttgatgctttctttccctgtactagaggaaaagtgagcgagagattgagaaagcgcactgagagggaacaagagagtgagtttcttactcttgtttttatttgagctgccggtgcaacgcgtttgggccagatgccaactgtctgggtcacacgcgttttatccaaatagatttagcgctgctgtctggaaatgggctgctgaatgttaactttaggatcaactcaaccagggcagctcagactgttaccctctgtctgggcgaagtggaatggtgggggcggggggaggtgagggtgtgcagagcagagagaaaaagggaaactgaaccattgcttggaactttaaaagagacacttgagtgtgattttcaacatgttctttttatgttcaagtgtcgtggactaattttctgttcttttttctttctttttagtttctgttgattagactgaaatgtttagatgtggggatgacagttttcagaattcatgacaggaaaagaaacgtaacacaaaattggtgtagttgaaagaaattaagaaaattaattttggagataattgttttcttgtgttgcagcaaagtggtaactgcagtctggtttatgttaattctgtgcttaaatgtgatcgttagtgttttgaatttttgaagaatagcatttagaggcaaatacgttgatttcaaacaaatcaaattcattcatttgccacagctgcaaatgaagtctgtgtagtggtcttaatatttttgtgattcccaagaagaaaaacttctagcctgaagactgaaaatactgtaatactccttatgtctggtcccaatacctgtaagattaattcctactcttgtctactcttagcacttcctctttctttccttagtaatcactagtagtagtaactaggatgggtctttatgccaaattttatcaagtttgtgactttagtgagtgaatgaagggagttaccatattaagagatagttaacagcatatttggaatatgtgttgggggtagtggggagaaaaagaggggaagaggtggatagctctcttgcttctgccaaaaaacatggttgattatcaagctaagctcaagagaaaaaatttataatacagaaaatgtgtatttacttgctatctggaaaaaagtgtgagactacatgtaatttagggcttgagttttataaatcatggtttgtatttttgcttttagctcatttgcttgatagatatgttttgggtaatttatgtgtttagtttcacctttccttggaaaccaatctcacaaattttataaatgatctagaaacctttatacttagagcctaattgtgtccttagcatacagtaggtgataataaatgtgagagaataaatggaaatgaaagaagttaattttcatatgtaaaaattaaacacctgaaaggagcatggtattgttgtttcttccatggagaccaaatcagccttaaataaataaccagagttaagatggatgaaagaagttgagaagaacattatacacattctttagcttcataataatagttcacaagaggaaattattaccttggctactccccgatcacttgagtgggaagtaaagatgatagaggaaaaaagacaagtaataccctccaatcagggcagactactgaggaaatcactatagtgcaagttgtctcatcatttttcttcttaggtagtgtagctttgatccatggaagcaggtaaatgatcccttaactttactgcctggtgcatttgtgttagggagaaaagcatatgtgaaatcaaagtgaaatggacgttttggttctgttttcaaatttaaagtagttataagtatcattatcatgaccaaagttcttaactccttgctgtaaaagacaatataactagttgattgactccatcatcatatctattatttcacatttttgagggaaagaggaacatgaaactatttttgaaggaagggctttgaaaagtgatgttagataatgaaggaaggagggctaatattatttagcttaaagtacagagacactttacgtcatatgtaatctaatctcttaacaagtctttgtgagatagacatcaatatcatggttttatagattagaaagcagatgcagagaggttaagtaactgggggtcaggccaggactcaaagcctttgtgctttccacaacataatgatgtttctgctatacaatttaaaaggtcaatgcattgtgatttttggacaactgtttggtatttcaatgttagtctgaactttggaaactatatctgaaaagtcacagcctctacatatttatggtgtccagattaacctccccaccaggtgtcagaaagtgggttaactcattcacttttattgtgtaggtgactaagagcagttagatttgttagttgtgttgattttagttaaattccttttttgtttgtttggttttttttttgagacggagcctcgctctgtcacccaggctgcagtgcagtggcgtgatcttggctcactgcagcctccacctcccatgatcaggtgattctcttgcctcagccccctgagtagctgggattacaggtgcgcaccaccacgcctggctaattttgtatttttagtagagacaagattttgaaatgttggccaggctggtctcaaactcctgacctcaggtgatctgcccatctcagcctctcaaagtgctgggattacaggtatgagccaccatgcctggccagttttagttgaattctatctagactcatttacttaatgttaagtttcttcactgagcactggaggccaaaaaaaaaaaaaatgtggggagggagcaagggagtgataaaggagaaagaaactcatgtgccagctattataactagtgttggaactaagactataactggtttgtttaacttcaaagctcctgctttttcaactatgcaccaatgccttttttactgcaaatccttaaatcatatagtagtctacttctggccaaataggtattacttttttttctcaatgctactggcttagttaacttgagcatttacaggagagtaggtaagagtgaaggttatgaaactgtaacaatttacaaaaagagcaggacatttctcaagagggaaaaatagttgctccctaaatccagtcaactatattgtaagtttctcagtagtttcaaaacctagaaaaataggagaaaaagggatgaatgattcaatcaaatctatctccattgctagaaaattaactcaaatgtgttaagtatatgttttttaaaggaagattataatctaaagtatatgagggactaatttaatgtcagatgttattactcaaaacactccagtgatctaaaaaaattaaaacaatgaaaatgaatgttgttcaaaaggtgacaattatactttaatattacatgggaaggtttagagtatggaatctgtatataagtaggttggaaaccaagataatggaattcttcttattgccgttattgaataatggtataacttaatctctctataaatttttacctgagaaaggatgcctgctatcttgcctaaattagtgtagaagtaatttcaagaagaaacaatgactgtatgtgaagttgttaaaaactattcacattaactaaccaataccacttataaatatatcgactgggcgcagtggctcacgcctggaatcccagcactttgggaggctgaggctggcggatcaggatgtcaggagatcgagaccatcctggctaacacggtgaaaccccatctctactaaaaaaaaatacagaaaaatcagctgggcatggtggcacgcatctgtaatcccagctactcaggaggctgaggcaggagaatcacttgaacccgggaggtggaggttgcagtgagctgagatcgtgccactgcactccagcatgggcgacaagagcaagactcagtctcaaaaaaaaaaaaatcttctttgacattggttgttattaactactgttgactgtttaaatttgagtgccttaaactggaagtgtgatataatacaaagaatttagactttagaaccagacagccttgtgtgaatctgggctctattgttttatacctatctgaccagtgagttcagcttctttatttgtgaattggtggctgtattagttatcaattgctgtgtaacaaattaccacaaacttagtgagttaaaacaatacacatttattatcacacagtttctctgggtcaggaatctaggggttatgtcctcagctttagggtatctcatgagccacaaagtgttggcaaggactagggtctttacagaaggcttgactggggaaaaacctgtttctaagctcacctattactgaacaggatttagtttcttgcatgctgttggactgagggccttagttccttgttagttatatcagaggctgctctcagtttcttcaatgtgggcctcaacaaatgacagcttgcttgcttcatctaaaccaattagggaaagatgtggctagcagatggaagtcagaatcttttgtatgtaataacgaaagtgacatcccctcagtgttgaggtattctattggttagaatcaaattaagaggaggggagcaagggaatggatatgaggaagccagattattgggctcatcagagtctacactgccacaggggcagagtatatttacttcacaagatggttttggagattaaaagaagcaatatgtattaaagttttttatttttggtctgatcttaaactacctttctggttattacctgttagtttttttgcacaggaacaaaatttgctattgctattattactaatattgtttactatttcccatttttttctggttatctagactttgtggaatgcatttcttctatttgtaatgattacctccagcaatttgacttgtaaaattgtattcgtcttccgggatctatctgaaatgctttttccataaacattccttgattcattcttctctgacccagaagtcatctccctcatctgatctcctgcaacaactttgcacgaccttattacggcatttgtcagtctgccttacatttttccttgttacttagattatgagctctccaagggcaaggattgaatcttaatcttttctgtttcccttaatccttttctgtattctgatgttgttataacatcatcttttaaacatagtaggacaatatttgttgattaatgaattagcttttccaaggcttagcagtttaataacttgtagagacaaatgtaagggatttaaatggctgttgttgttttatatgttgtatataccaatatttctatcaccgtagggaatgaagtgtttcacataagttaattttacagttaactacaaatactttttatatgcctaaagtgattttattttaaccactattcatttattcattcttttactcatccatttttttcaaccaacaaatatatagtaagaatttattatgtgaaaatttcatatattagggatttggaatgaaaatctttctaatctcttttgtgtactttcctaacttactaacagtaacttaccttattaaacgcatttatcttcttattttggactcaggcatagtgttatgagtatcagatattgaactatataacacagttatacatacaataggaactgttaaactatgtaagacccatttgcctctaccccaaactatattactttggggttctaaaactacattttcgttttttatccttttttttttttttttttttggtcacagtttggctgtttgtggctagtttttagctcttagttattttcttcttctgatctgctgtatgcggggaaaccaggcagccaaatatactattctgtatcaagtgtgaatggagactctgagtgaggttgttagttgcatgtaaagtacatgagctaggacttgaaatctgttgtaatacttgaaatgaagttttaaaattttcttttaagttacatttcagagagttgaaattgactcacgagttgccttataagtcacataagacttccgagtaaagtcaagggttatagtacatacagttcaactttttagaagtttagcttctgatactgtcttagtattcacagatggctgctaaatgtcactatttgtagatctactttgtcagaaaaaaaaatgataggtgccttataaagcaacacaacaatatctggatatgagtgtgtttaaaaggcatgttatggaatgggattacatattgtttgtcacatataatgaactgaagtagtgaagtcagccgattttattttatcaaaaggaagttaactcattgcccatcattgttatcttcaaagtttttaaaaaagaattatgatttctctttagattccttatttgattattaagtaactctggcattatgctgataaccattttggtctctaattctgtgtctaatcttgtgaatgtttatttagactataaagactaacaatggtctaatttaactatattattttgtagttatgtcttttggcaaggattcagtactatataggacttggatttttccattctggatatttttcagttaacttaaatttttttttttctaggttaaaaaatggccatactttagtaactaatcagcctaatgctttgcttatgaaaacttttaccatcattatttttttcattttggattgagaaaatgaatccagatatagaagaaagtgcaggatgttggataaaagtggctcttaaacagtggaacatccaataactaatttgcaagaagttttaaagaaataaaattgttatgcttcgattttggtatggtattgactctttagcacataggtagccctcaaaaaaatcatccagttttctaaattatggaaattttgtggaagacgttgacctggattttgagcctcatcatggcttcatcggaatttcatagtgaccacaggctttcatacagttctcaaggtaggattcttgcttttgaaactgacaaaaaatattgctattaattggacaagaaaagattctgcatatttagtttgggtggatagttttttttgggatatgtagtgataggaatagaggcctactgtgtcaattcggtattagtttcataaatgttaagggctatgcgtcgtttaacttgtcctactagtatttaacatcccgtggattttagagttgactggtctttcttggaaaatgatagaccccaggccttgttcttctgaaacttaaactttaataagcttgttcattactagagtttatgggcaaggacatgttcaaagagaatccaaacatttatgctgtggaagaagaaaccagataaattatgatacaggacccttttaatatggaccctttgtgaaaaaatacttttgcaaacctgagagttctgatctaaagactagaatctgagtgtaagaatgagaactgtaagaagtgcaacttttcacattctaatctttataattttaatctatagaattgagctttatatcgtagaaatgatcttaacaaagcaggcccaggagtaaatgtcattttgttttccatggaccagtccagtccttatagaattattgagaggcataccttttggatttccctcccatgaatacatagtaatagataattttttggtgccgatgaaccagattttcaagactattacagattgatgtatgtatctagaaatccatgttaaaaagtgtggctgtcaaagtaaatcaatgaagccatgacatttagtatgaactctaattatttataagaagtgaaataaacactgtctttgaatttatttacatttggttatggttttataggagtttatattagtgtgtaaactccatgtatagacactgaggcaaataagcagacatttggtttaccttagtggtaaatctagctgaaagaaggtacagctaagaaggtagatggaaaatgtttagtacatctaaatgaggaaaatatgttcctcatttagttctctgaaattttagtcaagctgtttttaaaatagctttattgagatattactacacataccatagaattcacccatttaaggtataaaattcagtggtttttagtattttcggcattgtacaaccatcacaataacctattttattttatttcatcttattttttggcactagtgtcatcgccaacataatcaattttagaacattttcatcactccaaaaagaagcctatacttcttagtggtcacttccaaattccctccaaaccagccttcacctccagctgtaggcaactaaaccttctgtctgtagagatttccctattctggatatttcatataaatgcaatgatatgtggcatattgtgacttgctcttttacttaatgttttaaatgttagataatgaactttgattatgaagacagttgttctgaaggttcattcatgtcatagcatgtatcactactgcattccttgttattgtaaaataatattgcattgtgtggatatactacattttgtttgtctattcatcaattgatggaaatttggtttaattcccctttttgagtatgatgaatattgctgagcattcacatctaaatttttatgtgaatgtgtgttttcatttctattgtgtatatacctgagagtaggattgctggatcatatggttaactccatgtttaaaattttgaggaattgtcagactgtttctcaaagtggttacagcattttacattcccattgacgtgtttttgtttttgtttttcgttttgtttttttttttgagacggagtcttgctctgtcgcccaggctggagtgcagtggcgcaatctcggctcactgcaaccaccacctcccaggttcaagtgattctcctgcctcagcatccagagtagctgagactacaggcgtgtgccgcaacgcccggataatttttttgtatttttagtagaggcggggtttcaccgtgtgatgatttcttaaaaaataataatttctacaaggctatagagattcttttttggataactttcaaaaacagattctgagctaaactcttttcttttacatatgtgtgcttctcattattttttatttcaaagtaaaattttaatatttcttgtagaatttagctcttaggatccatgttttaaaaattaaaaaagtaaaatagtccttcacaagtaatattaaaatgatggcaacttaatcttcagattttaaacttttattctttcatttttgtttaatataactttttttgtacatacctcacatataatgattcatagttttaattgacatagttgttgtttatattgctgcttctttgttccgttaaattttcttttcttccatgtgttttttttctggattctctgccttgtgattacaaagaggaattcctgacttatcttgaacactaccagctaactattccaataagggttgatcaaaatggagcatttctcagctttactgtgaaaaatgataaacactcaaggagaagacggagtatggaccctattgatccacagcaggcagtatctaagttattttttaaactttcagcctatggcaagcactttcatctaaacttgactctcaacacagattttgtgtccaaacattttacagtagaatattgggggaaagatggaccccagtggaaacatgattttttagacaactgtcattacacaggatatttgcaagatcaacgtagtacaactaaagtggctttaagcaactgtgttgggttggtaagtagatgctataattttaaacttctgatgggaaaataagaattttgcaatgtaaatgtctttcctcagattaaaaaaaaaatatatatatatataggtagtttaagtaggaaggtaatagtttaaaattttttgctatttctgctgcctttgattttgattttctttttaataatgtattgacttttcaaagggcagcttttaaaactctattattagaagaggaatgaacaaaacttcagatttccctttagacttatgtttttctgttcaaataagatatcttttatgcataaacaaaactcagtcatttttgaagaattttagggtatgtttgtatgtatatgtgtattatggcaggaagccacaacactgacattctttttataatatctttctttggtaggtaacatatcttaaaatttcttatgacctacttacagttataagttctcgaagtaaaatcttttatacagtgtctatgagataattttttatacatttatatgaagattgatataaatcttattttagttagaaaatgggttctaggctgggtgaggtggctcatgtctgtaatcccagtgttttaggaggccgtgatgggaggattacctgaggctaggagatcaagaccagcctgggcagcatggcgaggcacccatttctaaaaatatatttttaagaaagaatggaaaaaagaaaatgggttcaagactacagggtttatcctgggcatttgaatccattctagtctaatggtaaatacacagttcaaagttgcacatagtaataattgcaaaacaaagcaaatttccatgctttctcttctgtgtttaccctgttcaggctaatgtagctgttccattaaagctgtatctgtgaaaagggtaaaaacattttgatgctcaaggaacattttcagaaactttttcttttttattataacatacccatattcttatttctgtttcaatataaaataactataattcgagttgggtttaaataagttttaaatttgaaaggactatcaagaactacacaatggaggaaaacatttcactgtagatgtatataggaatgtgctccaattgtctactttctatcactgttaagtaaaatgaaccaaaatatttacttagcttgtaagatttaggcttaatttctacaaatagacaaattgagtatactcattactagtttctctataagcagtgttaggactttctctataaaacagatttatttttttaaataaaattatccaaaatgtgttctaaaacttttcatatgttaaaatggcacactattcattatcatagaaaaatactattcctagttattgactaggttatttatgtttggcattaacattaattatgccattgctagttttaacagggtgatgaaatgagcacattcaagaacaaaactaattccattgtgggatttgagagaagagtgattgtagatatgaagataatttagaacatgtaggagacaataagggcctattcgaagactatggcattgagaataaagaagacagaatgaatttgaaccacatttagggacaaaatttaaaatatttgcatcctattaattttttctttcctgacatgtaataagacagagaatacatagtaggtagttaataatattttaaaaaattgaaatagaattgaacttgtgagatacaggagagaaagcaattgaagatggctgagatatctcttttggatgaaagtatatatgaatgttatgagttgagaacgaatgtcagaggagagctggattggagaggaatttgaagagcatgcctttgatatagcaaatgtgaggaatctgaataaataaaggttaaagatatctaatggtatttgagaaatgtagctctgaagtttagaaaagaattcaattctggaaacgagtaacttcagagccattaatgtaggtgactttatgaaattgtgcaacatgctgtttgatgactcaaaagtgagaataaagttgaaaatggaaccttttctacaatgaaggagatgacaaaatgtcacctattcatccttattgagactttctgtctcttgttctctttccctctgttaacacctattttacttcgtctcttattgacactgtatggtccgtgttaactaagtttgattatttgattaaggtgtgatctgccaggtttgtccactgaagttactattttttcccttggcagttcgtaaggaatttgtgagcagatgtttcacacttttacacaccagttttagtaaactttatcttcattcttattttgtatgttactttttttttttttttttttgagacagggtcttactcttgcccaggctggagtgcagtggcgtgatcttggctcactgcaacctccacctcctatggatgttacatttttaatcaaatggaatatgtaaacaagtgttttttaaaaaattctacttttcaaaggccaccacttttaataaattctatgtttttaatcattctatataaaatagttgttaatgcagagatcattagtgttttctaatcgtatctcctcacccatagttttagtgctgggactcttgcaccattcaaaatacaaaattcctaacattatagtctgtcagcttcatataatgtcatattttaatttgctgtgtatttggaccatggtttcttactcaggttttgttttttctggagtttctgtttacttttactttttctcagtgcgaaaaaaaatatcgtttctttatcaagtgatttaatattttccacttccttagtccttttatctattgcttgaaatacattccattcttctttggaggcatttttcatggagccatttaattaatttattgggctaatttcttgatgttagtttctgtaacatctctcattttgggacttctttcctaaattagttccacatctttctctttctgagtttacattcctggttttgttggagaatatcttcaaaaattacctcagaacagcgactggaaagtaaagtttctgagtctgtgtctatttgaaagggaccttatgcagccctcatgtttgattaataatttagctgaatgtgaaattctgggttcaaaaaatcatcttccttaagaatgatggatggtggtactgggaaagggaatatatagggcataaaatttatttatatggttttatagctttaaaaaagaaaaatacttaaaggtcttaaaagttagcattgattcacaggtataagtctgctgctagtctgattcttgtccttttattctttaaaaattttttttagttaaaaaaaatttccctcagtgaaagcatgttccttttatccttcctgtttcaggaacttataacatggctaactatgggttttctttcctaatttctgcttggtatttgatgggtgcttttaataaagaccctccttcagcttagagaaattaaaaaaattatttccttaataattttatcttcttaattttttcttcctccctgcactctctttctggaattggttctctgcttcgcttatctttttctctttttccattgttttcttttttgttctaatttctatgagatttccccgatttcgtcttcttttccttcagttgattaaaaaattacagcagtcatatttctaattttcaaaagttctttctctttttcttggattttcttacattctgtcctttttttttttttgagacggagtctgctctgtcgcccaggctgggtgcagtggcgcaatcttggctcactgcaagctccgcctcccgggtccacgccattctcctgcgtcagcctcccgagtagctgggactacaggctcccgccactacgcccggctaattttttgtgtttttagtagagacggggtttcactgtgttagccaggatggtctcgatctcctgacctcgtgatccgcccacctcggcctcccaaagtgctgggattacaggcgtgagccaccgcgcccggcctattctgttcttatttcatgaagactgattatcttcagtccctctgaatattataaagaccatatagctagttagaaaagctcaatgatcccattagactttctgttcatttagtcatgtccatagttgtcattctccccttttcattattcattcatttcactaatacttataagtaccttccatataatgggcactgttgtaggtgctaggattacagtagtgaaaaataaaaatctctgttatcatatagcttgtattctagtagggtatacacacaaaaagataaataaataaaaactataatacgttgggtagtgataaatggcaaggaggaaaaagtattgagcaaagaccctaagggaaaggaggaaggaaatgctggcatctgagggataagatttccaggtagaaattttaaagtacaaagatatgatcttagagtgtttgaggaacagcatggaggtcacgtggctgtagccaagagaaagggagggagaataatggaagttgaggtcagaaaggaaactgggagccagatgtaaaggctttaggggacacaaaatagaatcaatgataactacaagttcgaggcctgagcaactaacataatctagcagccatcaactaagatgagaaagactctggaattaactgagatgaaaaagctgttcgaggagtaggtagggggatgtatatcatgagttcagttggaggtgttaaacgtgagatgttgtataggatattggatatgtcagtctggagttcagaagagagatatgaattagaaagttataaatttgggagtcatcaatatatagatgccatttaaagccaagagattatatgaaattgctttgaagggagcataggtagaatagagaagaggtctaaggactgagcccttgggcattccaagaggtcagggaggtcagagagatgtagcagaaacaacatagaacagagtaataaagctgaaggaatatctggaaaatgttctggaagccagaaggaaatatttcaagaggaaagtgctgctgatgagtccaaataagagtagcactgcaaattgcattgaatttatcattgaggaagttattggtgaccctgacaaaagcagtttcagtgaagaagagtttgaagaagaggcaatgacatgattggagtaggtttaaaatggagtgggaggagagaaaaagagtatgtagacagttatttcaaggatttctggaaaagcaaaaaaattttcagtagcaggcagaagtgtggtcgcaggaggttttgttttgtttgaagtgggaatgattaggtagagtgaggggtgctggaatgaagttcttgataggtgagaaaggatagaattttccacacaaatagaataattacctttagctaggggaatagatagttcatccataataatagggaaaaatagattatatggacataagatgcaggtaggtgggtatttgtgattgtaggaatttgtaggaggttttgcaatgtctatcggaggggaatatgaaggttttagaggattaagtagagatgagaaaacatgaaatagttatccaggagaatgggatactgaatgaacttgataaatatataatttctgtgaagcattacagttacagttaaaattattaatgaatctaaagtgagaccagtcagcattttgttgtatttttctctggctaaatgcagctgcaaaggtgcaggcccagcaaagttgaatcttatcaaggttgtggtttagccagctggattccatgaagtgagaaagaggtaagggaattgaaggtggaattgaagctgggttgtgagggaagtgaggacatgaggtgggtgaaggacagtgaaaaggtgataggatcaatggattatgggacctcatggggataaaaggactatcccttggagttggcatattagagggacagttttagaaagatagaagaatgggatacttgaaatcaagattatagaaggctccaaatattgataatgctcaaagtctagggattgactgtgggcatggtgtaaaaggtaaggtgagggacaagatatttgaaggagaggaggtcaaggaattgagagggcagggaatgaagagaccatctatgtcattagtttttaaactaggtccatggatgggattcagggggattgtgaactgaagtgggcaaatatcacatctttatttttactaattcttaatggaaatttaacatttctctcaattttaaatataggtaacaaaccaatatgttgatagcagtacctgtgactttgcctccaatagaaaccacagatattttcatatcattacggtttttgcattcttttaaaaatatttttattcatcactaattgtgaaattgtggtagttattagagccactgaatatcttatttaaggtgttacacaagttatatgtattatattttaaaaatattttgataactgtattttactaaattggttttatttataatcctatatattttttctgcatttaaaatattctgaggaggagtccttaggtttcacccttagacttccaaagggattcagggtatgtgcacatgcacatacacgtattttaagaacctgtgatgtaagaagatattgaaatcaacaactatttcaggaatgatgttgcagagaatgacggtgatctagaatctcttatttttaaggaatgagggaactgacttgggatcaatagataaatgcaactgggaaaggagggagaagatcatggcatgaggttcaatgctggtgtttgtttgttgaggaaggagaaagaattgtttggaaatgacagtgagttgcaagaacatctgaccctaccttcaggtccaataggaggcatgtagaagacaaagcagccaccgttccagaggactacaggaaaggagtgtcatttagggagcttcaggtttttgttagagcaagatgaagtgaatattcagagatgaagctggtggtagaggagattttgttgatgattgaccttgagtttgagagaacacagtagaagtgtttcaaataatagggagaggtaggagatgggatcagaaaacaagatgtacataatcatatgagaattagaattcagggggtgaggtttgggcttctcaaaggaatttatacctcaaggaaagaggaggcatggtgaaattagccctaatagtcctgaggcagatagtgtaaaggtgaatggggatactgaggtaagtgagagcaaggcttttgccaggcatgcatagatttctggtactcccactaaattcaggccctccatcatctggttttcagaccctttctaatctcataatcactctccccttccctcccttcagtcactgtagctcctgattgtttctgaaatactgtaagtatgctcctacctcattgcctttgcatttgttgttcccagtatctggtctgccctttcccaagatatatatttggcttgctccctcatttttttcaggtttctgctcaaataccaccttattagagaggatggttgcaactatccaatagtttgtataattctctcacttctaattattctctgtcctttttgattgcttttatctcccctcttaatgtttatcagtacctgcttcatcatttatttgtataatcaattagcttttttttttttttttagacggagtcttgctctgttgcccaggctgagtgcagtggcacgatctcagctcactgcaacctccgcctcccaggttcgagtgattctccttcctcagcctcccgagtagctgggattacaggcgtgtgccaccatgcctggctaatttttgtatttttagtaggggtggggtttcaccatgttggtcaggctagtctcaaactcctgacctcgtgattgacctgccttagcctcccaaagtgctgggattacaggtatgacccaccacgccaacctaattagctttttctagctcctcccaccaaaatgtaagcaacgtgatacagctggaactttggttcactgttgtatccctaccacatagcatagtatctgccttgtgataggcacttgagaaagcatattttgtgaaaaaataaataaatacagaaacagcccttagaggataagagaattatggtgtagtggttaagagttcaggctccaaagtcaatcacgagttcattgtttaacgttgctccatctcagtttctcatctacaaagtggaacagttagtggtacgtcaaagagctattaagaagagataatgttataaacattttacaaagtacctaacatataaaatctctggattgttcttctagagtcttttcattcttgaaattagagattgtgtttacttaccaggcttctgacttcatttttccccagcaaatcaagtctcttgtctggtaactttcaattttcttgtgcccacagaccagcatgactttagtctctagcctatctggactgtagcctagaccttgcttcctacatatccctcttatcaaaacttatactttcccccttattctgcaggaactgtgttcagttttttagcacattgttgatctacctggtaaagtacttcatactgaggtattagaatatgttaatggcatattatgttatttctgccagtatttgcatttaatatagggactattttccttaaattaaagcaaacaatggtgaaaattatatgaagtgactcagggctgctttttttgtttgcattcctcagctcatttcatgtaggtgactgccaatttaatctataaattagagcaactctgattatgtcttatcattccttccaagcatgaggtacttaacatgaatttccctaagcagaatcatagaggtttagaattcaaagggaccttagagattatctggactagaggttttcagctttctttttaaagcagcaaaacccctttttcaaatgaaatgttatgtggaaacttaatatatagattaataaatagcacagctgattcctaaacccaggaatccaagccatgtaggtctccctttgttgtctggggcaatcccctgagggcacttccatggaacccttagggctccccagagtgctgttttaaaaccactaatttagaccaactctttcatttttccagctgaggaaatacacccagagagtttttattttatctggtgttacagggtaaattagttggattaagagcagtcctcacatgtgccatacttaggaaaacactattagacaaaggtggaaattcttatttcagatgtagataacttttaccatctcatttttcatcaacaaagttctatttatacctattacatgtgggacactttctatggttttaactgatacgaagaaatatgagatataaccctttgccttaaaaagcaaattatctaattgggaagctaaaatatgagttgaaaacttataccaactttaaataagacttcacgacttgagatgtaacaaagcagtgtgggattaattgaaaataagtgatactgagaattagctctattggagctcagtggagggtgaagctactccatttggactagagaaggtttttaaagaggagagataactgagtagcacttggctaagtaaatagggataaggtgatataatactgtaagtaagggcagaactttgaattccagtaccctcacttacctctatgtaatattgggcaagtcctctgagcctgttacttcatctgcagaatgggggatgtatgggatgtgtgttaattaagaacatattaattgatgtaacataaacctcaaaatgtcaatgatttgtcacaatagaagcttatttcttctgtatgtctgtgtctacatcagacatctttctaagaggtcacacagggacccaggttccttcttttttggtttctacctaccctaggtatttggagttctcttcgttcagtggggaaagagagtagaagattccactgcagaggtattcagaggttgggctgaaagtgttacataaccctctgcccatatttttattgtgcaaaactcaatcacaaagctatatctaaacacagaggacatagttatgtgcataatgtggaactgaaataagttttagtgttcacataaaatctgttacctcacagagtcgttgtgagattggaggaaatcacgtatgtgacatgcttagtacagtgcatagcatatggaggtatttaaatgtcctttttaaagaataggaacatttatataatgttttaattgagtacagataattcgctaatttttttattaacgtgttttaaccctgtaaatggagaagtgtccatttacttttagctcttggtaataatgataactaatatttaaaatgattctctttggtaagttctttgtttatttttcttttagcatggtgttattgctacagaagatgaagagtattttatcgaacctttaaagaataccacagaggattccaagcattttagttatgaaaatggccaccctcatgttatttacaaaaagtctgcccttcaacaacgacatctgtatgatcactctcattgtggggtttcgggtgagtgagtgtgcagcttttacaaagcgtattgtactggattgctgctttttctttcttctggcaagtatagtaaggttagcaataaaaggaagtaggagtttgactacaattataatgtccagagcccttttaatagatgtcacctaccagtagttttaaatcaatttgggagctctttgagaagtttttaagctgtaagtttgtataaaattcattttctttttttggttgaagggaaaaaaataaccattttattttacttaggtaatagctatagcttttttgcacagttatactgtagtactctgtggtgttcgtttagcctgatatttttatgctagtagcaggaatctagacacttgaataagacttgaagagtcttaagatagtattcaaaagtagtgttagcactgagcgaggatactatagaaatatgtagtacgggcaacaaacttagacttcagtggtcaaggaaagcttcatggaagaagtgacttctaagctgagggctgggggaaaagtgaaggtagctgtgtagaagtggagaaagcagtggctattagtgtttcacatagaggaaatagtgtttatgaagctcctaaaccaaaagggagaatgtcttataattgttttataagacatgttttataaattgacagacagttcatgtaactggatattagaatgtgggctggagggataaaggtgaggttcatagtggttgggggaagtggttgtgagagatgaaactggaaagattagcagaggccacatcatgaagagcttataaaccatgttaaggggtttgtttatcctacgtgcactagaaacccactgaaaggatttaaacaggaagaataacataatcagatttgtgttttagaaagactactcttgcagcaatatggagatggaattagagaagagcaagactagagctaaggagttaggaggatgttagtctaaaggtgagaaaatgtagagaaacaggccgggcgcggtggctcacacctgtaatcccagctctcagggaggcaagaggcgggaggatagcttgagcccaggagttcgagacctgcctgggcaatatagcgagaccccgttctccagaaaaaggaaaaaaaagaaagaaaaaaaaaagacgaaaatgaagagaaacagtggatataacatagcacagcaaaaagaacatgcgctttgatatagcataggacgaattacccaacctctctgagtgctcatcttagcacatactagttacccaatcaaattgtagctatcattaagatgactgtttctagtacactaaagtgttattatattaacaaaaatttttaaagatttgttctatgtagttccagtagctagaaccaggggcagaatgtttcagagagatttcagcttaatgcaaaggtaaagtcaccaacaaatagatttagtgaaaaatagaaagggttggccgggtgcagtggctcacgcctgtaatcccagcactttgggaggccgaggcaggcagatcacaaggtcaggagttcaagatcagcctggccaatatggtgaaaccctgtctctactaaaaatacaaaaataagccgggtgtgttggtgcttgcctgtagtcacagccacttgggaggctgaggcagaagaatcgcttaaacccgggaggtggaggttgcagtgagcacagattgtgccactgcactccagccagggtgacagagtgagactccatctcaaaaacaaaaaaaagaaaggattgccttgtgaattagtgtatgatatgtattatccttttgtttcttctccatattcttcataggcttgttttcttcctaagtgttaagtcttcttttcttaatctacttttcccattctgcacactttcttcttgagtaatctctgaggctgttaattaggtccttgttggtcaagaatagttggtaccagaaaaagacaacttacagtgaatctacttaaaacatgaaattaaattccatagttaataattaaaacaaaaggtttgttgggtctttatattgagtaatgaaatgaaccattatggaaataagtttatcttatatttaacaacatttagactgtaagtataactatatgtaaattctttaaaaactaggattcaggccgggcacggtggctcaggcctataatcccagcactttgggaagctgaggcaggcggatcacgaggtcaggagatcgagaccatcctggccaacatggtgaaaccccgtctctactaaaaatacaaaaattagccaggcgtcgtggcacgcgcctgtagtcccagctactcgggaggctgaggcaggagaattgcttgaaccctgaatgcagcggttgcagtgagcgaagatcacaccgagagcgaaactccttctcaaaaaaaaaaaaaaaaaaaagaaagaaagaaaaaaactaggattcaaatattcagttgtttattataatgtaattattctatcatttttccataatatgccagccttcactctatgattgtaaagaagatcaccttttgcaaaaatatttaaagattttatcatattctgaaaagcttatctcttaatcctttcatatttaaattattcttttttgaagtatgtatcacattattttaactcaggcagatccttattttttaatggtttacgcattagtcaagcacttctccaatccattcttatggctatcataaaattctgcacttttggggaaagatattctcttaccatctcttatttggattactgtgagaatttcctaaagtgttccatttcaatgtttttaattcacttgccatttctactaccccaaactctagtctatttattttagaccctcattatctcttgccgagaccactatactgactttctaattatgctttttgtctccaggtttgtgttcttattttcagtaaaatctgtcccctatatctggctgtatcacacaccttgaaaaacttcactggcttcccattactgggaatataatagtatttccctatgttctgggcaagtgttactggggaaaaaaaacgttttgtgtttactagtaaatttgagaaatgtctggctaacatcttaattgtgatactgtttcaacagcataggtcaagtgagagatgtgaatttataggcatacactaccagttagcctattacctggaattcaagtttatgtcaaaatataagatatgaaaacccccttgacacaggacatatttatcttatattcagatattatttttttctattctaattagattcaaactacgaatttttaaacattttatagaagtaataaatgttccttttagaaaatttagaaaatacaggacaaaaaggaaaagaagaaactgaaaattacttattccaatacccagagataactaagtattcttctagtccattgaaatagatattattatgtctctatatcttcattatctacttatgtattcattaaataaatattcatttagtacccgtatgcaaggctattctaggtgctggggatgcagcaataaataaagcagaaaaagtccctgctctcatggagtttatattctagtgaggaaagacagttaactaaataaacaaacaaacaaataaatatatggccaactgtccagaagtagtaagtactatgaacaaaaataaagcaggtcaatgaaataatggtgaatggctgtatatattcaaacactttgatattgatcaaaaagttaaaatcttatttcagatggcaatgaaatccatatattgattttgggaaaaagttattgtgttgtatgtgtttatgagcaatgtttcctaacatgctataatctaatcaaaattaaattgagcaaagcatgtgtaacaggtatcatttgaagaactactaatctttattttgaaacaaaacaagtcaatcttgttttctattttagactaagaaagatagtagttacagatcattaagcttaacattaagaagtcaattggcaattatagaatgtatagttttataatgagctaattatgctggattaacttaatttttaaaatgaaactgaagatgttctctctcttgattttattcagtatatgtgtatatgtataaaatattgaatatataattatatatgatatatataaaatgcctttgatggatattcataaataaaaatatatagttttaacattcaaataatttgtagtttgttagagtgatagccaagcaaactaaaatttttaaaaactaaaatgttgaaaattttgacaataacaaagatgatgataacagcaactaccttacactgaatacatttttgttttttttattattattatttttgagatggagttttgctcttgttgcccagactggagtgcagtggtgccatctcagctcactgcaacctccgcctcccaggttcaagcaattgtcctgcctcagccttcctagtagctgggactacagatgtgtgccaccacacagctaatttttgtatttttttttttagtagaaacattaatttaggatttgaaatattttactggacaaaatatttgaaatattttaccaacctgttctcttttttaattttttagtttttgagatggagtttcgccctgttgcccaggctagagtgcagtggtgtgatcttggctcactgcaacctctgtctctcaggttcaagtgattctcctgcctcagcctactgagcagctgggattacaggcgcctgccaccacatctggctaatttttgtattttaagtagagacaaggtttcaccatgttgaccaggctggcctcaagctctgacctcaggtgatccacccgcctcaggctcccaaagtgttgggattacgggcgtgagccatcacactcgacctgaatacattttaaatgaggactaccattgctatgtgtttattgcacaataatgtctaattattttcacaatattttaaataaaaaggagaaattgaatgggtcggagaaggggaaatgatcaaaagaatgaaaataaaatcctatatttggacatttaagctgtttagccagagtaagagactaggcatgacttgaatacatgagtggttttatgatcacagaggattgagcaggagaaattggagttatattgatgtggaaaagctttcagctgttttgtaacaatattagccaataaaacctagtggcttactcagtatacttttagtatttcacagtttctgttggtcaggagtctgtgcatggatgggtcatctgcttaacctcaaccagggctgaattctcatctggaatcttgactggggaagaatccacttctctacccccatagttgtggcagcattcagttctttgtggttatgggtagctttagtttttggatgattgtcttcagatgccagcgtcagttcaccagcatgattgattgctttctctaagtcagcaagggagagactctagacaaatgctacaatattatgtaacataatcatgtactaatatactcaaaatcacatgcatctcatcatctttgctgtattctgttagttagaaacaagtcacaggtcctacccatattcaaaaggaggaaatcacaaaaggatgtgaacattaggagacagaggtcatggaggccatctggagagtctgtctgccaaaattggatatagagaaacactatctggaggatattctatcgaaataagaagtggtgtttatgtctttgcttctcttcacctttagggatgaagacactcatttaacttagaagtttcaggagtatttaactgatgggtctcatgatcatttccacctcatttctcaaaatttatccatcctactgacttagcacatttcttgctgctgtaacagaatacctgagactggataatttaagaacaatgaaagtttacttagcatatggttctggatgctgggaagtccaagagcatggcaccagcatctggtgagggtcgtctcatggaggaaggcaagaggaggaagtgagtgcacacaacagagagaggaagttgggcctgaactcattatttttatcaggaacccactcccacaataaccaacccattcctacaacaatggttttcattccttcatgagggtggagacttcaagttttaatcacctcttaaaggccccagctgttaatactgtttcaatggcaattaagtttcaacatgagttttggaggagatattcaaaccatagcacctaccaatgcaatttgtaaaacagaaaggctaaagaagttagaaaaatgagaatagttacactttctgtcaagtgtatcatatattaatctaattattcctcactaaattttttaataagtgggggtgagaaagatttcctgttcaatataaggatgtggaagtgagatatacagagaacctctacatgctcaagtttatttaatgaagatgataatcagtgaggcaggtgtttacaaatgccatagtgctaaaaggctgcttctatactgaagaaccaaatgtctagaaaacaaaggatacattgcaatccatgctaaatatggttcaaagcaaattatgctggaatcgtgatctttcaactataattgaatgtctcttacctctaggctttggaaaagaaatattttgagtactctgtcagaataaagagttgtagactgccaacctaagtgaaaaaagtaattcgttgccttttagaattgagatttctagagcagtagaattgattctaattaaaatagcttgatgaaagcatcttattttaaaatgaataatcaaaagtatctttggaatagatttttgcaaaatcagggctatcagagctgtcttagactgattgaaaagttcatactctagatgctttttaaataactttaaatggctctttaaagtatatatcctaaatttaaatgtattaagatgtaattactggaataatatgaaatgactatttgaaaattatttttattaattaattcatttcttagatttgttttgttttcatgagcagttgaatgtttaattttttcagataacgtgattattttcaaaaatttacagacttttttctcactactgcattttctcattctcttctctttgaaaaatcttaatatattagagaatttgtgagaagcatgtctacatgaaagatctataaataaatatttttaattagtgaacctatctgaattggctgcttttattgtagatttcacaagaagtggcaaaccttggtggctgaatgacacatccactgtttcttattcactaccaattaacaacacacatatccaccacagacagaagagatcagtgagcattgaacggtttgtggagacattggtagtggcagacaaaatgatggtgggctaccatggccgcaaagacattgaacattacattttgagtgtgatgaatattgtaagtttgatccctctatataatattttacttcatatttgttgtgtttttgactaaggtcataaatttttgctgtgaagtaaataatgataagaatttacctgtctaaaatggtaaaaaattggtctagtaatgtttcagttccataaaaatacatttaaagatgaccttatcattcatttttagataatatgacagttttagtggattgttaaatcttgtttaagggtttttttttttttttaacttgaaacatcagctcaccctctaatttccatgctgtagttcatgtctaggaggaaatatttattgaggtagacttgtataaaaaccttttaccaaggcaccttgaaggtagagttctaagtgatatggggtaatgtatacaatggctaaatttataaaaaattgttttagcacttaaaaaaccaaactatcaccctataatttttgtctgactttgtgtcttttcttattttctggaggtcaggttgccaaactttaccgtgattccagcctaggaaacgttgtgaatattatagtggcccgcttaattgttctcacagaagatcaggtaagaatgagttagtttatatatctaagattgttaacagaaggctatagagctatagaattacttattattaaataatatgttttattattgcttctattaggaaattctagttggatatgatttttagctctacacatttaatatcttaagcaaattttaaatacattacaagaatataccttttatgttaaagctatatagattagctatgtttcagtataagggtgaacatttgcatggcatatcttataataatgattttcattagtttttgtgttgataatctcacatatgttcacattatcattaaagctggaactggaaaaaaataccagttcaataatataccaaatgagctctaggtcagatattacagagataaaaattggcaagagattattcctagaaacactgcttctaattatagtcccacttcagtcttcaaaagttttaacaactgaccttagtaatttgtttggaacatttctggtatgcatgttgtattgcagccaaacttggagataaaccaccatgcagacaagtccctcgatagcttctgtaaatggcagaaatccattctctcccaccaaagtgatggaaacaccattccagaaaatgggattgcccaccacgataatgcagttcttattactaggtatggtttgttgcaagtatttttccattgattgttgtgtttattcactattgtaataaatttggttctatgtaaagcctcattcagataatgagtatagagaaagcaaaatggtaatttatttttcactactgagaaagaatgtattacactattattgtgtttgcatcaaatgaaccaaataagaaaaaagaaaatattaagatttgacttagaaatttaataaataactttcctcctactgataagttctattcataatatttaatcaaaagcatgtagatgatttgttaaccgaacaaaatacatactaaaacaagattaaaacatatgagaaaatacatatcttaaaaataaagtgaccattatcagttataaaatatattaactatttttacctttcagttgtgttaaagtttattaaaagggaggcggagactggcagttatacaacttacttgaatgtttatttaatttgaaatactttaagatatataaacataaaaaagcagattgattacactatgtgttgaacagcttgtctctcaagcaaaattattatttggtgataacccattgaattcttatattgctttccagttttacaaaactgttttgagatccattttattctttactctccagcaacaattctgtagatagtgttattatgttactcatgttaggaatgagggaactgataggtaagtttctcaagattacttagctaataagtgaaagaatagggctcagattctggtgatcctgtctttgattatacgatgctatctgttatagtttttaatactcttacttataattggttagaaacattatacttaaattattttaagataagtgtgccttttgacttcttatcaatattttaaaataaaaagtaacaataaacaataagcaaaatggaagcattattctctcttggctaggtgaaatagtctttggtatgatggttatttcaatttgcaaggcagtatttaacatacgtttcatctgtggtatgttcattgactctacattaggttctagggagggaatacaaagtatatgagttagaatcttgagatccagtaagataatgtaaactttagaaaaagttcccgggtaactgagtcatacagtgaaatttctgaatttttttaatagttatacttactttaattgactttatctacctggcatcattggtgagaaaatttggtttatgacatgcttgctgaataaaatcgtatggttctatattaatatatgttgacattttagtctgataaaatgtgcaacaccttagagtcttgtggtctggaatattcttaaatatacttaaggaattaaaaatatactaggaattgtgcgaatgtggaaacctttctgttaaaaaatatggacattgattagtgtcaatgaaattactagaagaagatatctgttatatatagctaacaaaacgatcataaatatttacatggcttttgtatttatatttgtaaagccctgtcttcccaaatatgacgcacagtgggctcccaatacttcacatttgcattattatatctccattggatttttaccttttgcctcaaatgacagaagttacaccaagcacatatataggtattcaagtagtagagtacatctgggcaattagcccacctttctttgcactggctacaacattcagctgtccaactttttattctgaattcgccttgatattttcccgattctctgcagggctcttctttgcttttgtaagctacttcgagtgcctttttgatgtttgagatttaaacataaatttttattttttatttttattttatttatttatttatttttgagatggagtcctgctctgtcgcccaggctggagtgcagtggcgtgatctcggctcactgcaacctccacctcctaggttaggttcaagtgattctcctgcctcagcctcatgagtagctgggattacaggtgcgtgccaccatgcccagctgattttttgtatttttagtagagacgaggtttcaccatgttagccaggatggtctccatctcctgacctcgtgatccgcccacctcggcctcccaaagtgctggggattacaggcgtgagccaccgcgcctggcccaaaattttctttttaaacttgtctgctaatgatcagactagtactagaaatgataacaggatttaataagattagtagttcgaagagttcatatcatattattttagattggctaatgtaacagaggttagaaaaatgctttttgcagcagtgtagaattcttttttgaactcttattaaagtttcaaagtaacttctagcctatttaaaagtctataattatgtttgaattactagggccatagagtgacttaacaaaatgggaggagtatcatctttaatatttaaaaattgttattttttgaggatcagaggagaggtaccagtgttggactctctcttatatattttttattttgaaatccaacgtgtgtttaaatcatactgctaatttttgtaaaaatatttttgagaattccacagatgattttgtattaatattgaaaattggttgatctaactcacttattaacatgttcggggtgtgacctgactgtttatgggtaagatcatgatgcatgtttgcttgaaatgtcaccttactagggagaatgtataatgtgtttatcaagaatgccagggccgggcgcggtggctcacacctgtaattccagcactttgggaggctgaggagggcggatcatgaggtcaggagatcaagaccatctggctaacacggtgaaaccctgtctctactaaaaatacaaaaaaaactagccaggcgtggttgcgggcgcctgtagtcccagctactcaggaggctgaggcaggagaatggcatgaacccgggaggtggagcttgcagtgagcctagatcgcacaactgcactccagcctgggtgacagagagagcaaaaaaaaaaaagaatgccagaggaaaaatgatggatatgtttatttccactaggccaaattttgtcccagggactcaaaggtttatgcagaaaaccgtttgagattgtagttacttaagtaacaatagttacttttaaaaactcaaaatgttatcccgtcttttacaaattatatcttattgttttattttgttgatttacatttaaaacgaactgtgatccgcaaagctatcagatcactctgactagacaggaagaaaataaaggaattttgaatgttgttttatctgatatcaataatattgaatgaacaccaaagagcatatttaaattatttatatatattatacatgtgtattttatatgtacatatatgtgtatactatgttctatataattattcataataagtaatatataatataatgaataactgttatcactacctagatttatcaaatcttaactttatgctataccaaagagcagctttaggccattttctaaaatgatgattacctctctatgttgtattaactatctgacatcttagctctgaataccaaagttagtgctataatgtataaatttgtggaaatatggcaatatttctatagtttattatatttcatatattataaatatacattaatagtagaataataaaactgatctttcatttttgtgatctataattttagttaaaatatcagtattagtaactggtattgattgctttcatagactaagatatgttagaattatttgatgattattaatattcacctaaattagtgaatgaaattcacaatgtatcagtggtgaaatatgacattatatacctatgtcaagaaatgattaatattctttacttgacactctagaagcagaatttttgaaggcaaaatacaactgtacatatatagttaaaaagttaacttgctataaaacttgcaaattgtctttattaagcttttgtattttgttgttttaaaattattaaattgacaaaaattgtgtgtctttatggtatacaaatgatgtttagatatatctcaacattgtaaaatggctaaatctagcattggcttgatatgtgttgcctcccatactttattaaggtttgtattgataaaccaaattaatagctacttaggaataaaaacctgcaagttgacagattatttaatttaattaaattttcagatgaagtcaggaaatatccaccacaagtttaaagtcaagccaatatctaaatctgttttgtggtaaaatactcaagaaatctatttgttgtctgaaattcaataggaattcaaagacatggagtatatttgcatcaatgtttagcaattagcacgaacagactaatgcatatatttcttggctttctctcctataaagtattggaatcaggtttttccatttttaagataataatacgtaacagtttatatttagggtagaaattatagcccaagttctttttatggtaacagctttattgagatataattcacaaaccatacaatttacccatttaaagtatacaattcactggttttgagtatattcacagagttgtgcaatcatcattatcatcaatttttagaacattccatcactcccaaaggaagtcatcctccattccctacattcccctcagtccccactcctaccctagtcgtaagcaactgctaatctactttctgtctatatagatttacctactctagaccatacatacaaatgaaataatacaatatgtggtcttttgtgacttgcctcttttacttagcacagtgttttcaaggttcatccataatgtggcatgtatcagtacttcattcctcttattggcctaaattcttcagaattcaagacaccttttaagactgcctctataggctatttgtcaattattatacttgtacagtttttcattaatgaaaagcacaggatttataaatacatctcaaaatacagatgcaaaaattgcacaccaagtcaaataatttagtctttaattaaaatgggcattttatcctcttaaggggtcatgactgtttgctttggtgctgctggattataaaggaattagaatttccaaagtcacctaatgttttcagttgggaatacaaaaatagctataaaaatggtttattgttaaaatttggcttgcagtgtgtgcatttaaacaagttttcttattttttaaataatgtgtttatcaggattatatattggtttcatggtaatgtattaggacagatagagaaaagggaagttaaatgtgatatattaacatttatttggtattcatttatggatttttaaaaatctttaaagaaatgccagttacctcttttatgaccagttaaatattttatttcactagcttttaaagaatatatttggtttatacgaagtgtgaattcagattgtgggtgaattaattttggtatgtggacattttgaagcatttatttttctcttaccacgctgctttttctgaattgtttgagatgatcatatagttcatctttctaaaagtgtattaacacagtgaattgcaatgattggtttagaatattaaaccaacctttctttctttttttcttgagacagggtctctcactctgttgcccactattatctacccacccccattgcccatattcctcctcttcagtttcctttccttttatccgtgccttgttggtttcttactcagaagtgtttatcttgaatcagttaccatttcaatgtagactgacaaactggagtaactctaatttcttgtgtacactgggacacttttaagagtgaaagaggggggctctgtgtgatgggtcatgcctgtaatgccagcactttgggaggctgaggtgggaggaatacttgaggtcgggagttcaagaccagcctagccagcatagtgaaaccccatctctactaaaaatacacaaaaacattagtcgggcgtggtggcacgcgcttgtaatcccagatactcaggatgctgaggtaggagaatcgcttgaacccgagaggcggagattgcagtgaactgagattgcaccactgcactccagcctgggcaatagagtgagactccatcttaaaaaacaaaaaacaaaccacaaaaaaactgaaagagcatgccattgacagttatgtctgaaaaacaggcacatattaggacctggtgaaacaggattatggttatctcaggcattacctatgtttgtttgttgaagttcaaataaaaatggaaacaagaagatgctatttcctcagtgcccaaatttaatcaattatctttatacacaccttgaataaatagtgtaccttatttgtagtaggcgtcattaaacagttaaagaaggatgtattgtactaaactctaaggaatagtaacttaagtatttatattggttttatggatgtattgatgtatgtatataaccaagtaccagatacttaagtgctttacagacactcaatcatttaaaaccttaaataactgcatgagataaggactgctgtttttctccatattggagaagagagagctgaagcacaggaaagtaaattgattggcaaggtcacacagtaattagtagaactaggatttgtaccatgcagtcttgctacaaagtccttttagaagagttataaggatatgcaacaaaaaaaaaatgtggtatcctttaataacgttggcacctgtggtaggcagacttctaggatggccctcagtgatctctgtctcctgatattcatgactttatgtaatcttctcctctggactgtggtctagcgaactgacatcttaacaatatggagtcttccaactcatgaacaaagtctatctctccatttatttaggttttcattactttctctcagcagtgttttgtggttttcagtgtttttatacctttggtcatattttttgatgttattgtccatgatactgtttttaaaatttcattttcaatattaatagtttttcactggtatataaaaatgcaatagatatttatatggattttgtatcctgtaaccttgctaagttcatttattggttttaatagctttttgtgtgtgtgtcagagtctctctcttgtctcccaagctggagagcaatggcacgatctcagctttgtgattctcctgcctccgcctcccaaatagctgggattacaggtgcctgccaccatacccagctaatttttgtatttttagtagagatggggtttcaccatgttagccaggctggtcttgaactcctgacctcaggtgttctgcctgcctcggcctcccaaagtgctgggattacaggcatgagccactgagcctggactggttttaatagctttttaatagattccatatataaagatgatcatgttgtctgagatgaaagacattatgcttcttccttttaataatgaatgacttttatttgtttatttatttattttttgccttattggaatgtctagaacttctaatacaatgtataataaaggtggtgagagcagagatccttgttttgttcctgacctcagcaaggaaagaattccgtctttcaccattaagtatgatgttagctataggtttctttgttgatgcgctttgtctggttgagaaaatttccttgtgttcatagtttgctgagagttttttttttttttaaatcaggaatgggtgttggaatattaccaaatgccttttctgaattgtttgagataatcatatagtttatcttttttaaagtggattaatacagtgaattgcaatgattggtttagaataccaactttttttttttttttttttttttttttgagacagggtctcactctgttgcctaggctggagtgcagtgttgtgatcttaagctcattgcaacccctgcctcccaggctcaagcagtcctcccacctcagcctcccaagtagctggtactacaggcgtgcaccacaatgcccagctaattttttgtatattttgtagagatggagtttcactatattgcttaagctggtctcaaactcttgggctcaagtgatcctcccaccttggtctcccaaagtgctgggattacaggcatgagccacactgtgcctggccaaaacaacctttcattcttaagatgaactcaatttggtcatcaatgtattattcttttaatgtagttagatatctaatttacattcccaccaacagtgtaaaactgtttctatttcaagcattgtggaagacggtgtggcctgggtatatacccaaaggaatataaaccattctattataaagatacatgcacatgtatgttcattgcagcactattcacaatagcagagacatagaatcaacccaaatgctcatcaatgatagactggataaagaaaatgtggtacctatacaccatggaatactatgcagccataaaaaggaacgagattatgtcttttgcagggacatggatgaaattggaagccatcatcctcagcagactaacacaggaacagaaaaccagacactgcatgttctcactcaaaagtgggagttgaacaatgagaacacatggacacagggaggggaacaacacacactggggcctgttgagggtaggggaaggggagggagagcatttgggaaaagagctgatgcatgctgggcttaatacctagctgatgggttgataggtgcaacaaaccaccatggcacatgtctacctatgtaacaaacctgcacatcctgcacatgtaccctggaaatcaataaaaatatatatatagttagatgtcattttccaaaattgtattttttttttagatttatatttatgagggatgttgttctgtagttttttcttagactgtatttgcctgattttggtattagggtaatgttgccctcacagaatgagttatgagatagttccttcttttcaattttctggaagagtttgtatagaattgatattatttcctcctcagatgttttgtagaattgacaagaagccatctgcactaggagttttctttgtggagtgatttttttaaactaccagttaaaattgtttaataatatagggctaattaggttatcttattcagtgagctttggtagtttgagtatttcaaggaatatgtttattttttccaagtggtgaagtgtattggcataattgtttataatatcttattatccttttaatatctgtagaatgtatagtaaaatcacctctatggtattggtagtttttgtcttttgtcttttatgtctttttcttgtcttttgtctttttctaatcactgtggctagacattttaataatcttctcaaatttggtttcgttttttttttttcatttttctgttttctgtttcattgatttgtttccgtctgtctacttggttcaggcttattttgtttgtggttccttatggcggaagttgtgtcattaatttgagacctttctgcttttctaatataagtgtttagtgttagaaaattccccctacatatagctttatcgcatctcacaaatttggatatgttgagtttcagttccattcagttcaaaatactttctaatgttcctttagagtatttctttttttttttttttgacccatggcttacttagaattgtgttatttagttccaaattcccccccactgcagaaattcttttgttgttaatttctaatttagttccactgtggtcagataatatagtttgcatgacttgaatgctttttagtttattgagacttgctttatggcccagaatattgtctttcttggtaaatgttccaggtgggtgcgcttgaaaagaatgtgcattctgctattgttggatcgaattttctatatatatcaattagattaatttgggtggtcatggtgtttaattattctttacccttactgagttgaacaatttgattatgatatgttttggagtagttttcatcatgtttggggtcagtgagcttcttagatctaatttaatcagattttcaccattttagccaatattttctcaatatattttttggttttgcccttcttgccttgctttggtgactttaattgcagatatatttggttgcttgaaggcaactcacgtatggtctgcttatgattttaaagtctctcttctctgtgtattcaattttgggtagtttctattgctatgtcttcaaggtgacttttttctacaatgagtaatccatcagtctggtctaatatgtattttcatcttatgtagtataatttttttcatctctagtggtttaatttgggtcttttaaaaaatctttcagatctctaggctttagaaaatacaaaaactattttaaacattttgtctactaactttattatatgtgtcagttttggattggtttcaattgacaatttctttattatgtactgtattttattgcttctttgcatacttcgtgatctttgattgggtgcctgacattgtgttattttaccttgttgggtgtcagatatttttgtgtttctgtaattattcttgagcttttccttggggtgcagttaagttccttggaaactgattctttcttttaaaatttgttttgtagtaccaattcagtgttcagtttagggctaattattccccagtactgaggcaagtcccttctgggtactctacccaattgccctgtgaatcttgtggttttccagttggtctgggtggatctaggccctatatttaatgttgtgtaagtgctaggcattattacctctaatccttttgggtgataatttgcctggccttaagtgcttctcttacgtcatatgagccagattcacactcaactgaatagttaaggggaatcctttgcaaatctccacaattatctctttgtgtagctgcctctgctgctgtacttagtcctgtaaattttaactgtctttgtctcctgtattttctgttctgtctcttcaactcagagagtccactgggctctactttgttttccccactctgtttcatggcattgaatttctcaaggtagtaagctgggggcaatcttagggctcactttgtttactttcccatttctcagggatcactgtcctttgcttcctgatgtctagtgtattgcaaattgatatttcatataatttgttcattttaaacattgtatgagaaagcaggataaatttgatccctattaattcattttgtctggaagcagaagtcccaggcaaacattttaatatttctgtcttacttttgagagtaattgtagacatcattcttctttacccctaaatacttcagtttgtgctttctaagaacaaaaacattctcagctgggtatggtggctcacgcctgtaatcccagcactttgggacgccgaggcatgtggatcacttgaggtcaggagttcaagaccacactgggtaacatggcaaaaccccatctctactactaaaaatagaaaacttagctgggtatggtggcgcatgcctgtagtcccagctacttgggagactgaagcacaagaattgcttgaacacgggaggtggaggttgcagtgaaccgaaatcatgcccactacactgcagcctgggtgacaaagtgagactctttcaaaaaaacaaaaaaatggacaaagacattctcttatataaccccagtacagttgtcaaaatcaagatatgtagtgttgatacagtactattatttaatcttcagttcatactcaaattttatcagttgtcttaataatattctttatagctattttccccctcaggccactaactaacctaggatcacacgttctatttacttgtcttgttcaagagtctcttttgatttggaacagttcctcagcctttctttcgcttgactttgacattttaaaagagtatatagcaattttttattttatgagacatatcttcatttgggttttctgatgtttcctcaggattaaattaggattatacattatgtccttttaaatacttcgtatcataagacatttgatactgggttttccaaatattggaaaagtttattttgatcccttggttcatctaatgtccaccatgtttctcctttgtaatttttcccattttaattaataagtaatttttggcaagttacctcgagactgtaaagatctactttcttatgaaaattttaccctccaattttggcatccagtgatgatattctaactctcgttattctttcgatattaggtagttggcattctactttttttttctttctttctttaaatatggactcacacttctaaaaaaatacagatttggaggtttcctttctagggctccctactttttgggattttccgtcactttccagcagccctcccatttctgtagcattctgtcctttgattcctcaaatcagaagactgccatcttctgctttatattttaccaccctgccagtaaatagcttcaataaactgaggatagggaagagaggagggagctaaatgaaatagattgtctcctcttaatctttcttgtacagaaattctagagttcgcaccttgtgttttcgtttgtttgatagtttatttctgccaaatctttatgacctttggtctaataaatggttataaaatcttttcaaatatatttttatgttctgaataaaaaatgtattaaatgaagggaagtagctaatgtaaaggcaaattaagtgaaccccaaagtacatactatatctgcagcactgtccaagggagaagatggccaacagcaaaaacaagtatttcaagatataatagcagatattttcttgtgtgggagatggattcaactatagttttctgacactgcctgttaaaatatataggtacgatgtaggaatctgtttcttatttttttatgtatgtatgtatgtataagatggaatctcactctgttacccaggctggagtgcagtggcgtgatcttggctcactgcaccctccgcctcctggttcaagcgattctcatgcctcagcctcccaagtagctgggattacaggcacccgacaccacggctggctaattttttgtgtttttagtagagatgggtttagctatgttggccaggctggtctcaaactcctgacctcaggtgatccacctgccttggcctcccaaagtgctgggattacaggcatgagccaccacgcctggccagaatcttttttttatactgagcattggtgaagcctctggtaaaatattatattccattttgaaaatcagtttgaggtgaatagcaaaatgaataaaaccttgggaaataggttttgtgttgagaggctaatccatctaggcttatgtacctttggaggtgacaaaaccaatttagttctgaatagtcttcaaattgtcaaggaactatttttgaaaattgagtaaatattcttgccctttaataacatcactctatcaaaggggtaacatttaaattatagtaagaaagcattcacttgaatattaaaaatacttttttgaataagaggtttgaaatacagttggccctttagattcacaagttccatgtttgcagattcaaccaatcgtggatcgaaaatattccatggaaaaacccgcaataaaaaataacaatacaacaataaaaatataacaattattttcataacatttacactatactaggtattataggtaatttagagatgatttagtgtatacaagaagatgcacaaatactacactatttgatcacatgcaaatactatactcttttatatcagactggaacatctttggattttagtatgtgcaggagtcctggaaccaatcttgagagtataccaaaggatgactataccttgtgatatggtttggctgtgtccccacccaaacctcatcttgaattgtaactcctacaattcccacctgttgtgggaggggcctggtgggaagtaattgaatcatgggggtgagtctttcccttgctattcttgtaatagtgaataagtctcatgagatctgatggttttaaaaatgggagtttccggggccgagtgtggtggctcacacctgtaatcccagcactttgggaggctgaggtaggtggatcacgaggtcaggatatcgagaccatcctagctaacgtggtgagaccctgtctctactaaaaatgcaaaaaattatctgggcgtggtggtgggtgcctgtagtcccagctactcgggaggctgaggcagaagaatggcttgaacctgggaggtggagcttgcagtgagccgagatcgcaccactgcactccagcctggacaacagagcgagactctgtctcaaaaaaaaaaaaaatgggagtttccctgcacaagctctctcttctcttgtctgctgccatgtgagacatgtctttcaccttttgctatgattgtaaggcctccccggccatgtggaactgtaagttgattaaacctctttcttttgtaaattgcccagtctcaggcatgtctgtatcagcagcgtgaaaattgactaatacacctcgttaataaagatagtggtatttccattttgaaagtttttttttttttttgagacagagtcttactctgtaatcgaggctggagtgcagtggcactgtgttggcccactgcaatctccgtctcctgggttcaagcaattctcctgcctcagcctcctgagtagatgggattacaagtgcccaccaccaaacctggctagttgttttttgttttttggttttttttaaatatttttagtagagacaggtttcaccatgttggccaggctggcctcgaactcctgacctcaggtgatccacccacctcggcctcccaaagtattgggattacaggcatgagccactgcgcccggccaagattttttttaaaataaaggaatgcagcttgcagctgtttttcttaaatgatttgaatgaagcctggctttgaggtgggagcagtgactaattttcaaggttcttttaattttatgattccacgctaaggtaaaataaagcatgtcttgaaataatgtcacaatttgttgaagaagaagcaaatttgataagaaataaatcggtggccttcaatcctttaattgggcttttttgttgttttgagacaaggtcttactctgtcacccaggcaggagtgcagtcgcgccactatggctggctttgtgagtgtgtgcatgcgtgtgtgtgtgtgtagagatgggggtctatgttgtttaggttatgttgcttaggttatgttgcttaggttggtctcgagctcttcagctcaagcaattcttcggcctctcccaaagtgctgggattataggtgtgagctgcagtgcccagccccctaattaagctttagaaaaagtttgcaaaaatgttttaaataataatggtttttaggaataatagacaatacggactaccatcaccatttatttgacctctaaagtgcattttattttaaaaaatattcattgtttttatttaaaaaattttaaggccgggtgcagtggctcacacctgtaatcccagcactttggaaggccgaggcgggtggatcacttgaggtctggagttcaagaccagcctggccaatatggtgaaatcccatctctgctaaaaatacaaaaattagtgtacggtgatggcacgtgcctgtaatcgcagctactcgggaggctgaggcagaagaatcgctcgaacccaggaggcggaggttgcagtgagccgatatcgcgccactgtactccagcctgaataatggagcaagactctgtctcaaaaaaaaaaattaaaatataatttttaactaattttagaattacaaaaaaaaaggtgcagagttcttttatgatcctcatcttgcctttcctaatattaacatcttatgtaacaataatgcagttatcaggaacagtaaattaacattcttatagtattattaagtaacttaagacattccaaactgaaagaaaatacagagaaaatataagaaacccatgtagatttagcagatgtaaacatttttatcatatttgcttttaattatttgaaaaaataaaaaattactcataaagttgaaagctttcctgcacccaacattttccccctaattccttgctttgaggtaaccactatcctgaatttgtatgtatcctccctatccacgtttgtattcttttgctccattagcacatatacccaaagattaaggaataacaatacatagaatatgtttttattttgtgttttatttttaaaattaactttgtgtttaattttgtcttttaattatactatctaaaaaactgcagttatcctttctaatttgattttttaaattcatctttactttcaagatttatctatctgatggacataggtctatttagttgctgtataatatggatatatattcagacttttacctatgagcatttagattatttatcatttttccattattataaacaattttaaacgatgctgcaatctgcatctttgtatctgtctccttaggagttctctagggcaaatacctagaagtagagctaatgggtcataagggataatcattttatgtctgctaagcactgactaagtgctctacaatgtgattttaccaattcacatgccccaaagcagtgtagaagagttccagtttgtcccagcttgctttgaaatgcttaataccttgtaaatagtcaataagtagcaattagtttttttattattattggacccaagttgatgttattttactatcttaaaaattttactagtaaacaataagggaagacttagagaagtaatttgtgtatttatctgttatgaacttagtttgtcattgtcttctagctttactgtcttattgtaatgtacttttccctcctcatgtcgtagatgaataaaatcaagggtagttccagttatatttcttttttctataacagctttatacaccatacaatttacacaccatacaattcacccatttagcctgagtgaattgtataattcacagtttttagtttattcaacggtttttagttgaatataatccaacggttttttagtttattcatagacttgcgcaaccatcaccacaattaattttagaacatcttcctcaccccaaaatgaaactttatactcattagttgtcaccctccatttccccagttctaggaaaccacaaacctattttctgtctgtatagatttgcctgaaattctggacatttcatataaatggaatcataaaatatgagatcttttgtaactggcttctttttacttgttgttttcaaagttcatccatgttgtagcatgtgtcagtactccattactttttatggtcaaataatattctattatgtggatatacattttatttgttcattcatcagttgatggactgggttgtttctccttttcagctattgtggaaaatgctatggtggacattcatgtgggagtttttgtgtggatgtgtgttttcatttctcttgagtatatacctaggggtagaattgctggcccatagataaccctgtgttaacctttgagaaactgccaggctgttttccaaagtggctgcactattttacattaccaccagaaatttctccacatcatggccaccagcaatctctctgtgtcatggccaacatgttttattgtatgtcttgttagttataatctttctagtaggagtaatgtgatacctaactgtggttttgacttgcagctcactgatagctagttatattgagcattttaaaatttattcattgtctatttgtatatcatttttcaagaaatatgtaaggtacttttacttgattagattgtatttcttgtattacatttatataaaaagttatataaaatgaacacaactttatgaaaaaccaagtagtcactcggactatattaattattcaagtatttattcaatagatatgctgcataatggaaaataagtggattttgtagtcacgcaaaccttgcatcctgctcttgccgtctgtttgttggtatttggggctgaacaccaaagctctttgagtttgttggattataatgttatgacatgatgtgtgaggtttttggtacagtgctaagcacctggtaaggaggcatattaataatttggagctattattaactgtgtgttagtcacatactaggttttgagaagaaaaaatatggtggaatcatagaagcagcaaccaatttttcatggagaagcgtccaagcataacttcattagggtgtgatgttttatcaaggatctgaaagttgaatagggatttggataaatgacagatgcctgctcaagaagaaggcagtgcatgtataatgatatggaaaaggtgagaaagaaaatggcctcatttggggaactaaatggtcagtatttttagaggggaaagagtgggtaaagaattataggatatatgactggacagtagaaattcattaattgattcattcattcaccccatatgtattgaactgataatatgtcatggtgctgttatcttctaggtaccagtatgaagtaagttaaagaatgagcttactgggtttgaggaaaagaagtgacatgtagtgaacaaaggggaggatgatatgcaataatgttagagaggttgcagaggccagtacatgacataatataaagtaaaacaagcaaacaaagttatagaataaatcatacaacatttcttttatgttaaaacaaactcaacaaaactaataaaaaaagaaatttagcttttaattactttacataatgggtggcattggagaaatttaaacagaaaagtgacatgatcagattcgaaaaatgttcctggcaggggtgtggagaatagattttgtgtgtgtgtgtgtgattaagtgctaatgtatgcaaagcagtgaaaaatgggtggaaaaaattcaatggctcttttctttctagttcagaaaggcttttaagagccatttgaattaacatttcactttcttttttcttttatcccaaagaattggatgccaggcaaaaattattgagttctgatgttgggagatggggagtttttgatgagtgaggtagaactttgatgagtgaggtagagaggagatttggggaataaagagagtgaaaactccatttagaaacttatttattagaagtttttcctcttttttggttaaaatttcatggtggattattttgagatgatatctactaaatcagctatcttttgtaccctaccccactacaaatttgtcaaaaactagcatctttaaaaattttattcttatttcataagttctctacaccttaataataggccaatgttaaagtaatgctgatagaaataattctaaaaagtctttctagactaagagaaaacaatatttgagtattttacccacctctcgcaaaatctcttctcaactttcatgcagttttagtgatctcattcattttcgtggttttaagtaccatctatagttaagtatatacagctttaagaattatctatatccaaatatacatctctagccctgagacctcccctaaattctctatttgtatatccgtttgcttaattgacatctccatgcatctcaaccttaatatgtccaaaaccaaattcccaatttttccctcaaacctgctgtttctgcagtttttctcatttcagattttctctatgtggcaattatgtttgcctgttacaaaaaatgcaaaagtggtttcagttagaaaactaatatcaggaaattggcatggggaaattaatatatattaggttcagctcccacagaatatttaatcatttcctctgttaccttgttttacattggtattttttgtttgcttgtgtctcatatctttggtcctgtcttatggttagtttacacatagcatgggctaaattagcaaaacacacatacttaaaagtacaattaagatggaagaagacaaattacagtttttgaaaaggcatatgaaatgaagtatttaggggattctgcctaccagcatatttctctggagttatctatttaagtgtccttataggtttggagagcctgaaagacatacttaaaatgatacaatatggcatcaaaagttcccttgaaagataaacatttattccttccttttaccaattataaaggctattgagaaaccaaagcctatgagacatataatgtttatatggctgcagcggaaagactggaaaaagtaatagggaaattattaaaaaataattttgaggctgtagaaatacttatctcctccaagaaataccttgaaactgcatttattcattcattgagacactcaacaaacatttactgagtgcttactacgtgtaagttgttgggattatacaactgaataagtgataaaaatctcacctcttaactttcactcaagagaaacttgattatgaataagtaaacaaataagtacacaattttactgtgtgatatgcatctggggtagagaggaacagtaactacatcaagtagtagaaaagtctgttgagataactttttaaaagattctgaagaatgaggagtcaacaaagaataacaatggcatgtgttctaagcaaagaaaaaaacatgtgtaaatgagatgggacagagcttggcttatttgagaatatttgctacaagagtctgaaaacacgctcttttttgcccctgcttattttggctctcttattctttgaacccccttgcctgtctgttcattttgaaaaactgctaactgggagctttatttacattgggtagggttggttatggagggcttctattagggtgattggatattggttgacttttttcctgagagagcaaaaaagtttataggtcttgtctgtgagaccatccagtttctccaaagaataatccagtagtgtcctgcttggttttaaatgttccgaaagtaagatgggaaaggagggtgggagtgttccaagtaggcacattgtcattgttttcagccttgggcttcacctttgccttatactgggttgggtgtccttgaaactgagcctctctaattctgtttttgcagagaataaaactggggtcagggctgggagagagagcagttgtctaggtttgtaggggtaccaagtcttttgtatataggccttgaaccaatctctgttttcagtcttatatctcagcccttcaatggtggttaattcttgattttccgtctttttttttttttaacaaagataattttattgttatttaaattaacttcgccttcattcagaaatagaaaactaatgttgataataatagttgcaattatcagctactataatgataactgaaattatctactgaaatgataaaaatgttattggagtagacaaaattttattaaatttaagacagattagtaaatataattttaaaaacttcatgaagtgtattctggtacaccttaattgttaagtgatagttgttagaatgcctactttcttaaaatactacctataaaacagaaaagatagaggtacatagtatgtaatactttctaattttgtttgtgaactcttgattattcaaatagaactattgttcatattttctatatcagatatgttactagctctgtattttattaactttcttttaaaacttctgcaatttagtaatttaattttaatgctgtactgttatttagtgttggcttcttctgattaaatgttcagtagtatgatggtaaacaatatcatatacaaaacataggggagaaaggatttcttttctcacccatctaagggttcatggctgacacccctaataacaaaagaccaattaacaaaagaaagcatacaagtttaatatatttttaaaatttttatttattttttatttttgtaggtacatagtaggtatatatatttatggggtacatgagatgttttgatacagacaggcaatgcatattaatcacatcattaatataagttttatgcgacactggagccttcagaaatgatgacccaaagaaacagggaaaactgtacattttatgataagtctgatgaagaagcagataattgtggagaaacgtgattggacaaaaggggagtgatccaatggtaataaactggggggaactcagcaaggcctgtttatccagattcttctttgtgtctgtcttcacagttaaggacattcctttactctgagtataaggaggaccctctggaagaagggtctaatagctgattttcagggaaaggtcagttaggttttatgacctgcttcagtagagaaggggcaagggaaattctttctagtttctgtggactggtttaggagagaggagatcagagagatcttcctgtttctgcagttttctcaatttccttcaagtaaaaatactcagtgtgcctaggtactgtattttgggatagcatgtcctgaaccccatcaatgtaaatttattttcaatttcatgtttgactatttcttcctattgatcctttttctcctaatggcatttcctcatttcctcaacttttttctgtagtatttttgtgtggtccttaattaagtctagtgagaaagcaagccttgatttccatacaagggttgacttaatacagactgaatatgccctttggtcttctcccagataaacgctctagaaagtcatcatcattgccagacagcaaggtactttgttgtgtatcagggtccccaggaaaattcaaacatgcaaaataaattcttaaatggtttgcagagaaaagtaagcaacttgagtgtagcatgtaaactgaggagccattttggtgcttggcagttaagtacttcttgaaggtccccctggtttttccttgaagtcttttaaatctgatccttcagcatgtaagtacttttacttttcaatagagttgtagaagaataatgattatattcatgagtttgaatgtttattaaataaaaaaagactaaaaatggtaacactttcttagtgaaccttttttgttggaaacagaggcaacaattgaatccatgttgaaataatggtttttgagcttttaaagtgaacctgttgtattatttgtcctgtttcacaaatgatttcttaaaacaaggaaaatgtaataaaactttctttaacttttttttttttttttttttttgagatggagtctcactctgttgcgcaggctggaatgcaatagtgcaatcttggctcacagcaactgctgcctcccaggtttgagtgattctcctgcctcagcctctcaagtagctgagactataggcacacaccaccacatctggctaatttttgtatttttagtagagacgggctttcaccatgttggccaggctggtcttgaactcctgacctcaggtgatccacctgtctcagcctcccaaagtgctgggattataggtgtgagccgtgcctggccttctttattaacttaatcatgattagacttttgattatgtttttttactttccaaacttagctttttttctacaagtttggctttaaattaaataatttttttcaaatactgttttgagtcatactggcatttttgtttttttttttttgagaccgagtcttgctctgtagcccaggctggagtgcagtggcatgagcttggctcactgcaagcgccacctcctgggttcaggccattctcctgcctcagcctcccaagtagctgggactacaggcacccgccaccacgcccggcttattttttgtatttttagtagagacggggtttcaccatgttagccacgatggtctcgatctcttgacctcacgatccgcctgcctcggcctcccaaagtgctgggattaccatactggcattttgactcatacctgcatttagctgaatttgtttatctgcttttattctaaattttagtttatctgtataccaaataatatatttgtaaccctagccacttggagggctgaggtgggaggatcccttgaggccgggagtttgaggctgcaatgagtaatgatcatgccttggcactccagcctgggtgacagagtgagacccagtctctaaaaaaaaataataataataataaaataaaattaagtgattgattcaacttcctaatttgatgtcaaatgatagaataaaaataaaaatagaaaaatagaaaatttattcaattatgttgctattgagtacatttatataaccgtaacaagttgctaatattttgaagtggcatttttatagttcaagtctcttttaggtagtgttggtattttttctatccttttacttctaacccttttctattatttatcataggcatgcctctattaaatagcaaatcactaggaggtttatttcttcatcctttttgacaacctcaatctttcagctgtaaagtttgttctgtttctgtttagtgtgatttttgatgtatttgagtaggcttttgtaatcttgtgtagagctgtttatcctgtttaatatataatgtgccttctttatctgtgggctcatatctttcatcaatactagatgttttgcagcattagatttacaaatgtaacttctcagttctttctgttttctcctgggtctcttttgacatatgtttgactttctcatttatcctccagttctcttaaactttttgttttgttttgtttttaataagctttacttgtcactctatgcagcagtctgggtaattttttcatatctacaagttcttaagtatctctttagctgtgattaatctgccacttaactccactaaatttttgttttaaaattatacatttttttgaaagtgttgtttttatcttcctatccatttttgacaattttttttgcttttaaaatattttaagtatttttaaattttttatattttgcttttactttcattttttcccccaagtgtccagttcccctatgtaaaataaaaagaagataaatctaaacttgattttagccaaaaggctgagaagtgataaaagtaggctaatttagaagcacaacttagtccaggcaccatggctcacacctgtaatcccagcactttgggaggccaaggtgggtggatcacctgaggtcaggagttcgagaccagcctggccaacatggcaaaatcctgtctctactaaaaattaaaaaaaaaaaaaaaaaattagccaggcatggtggcaggtgcctgtaatcccagctacttgggaggccgaggcaggagaattgcttgaacttgggaggcggaagttgcagtgagccaagattgcaccattgcactctagcctgggagacaagagcgaaactcagtctcaaaaaaaaaaaaagtctgtgtgcggtggctcacgcctgtaatcccagcactttgggaggccgaggcgggcggatcacgaggtcaggagatcgagaccatggtgaaatcccgtctctactaaaaatacaaaaaattagccaggcgcggtggtgggcgcctgtagtcccagctactcgggaggctgaggcaggagaatggcgtgaacccaggaggcggagcttgcagtgagccgacatcgcgccactgcactcaagcctgggggacagagtgagactccgtctcaaaaaaaaaaaaaagaagcagcactacttgaagtcatgcaatacatttgtctttcttcttttaggtttagtttatttgttcttaataataagataataatgtcctaggaaggtataactaataatggctaaattgcaccaaggacagaaagaccagttaggaagtatgacataaataccatactgtagaatttgagagtgggaaatttacgttaagcaggaacatcacaaagacaagtctggactattctacgtgaaagccaagagggagtagtcaaaaataacactgggtttcaacttgtaggatgagaatgatttcttgcatttacaggtatggaaaagatgaggttattggcttcagaatatgagagtgatggtaggatgttaggatagaaaaatccattaggtaggaaaaaatgcaggtctgtcattcaaaaagtaaaactttatatattggccgggcacagtggctcacgcatgtaatcccagcagtttgggaggctgaggctggcggatcacctgaggtcaggagttcaagaccagccttgccaacgtggcaaaaccccgtctctaaatacacgaaaatacgaaatttttaaatacactaaaaatacaaaaattagctggacatggtgccgtgcgcctgtaatcccagctacttgggaggttgaagcaggagaatcgcttgaacctgggaggtagaggttgcagtgagctgagattgcaccattgcactccagcctgggcgaccagagcaaaactccatctcaaaaaaaacaaaacaaacaaacaaaaaatctgtgtatatcactaggagaaggagagttgaaaccaagggagtaaaaaattatacagcggaattaaattcaaaagggaaaagacaaagtcctaggctgttaagaatgaaatataatcaaaattaggtcctagaaattgatgtagagtccactgatcaaggaaaacaacataattaaaaagccaggataaataagatcaggaaacaatggctaaatttattgaaatggtaagttttattatttttaaaatagaattgaggtttttgtctgtgtgtacttttttttctaaacagaccatttttgccttatagatgcaactttaatgcttctttgatccattactatgtttcagaatatactgtcataggatcattagtgagatgttctcagagctttaatctgaaatgcagcagtaatggaaatgacgccaccccgaactatgctcatttagcctttaaaggtacaatccatttacttccaagagtcttgatgtagtaagatcaagagactttgttaactttgtgtacttattttccaatgtccattgacaatacaataaaacagttttttaaagtcccaatttacaaacagtacatttggttgataggtggatgagtttgagcacacttaatctttatatataagtttgattttctaactaaaactgtccatttaattgcctacttcttgagttctgtagtagatcttttggggaacagagggtttcagaaaagctttgatttgttctcttttcatgatccgtacttcaaagtggaattttccttgcttgattacacttagaggaagaggggtggtgaggaagggttaaaatcaaagtaagctatgcttcaaggaaaaagaaaagaaaaagtagtcgcagcctggagaataaatttgacctctttagttttatattgttgcagctaaaacctgtgatgaggtcattcttagtgaactacttataactacttagttcttataaatgctgccaatgttttttttaatcgtgatatttaagaaagaaaaaaattaagataaatagtcaatacatattgatgagttatatgaatttgtttattcttggtattgcttcttagttgtaaaatgtgaaatggttccaaagaatgggcttttagttctgttttttgaagtagcagctattaaagtgcaaaatgcatagtaggcaaaatggtgttgatagtttacattctgtattttgtgattaaaattagacagcaatccaaaaagagaatataacttcaagtacattcatgtcatacttttgtttattctttaatgtttttcatcctagtatgaatttgagattagttttactggcattaaaaaaaagaagaaaatattttatcttaatagcttttacacaggcttttgctgttaattgctattgattatcagctgatggtattgaagatttacatctaaaatgctaaattatagatattaaaggggaatagaataattgtttttaatattaagtaagttaccatctactacattagttgggttttatccaaattttgttaccttattactattaatgaaaattggggaacctaagctgaactttattcttagtccagtaagtcactcaatttatttgatacttacttagaggaatttttaaaatttatatataccttttatttcaatagcttttgaagtacaagtggtttttggttacatggatgaactgtatagggatgaagtctgagattttagtgcacccaccacctgaagagtgtatattgcacccaatatgtacttctttattcctcaccctcctcctatccttcccccttctgaatctccagtatccattatagcactttgtatgcctttgcatatccattgcttagctcccatttataattcagaacatacagtatttggttttccactcctgagttacttcacttagaacaatggcctccagctccatccaggttgctgcaaaagacattattttgttctttgttatggctgaatagtattccagcgtgtgtgtgtgtgtgtatgtgtatatatcgcattttcttaatccattcatcgtttgatgggaacttagaacttaggcttgttccatatctttgcaattctgaattgtgctgcaataagcatatgaatgcaggtgtatttttgatattatgacttcttttcctttgggtagatacccagtagtgggattgctggatcaaataataaatttatttttagttatttgagaaatttccatactgctttccatagagtttgtagtaatttacattctcactagtaatgtataagtgttcccttttcttgtttttttttaattttttaatttttttatttatttttattttttgagacgtagtctcgctctgtcaccaggctggagtgcagtggcatgatattggctcactgcaacctccgcctcctgggttcaagcgattctcctgccttagcctcctgagtagctgggattacaggcatgcgccaccacacccaactaatttttgtatttttagtagcaacagggtttcaccctgttggccaggatggtcctgacctcgtgatccgcccgccttggactcccaaagtgctgggattacaggcgtgagccgccaagcctggcaaagtgttcccttttcatcacacccacaccaacctctattgtttcttgactcgttaatagtggccattctggctggggtaaagtgttatctcattgtgattttaatttgctgatcttcaatttcctgttgattagtgatgttgagcagttttttcatatattttttggccatttgtatatcttcttttgagaactacctattcgtgtcatttgcccaccttttaatgggatttttttttcttgctgatttgttttgagttccttgtagattctggatattagttgtttgtgggatgcacagtttgcaaatattttctcccactttgtgggttgtctgtttgctctgataattgcttcttttgctgtgcagaatctttttaacaaggtcccatttatttatttttgtttttgttgcattagcttttgtggtcttattcataaattatttgcctaggccaattttcataagagtttttcctaggttttcttctagaaattttatagtttcaagtcttagatttaagtcttcaatccatcttgagttgatttttttatgtagtgagagatatggatccagtttcattcttctacacgtggctatccagttttccaagcaccatttatgttatcatatgctttgttgaagagcagttggttttaagtatttggctttatttctgggttctctattctgttccattggtctacatatctacttttataccaataccatgctgtttttgttactgtagtcttgtagtataatttgaagctgggtaatatgatgcttccagatttgtttattgaagagcctttattcaagccatcttaagtaaatgtgaaggaaaaaattctaagagcagtgagaccaaagcatcaaggtaacctataaaggaaaacctatcagactaacagcagacttctcagcagaaaccttgcaagccagaagggattggggtcctatctttagcctcattaaatagagtaactgtcagccatgaattttgtatccagcaaaactaagtttcataaatgaaggagaaataaagtctttttcagacaagcaaatgctgagggcatttgtcactattagatcagacatataagaaatactaaaaggagttctaaatcttgaagcaaaaggttgatatgcaagagaatggaacctcttgaaagcataaaactcacagagactctaaaataacacaatgaaaaaaacaaagtatcttgataacagtcaacgtggtgactaatacagtacctcatatctcaatattaacattgaatgtaaatgttctaaatgctccacttaaaagatacacacattggcagactggattaaaaatcacaaagcaaacatctgcttttttcaagagactcatttaacatgtaagaattcttacagactcgaggtaaaggagtagaacatgtttttttttctttaaatggcctattgatttttttcttcctataattatccatcctcctattattgtcagtatgctcttttgtcctttaaacaatgttcaaactttagactagaattcaaaaatactttaccatttgactctaagtctacctttctagctttttttccagctacatctaatactttatattgtcttcaaagggcattcctttttctttcttttcctttttaagaaattcagaggccgggcgcagtggtcacgcctgtaatcccagcactttgggaggccaaggcagatggatcacctgaggttgggagtttcagaccagcctgaccaacatggagaaaccacgtctctactaaaaatacaaaattagcctagtgtggtgatgcatgcctgtaacccaggctactcgtgaggctgaggcaggagaatcacttgaacccagggggcggaggttgcggtgagctgagattgtgctattgtactccagcctggacaacaagagtgaaactccgtctgaaaaaaaaaattcagatcgaatttatataccataaaattcacctttcaaaagtgtacaattcagtggtttcagtattgatatggttaggctttgtgtccccaaccaagtctcatcttaaattgtaatccccataatccccatgtgtcaagggagagaccaggtggaggtaattgaatcatggggttggtttcccccatactgttctcatgatagtgagtaagttctcacaagatctgatggttttattacgtataaggggcttttcaccctttgcttggcacttcttcctgctgccttgagaagaagataccttgctttcccttcaccttctgtcatgattgtaagtttcctgaggcctccccagccatgctgaattctgagtcaattaaacctctttccgttataaattacccagtattgggtatttccttatagcaatgtgagaatggactaatgtaagtatattcgcaaagatgtacaaccatcaccactatctaaatttcagaacatttccattaccccaaaaagaaaccttgtgcccatttgttgtcattctccattctctccagccctaggtaaccactaatttacattatttctctatcaatttgcatattgtggacatttcctttaaatggaaccacacaatatgtggccttttgtgtttgacctctttcttgtagcataatgttttcaagattcatttatatggtagcataaatcagtacttcatccctttttatgcctgaataatatcccattgtatggatataccacattttattttattcattgatttattcattaattcaaaaatatttttctttttaaaattttttctatatttattttagattcaggagttgcatgtgcagatttgttgcctgagtatattgtgtgatgctgaggtttggggtacaaatgattctgtcacccaagtagtgaacatagtgtccaatagttagtttttcaaccctttctcccctccttccttctgtcctgtagtagttctcaatttctattgttgccgtctttatgtctataaatacccaatatttagctcccacctataagtgagaacatgtggtgtttagttttgtgttcctgcattaatttgcttaggatactgacctctagttgcattcatgttgctgcaaaggacatgattttatttttttgttatggccatgtagtatcccatagtgtatatttaccacattttctttatccagtccccattgatgggcacctagttgataacatgtctttgctattgtgaatagtgcggtgatgaacaggagattacgtgtgtctttttggtagaaaggtttgttttcttttggatatatacctataagtgggattgctgggtcaaatggtaattcggtttcaagttctttgaaaaatctccgaactgctttccacactggctgaacaaatttacattcccaccagcagagtagaagcattctcatttctccacagcatgccagcatttgttgttttggtttttttaaataatagccattctgactagtgtgagatggtatttcattgtggttttgatttacatttttctgatgattagtgatgtttagcattttttcatatgtttgttggccacttgtatgtcctcttttgagaagtgtctgttcatgtttttgcccattttaaaatgctgttatttattttcttgttgagttgtttaagttcctggtagattctggatattagacctgtcttggatgcatagtttgcaaatattttcttccattctcccattttttaaagttattaaattatttattgtactgcgtttaaaaaaaacccagacaattattattaagctcaataaatgtacatggggtacttggaagattaagttctacagctgcctatttccacatcttttaattcatctgactctgtaaacaatagggaaaaagcccctatttggcagaggagtgttttaaatctgttgatagttttttttgctgtttgtttgaaagctcattagtttaactaggtcctaactgacaatttttgtttttgttgcaattgcttctgaggacttagtcataaattacttcccaaggccaatgtccagaatggtgtttcccaggttttctactaggattcttataatttgaggtcttacatttaaaattttaatccatcttgagttaatttttatatatagtaaaaggtgggtgcccagtttcattttgaatatagctagccagctgtcctagcaccatttattgaatagggagtccttttcccattgcttattttcattgattttgttgacgatcaggtggttgtaggtgtgcagctttatttctaggttctctattctattccattgatctaggtgtttctgtaccagtaccatactgtttggttactgtagccttatagtatagtttgaagccaggtaatgtgatgactccagctttgttctttttgcttagcattgctttggctatttgggccctttttggatccatatgaattttagaatagttttttctagttctgtgaaaaatgacattggtagtttgataggaatagcattgaatccatagattgctttgggcagtatggccattttaagaatattgattcttccaatttatgattatggaatatttcccatttgtgtcatctatgatttatttaatggtgttttataattgtccttgtaaagatcttttacctccttgtttagatgtattcctaggtattttatttttgtgcatgtggctattgtaagtgggattgcattgttgatttggctctcagcttgaatgttattggtgtctaaaaatgctaggggtttttgtatattgattttgtatcctgaaactttactgaaattgtttatcggttccagaaaccttttggcagtcttcagagttttctaaatataggattatatcatcctatgcgcagagatagtttgccttcttcttttgctatttggatgccttttatttatttttcttgcctgattgctctggctagctcttccaatactatgttgaataggaatggtgagagtggtcatccttgtcttattccagttctcaaggggaatgcttccagtgtttgcccattcagtgtgatgttggctgtgggtttgtcatagatggctcttattattttgagatttattccttcaatgcctagttttctgaaggtttttgtcataaagggatgttggattttatagaaagctttttctgtgtctattgagataatcatatggtttttgtttttaattctgtttatgtggtgaatcacatttattgatttgtgtatgttgaaccaaccttgcatcccaagaacaaaacctcctttatcatggtgaattaactttttgttatgctgttgaattcagttttctagtattttgttgaggatttttgctcctgtgttaatcagggatattggtctgtagttttctttttttgttgtttctttaccaggttttggtattacagtgatgctggctttgtagagttagggaggagtccctcctccttgagtttttggaataatttcagtagaattgggatataccacattttatattattttattttattttattttgttgttgttgttggtttttttttttttttttaaatggagtcttgctctgttgcccaggctggagtgcagtggtgtgagctctgtgatctccgctcactgcaacctccgcctcctgggctcaagtgattctcttgccacagcctcccaccaggctgagattacaggtgcctgctgccatgcctggctaatttttggggatataccacatgttagttattccttcatcccttgacagatttttggattgatgcctcctttgggccattatgaataatgctgctattaatagtcatacaagtttttgtgtggacatatattttcaattctcatggatatatacttaggaatggaagtgctgggtcatatggtgattctatgtttaaccttttgaagaacttaaaaattattttccaaagtgactgcattattttacatttccatcttcagtgtctaagtgttccagtttcttcacatcatcaccaacacttgttattgtgtctttaaaaaaaacaaaaacaaaaacaggcttgatttactttatttttcttgtataaaccctacattgtagtcacagctggagcctgggtcctctgcatggagactctggagtgggtcttgatggggtggtcagtgaattcctgatagggagacttggtgaatacagtctccttccggaggtcaggggtcaggtggctgtaggtcttagagatgtcattgaagttggccttggcgaaattgcccagggtggccatgcagcccctggctgaagtgtagcagtcatcgataccagccgtcatcagcagcttcttgggcatgggggctgagatgatcccagtgcccctgggcacagggatgaggtcaccagcacagagctgcagtggcctgtcaccttgcaagggatggtgtggggcttgctgatcttgttcccccagtagcctgtgcacacagggacaatggagagcttggctgggatgatggcctcgtgtatggcagtggccacctccttggagcacttagcacccagacctacctggccattatagtccccagtggcaacaaatgccttgaacctggtgttctggccagcgtaggtctgcttctgcactgacataatcttcaaaacctcatccttgagagagcccccgaaaaaaatcagtgatctcagactccttgatgggcaggaagaagagatagatctcctccagggacttcatcttcatgtccttgactagctggcccagattggtgacaggcatccactcctagtccaaggccttgcctctgtgagctccgtggcttcagccctggccctgaccatggccatgaccttggcctcagatgccactgccgaagcctccacagaagccactgcggtttcccatccctgggcccccgggatgcacccttgcactggcatcatccgccatttggtattttctcagagaaggttattgtgtcttttttgttatagccatcctagtgggttcgaagtggtattttactgtggtttttatttgattttcacaaatgactaatgatgttgacgatctttttatgtgcttattggccatgtgtatatcttctttggagaaatgtctattaagatcctttactcatttcttgattgagttatttgcctttttattgttcacttgtaatagttttttaaataaatttgaatattagacttatcatatatgattcgcaaatatttttcctcatactctatattgacttttaactttgttgatagtgtgttttgaagcgtgaaaggttttattttcaatgaattccaatttacctgtttttttctttcattacttgtgcctttagtgtcatatctcagaaatcattgcttaatacaaggtcataaagatttactcctatgtttttttctaagatttttgtagttttagcccttacatttaggtctttgggttcgttttgaattaacgtttgcatatgatgtgagatggagacaaagagtgcttgttgtccttctgtatacaaaacacattttcacaatttgtcctgttacttaaaagtgttcctgtacttgagctagtcttcccctattctaaatcactaccaaattatattttttaatgttctagctcaaatgcccagaaattcctttaaaacttctttcctttattgccaagaaaccaagaatgatcttacctctcatatggctttatatatatccttcttacagcacttttgtcactttccatctaatattatagctgtttatgtaaatatattagcattttttccctaagataaagttcatagttttatttgttttcatcatttagtgtaggggggcaaaatctttcccttgaccttcttagagttcccagctgagtctgaaaattaaatggaataagacatgttaacaagtgaaaagcacacaaatttatttaagttttatgtcacacagaagtcttcataaggaaatgaagacacaaagaaataacaaaagtaaataaaaaataaacaatgaaaataataaaaaataattttaaaagcctgagtgtttttatactaggtttgataaagaatggaaagttgtaagaaaatgtgatagacaaaggggtatgagctaagagtagtagtaaactggggaaaacttagcaaggcctattcattcagattcctcatggattcccgcctctttcttcagagataaggatgcttttttcctctggatatagggagggcactttgtacatgagggttttatgacttccttcctaggaaaagggagtggtcagagagtacttcatgcctgctgtttctcagattcgttcagtttaacatattcaatatgccaaaggatcatattttggagcaatgtgtcctgaaccccatcattagcagttagtatatgtctgttgatttaattatgttaatagatttctggtgtagtgggggcaaaaggaaattataattgtttagagacagagtaagtttagtctaaaacaccagtagagtagcaatcttcagtgaccactgtgaatatataacatgtatattttattttattaatgtacattatattttattaatttaattgctctaaatgtgtaagaacaggatatatatttttattgtaaaatgacgttaacattatggcatcaggttacaagtgcaatttttgatgggatttgaaatggcagacattagataaaagcattcttcagggatagagaggaatgctgcattatataatttaattggccagttgggagtgattaataatattgcttatattttaagtcatattttaaatattgaatctttttacaattagatgtttacaatattattaaaagaattttccttaaaaaatccctgccatgtttgttatgagaaatgtttttggaaaatctgagtattacactgtcctactgaagaaaattgcctgggaaaactgtgattgacagcttatgttaaggtttgcaatcttgcgtaggtatcatgccaagttttcatttattcactttcttgaaagtggaaagaaatttagaaaagcataggcttaccacagagttcctttacagaaactattttcatgtgagaaggtggcccgctgagcctgttttagtctgtgattctttaagatatggaggcctgttgctaggtcttataaggccattctgagaggctagaaattgatcaaaaagacaagttcttcctttggtgttacagagaagtaaatgcagtttcatgaactttgatttttgatacgtaggttggaactgtttgttagcaaactattaagcaagctatagaggattgctaaatcttgatattcataagattaaatagtatagcaaagagtaatgaagtgcatataattagagaattgtaaagtaatattaacattttcaactacaaataattggattaaaaaactctggtatcagtattatttgaattagttatggttttcaattacttcaactgctaattttcaattatattattacttttaatttagtttcatcatttattttgtttttagttgttatttgatatcaaatatgtattttgcataagcattttgtttttgaccaaagttttctaataaccaaattgtcatatatttcctatatggatcattttattgctaatgcagatgtatgcaaaatgccatcttctccaaatttttttgtgtagtgacatgttatcagtgatgtgtgcctatgaatgtgaaaatagcttataatacactgtcaaggtaagagtaatacgattactgctttagaaatacttaaagggcattgttttggtatcaaatcatgtgtatttggtcaagtattgtgtgtgtgcgtgtgtgtgtttgtgtgcctgtgtgcatgtgtgtatgtgtgtatgcaagtgtgtatgtgttttcactaaaaaagtacttctatataatgctgtaatcctaatcctctcttccgaggactaactatgaacaggtgagactttgcattagtcttagtcattctactattacaatttaatttcttggtttttaagggcttttagtatttaacattcccattttcattttaaaaatgtatattcttccaggatatatcacatattaaggatttatagcattaaagatcttttcttgcattttgccactttactgtgtgaaattgaggcaagttactttactttgtacttaaatttctttacccataaaatggacagtataataataacctaccttaggtaatggttgtgaagatgaaataattcatgtaaatgtcttagaatggtgcctggtttaaattatgactcaataaatgatagctattattaacattagtactgtagtgggactaattgacttggtagaagacttcatgggatacatagtatggcatttctaattccctacttctttatacttaaggatatagtaaagggaactaaagagcactctagaagtttagtttgtgtcagccttttacaaaggcataatttttcaaagacctatatttaaatgttactacataatattatttaatataaatgttttcagtgactaaattgtttttctctcttcctccttccctttatacacttatctttgaataaagttgaatcagcaagaagatgcagcatgttttaacttatgtttttccctacctgtgacaacctatcaaactcccacgtcactcatactccggtttgagacatacagggaccagatagactatggggaaggattgacacaaaaatggaagacagctggagtaggaggaaaatgctgatgaaggagataataggattccattggattacagtcatttatagaaatttggctcttaaacttttccacttctaaataaagactttttattcaaaatttattaagagaaagaaagctgtataggcactatggaaaacagtatgaaggttcctcaaataataaaaaatagaactgccataggctccagcaatcccactgctaggtacatatccaaaggatatgaaatcagtatgttgaagagatacgtgcactcccatgttcactgcagcacagcaaatcaaactcactgttgaccgatggataaatagattttaaaaatatgatatatacacataatagaacactatttacccttaaaaaagaagcaggccaggctcagtggctcacacctgtaatttcagcactttgggaggctgaggtgggaggatcacttgagcccatgagttcaagaccagcctgggaaacatggcaagacccgtttctacaaaaaatgcaaaaaattagctgagcgtggtggtgtgcggctgtgctcccagctactcaggagcctgaagcaggaggattgcttgacctcaggagctcaagactgcagtgagctatgattgcaccactgccctctagcctgggtgacagaatgagttcctaaaagaaaaggaagtcctgtcatttgtgatggcatgaatgaacccggaggacattgtattaaggaagccaggcatagaaagacaaatactgcatgatctcacttatatgtagagtatatataaaaaagtcaaagtcatagaaatagagagtaaaatggtggttgccagaagttgtgggggttaggagatgttgatcataggacacaaaatttcaatttggaggaataaattcatgagatctcttgtacatcatggtggctatagttaatgataatattaatatattgcatacttgaaaattgcaatggtataaaagagagtagattttaagtgttctttccataggaaaataaatatttgaggtaatgcatatattattttgatttagctgttccataatgtatacatatatcaaaacatcaagctgtatgttataaatatatataatttttacttgccaattaaagaaagaatgctaactcttgttggctgtaacttttacccataatttattcaactgattgagttatgagtagctcaatgtaaactgttaagtataacatgattgaatttctatctaacaataatttatacatgaagaaatgttatttttcataatacattgacttttgttgcgtagttggttatctgcaagttctggtacttgagcatttgtgacatgagttaagtttgtcattggaagtcccaacttttctttttgatgtgttttcccacattttctctgctctcagtattgcccgtcttcttttctctcaagcacaagtgtttttaggaaagaatatgatgaattcaatcaaatgaagttggaaataattttgtgaaattacaaatactgtgttttttctttctagagtatgtgattttaatagcggtcaaaccttttatgtaacttatattgcatatgataaaaaactaagtctgcatctattgagataatcatgtagtttttgtctttggttctgtttatatgatggattacgtttattgatttgcatatgttgaacaagccttgcatcccagggatgaagcccacttgatcatggtgaataaactttttgatgtgctgctggattcagtttgccagtattttattgaggatttttgcatcgatgttcatcagggatattggtctaaaattctctttttttgttgtgtctctgctaggctttggtatcaggatgatgctggcctcataaaatgagttaggaggatttcttctttttctactgattggaatattgtcagaaggaatggtaccaactcctccttgtacctctggtagaattcggctgtgaatctgtctggtcctggactttttttggttggtaggctattaattattgcctcaatttcagagcctgttattggtctattcagggattcaacttcttcctgatttagtcttgggagggtgtatgtgtccaggaatttatcgatttcttctagattttctagtttatttgcatagaggtgtttatagtattctctgatggtagtgtatttctgtgggatcagtggtgatatcccctttatcattttttattgcgtctatttgattcttctctgttttctgctttattagtcttgctagcggtctatcagttttgttgatcttttaaaaaaaccagctcctgaattcattgattttttgaagggttttttatgtctctgtctccttcagttctgctctgatcttagttatttcttgccttctgctagcttttgaatgtgtttgctcttgcttctctagttcttttaatcgtgatgttagggtgtccattttagatctttcctgctttctcttgtgggcatttagtgctataaatttccctctacacactgctttaaatgtctcccagagattctggtatgttgtgtctttgttctcattggtttcaaagaacatctttatttctgccttcatttcgttatgtacccagtagtcattcaggagcaggttgttcagtttccatgtagttgagcagtttggagtgagtttcttaatcctgagttctagtttgattgcactgtggtctgagagacagtttgttataatttctgttctttttcatttgctgaggaatgctttacttccaactatgtggtcaattttggaataagtgcgatatgttgctgagaagaatgtatcttctgttgatttggggtggagagttctgtagatgtctattaggtctgcttggtgcagagctgagttcaagtcctggatatctctgttaactttctgtcttgttgatctgtctaatgttgacagtggggtgttaaagtctcccattattattgtatgggagtctaagtctctttgtatggctctaaggacttgctttatgaatctgggtgttcctgtattgggtgcatatatatttaagatagttagctcttcttgttgaattgatccctttaccattatgtgatggccttctttgtctcttttgatctttgttggtttaaagtctgttttatcagagactaggattgcaacccctgcttttttttgttttccatttgcttggtagatcttcctccatccctttattttgagcctatgtgtgtctctgcacgtaacatgggtttcctgaatacagcacactgatgggttttgactctttatccaatttgccagtctgtgtcttttaattggagcatttagcccatttacatttaaggttaatattgttatgtgtgaatttgatcctgtcattatgatgttagctggttattttgcccattagtttatgtagtttcttcctagcatcgatggtctttacaattttggcatgatttttcagtggctggtaccagttgttcctttccatgtttagtgcttctttcagaagcccttgtaaggcaggcctggtggtgacaaaatctctcagcatttgcttgtctgtaaaggattttatttctccttcacttatgaagcttagtttggctggatatgaaattctggtttgaaaattcttttctttaataatgttgattccaagtctttgctattgtgaatagtgccgcaataaacatacgtgtgcatgtgtctttatagcagcatgatttataatcctttgggtatatacccagtaatgatgatagactggattgagaaaatgtggcatatatacaccatggaatactgtgcagccataaaaaatgatgagttcatgtcctttgtagggacatggatgaagctggaaaccatcattctcagcaaactattgcaaggacaaaaaaccaaacaccgcatgttctcactcataggtgggaattggacaatgagaacacatggacacaggaaggggaacatcacacaccggggactgttgtggggtggggggagggaggagggatagcattaggagatatacctaatgctaaatgacgagttaatgggtgcagcacaccaacatggcacatgtatacatatgtaacgaacctgcacgttgtgcacatgtaccctaaaacttaaagtataataaaaaaaaaaagaacattgaatattggccccccactctcttctggcttttagagtttctgccgagagatctgctgttagtctgatgggcttccctttgtgggtaacccgacctttctctctggctgcccttaacattttttccttcatttcaactttggtgaatctgacaattttgtgtcttggagttgctcttcttaaggagtatctttgtggcattctctgtatttcctgaatttgaatgttggcttgccttgctaggttgggctggttctcctggataatatcctgaagagtattttccaacttggttccattctccctgtcactttcaggtacaccaagcagacgtagatttggtcttttcacatagtcccatatttcttggaggctttgtctgtttctttttactcttttttctctaaacttctcttctcgcttcatttcattcatgtgatcttcaatagatgcagaaaagatcttcgacaaaattcaacagcccttcatgctaaaaactctcaataaactaggtattgatgggacgtatctcaaaataataagagctatttatgacaaacccacagccaatattatactgaattctaaccagaggtacaaggaggagctggtaccattccttctgacactattccaatcaacaggaaaagaagcaatcctcccaactcattttatgaggccagtatcatcgtgataccaaagcctggcaaatacacaacaaaaaaagagaattttagaccaatatccctgatgaacatcaatgcaaaaatcctcaataaaatactggcaaacggaatccagcagcacatcaaaaagcttatccaccatgatcaagtgggcttcatccctgggatgcaaggcttgtttaacatacgcaaatcaataaacgtaatccatcatataaacagaaccaaagacaaaaaccacatgattatctcaatagatgccgaaaaggcctttgacaaaattcaacaccccttcatgctaaaaactctgaataaattacgtattgatggaacatatctcaaaataataagagctatttatgacaaacccacagccaatatcatactgaatgggcaaaaactggaagcattcccttggaaaactggtgcaagacaaggatgccctctctcaccactcctatttaacatagtgttggaagctctggccagggcaattaggcaggagaaagaaataaagggtattcaattaggaaaagaggaagtcaaattgtccctttttgcagatgacatgattgtatatttagaaaaccccatcgtctcagcccaaaatctccttaagctaataagcaacttcagcaaagtctcaggatacaaaatcaatgtgtaaaaatcacaagcattcttatacaccaataacagactaacacagagccaaatcatgagtgaactcccattcacaattgcttcagagagaagaaaatacctaggaatccaacttacaagggatgtgaacgacctcttcaaggagtactacaaaccactgctcagtgaaataaaagaggacacgaacaaatggaagaacattccatgctcatggataggaagagccaatatcgtgaaaatggccatagtgcctaagataatttatagattcaatgccatccccatcaagctaccaatgactttcttcaaagaattggaaaaaactactttaaagttcatatggaaccaaaaaagagcccacattgccaagtcaatcctaagccaaaagaacaaagctggaggcatcacactacctgacttcaaactatactacaaggctacagtaaccaacacagcatggtactggtaccaaaacagagatatagatcaatggaacagaacagagcccttagaaataataccacacatctacaaccatctgatctttgacaaacctgacagaaacaagcaatggggaaaggattccctatttagtaaatggtgctgggaaaactggctagccatatgtagaaagctgaaactggatcccttccttacaccttatataaaaattaattcaaaatggattaaagactgaaatgttagatctaaatccataaaaaccctagaagaaaacctaggcagtaccattcaggatataggcataggcaaggacttcatgtctaaaacacctaaagcaatggcaacaaaagccaaaattgacaattgggatctaattaaactaaagagcttctgcacagcaaaagaaactaccatcagagtgaacaggcagcctacagaatgggagaaaatttttgcaatctactcatctgacaaaggtctaatatccagaatctacaatgaactcaaacaaatttacaagaagaaaacaaacaaccccatcaaaaagtgggcaaaggatatgaacagacacttctcaaaagaagacatttatgcagccaacagacacgtgaaaaaatgctcatcatcactggccatcagagaaatgcaaatcaaaaccacaatgagataccatctcacaccagttagaatggcgatcattaaaaagtcaggaaacaacaggtgctggagaggatgtggagaaataggaacactttacactgttggtgggactgtaaactagttcaaccattgtggaaggcagtgtggtgattcctcaaggatctaggactagaaataccatttgacccagccatcccattactgggtatatacccaaaggattataaatcatgctgctataaagacacatgcacatgtatgtttattgtggcattattcacaatagcaaagacttggaaccaacccaaatgtccatcaatgatagactggattaagaaaatgtggcacatacacaccatggaatattatgcagccataaaaaaggatgagttcatatcctttgtagggacatggatgaagctggaaaccatcattctcagcaaactattgcaaggacagaagaccaaacaccatatgttctcactcataggtggcaattgaaccatgagaacacttggacacaggatggggaatataacacaccagggcctgtcatggggtaggggcagggagcagggataacattagcggaaatacctaatgtaaatgacgagttgattggtgcagcacaccaacatggcatttgtatacatatgtaacaaacctgcatgttgtgcacatgtaccctagaacttaaagtataaaaaaaaaactaagtgaattatattttcttaattcattaatgcattaatgatatacaatactaaaattttgtcatggtttattggagttttttcaggatttggtatataatctctggatttcattgccaacttgggcaaagattcttaagcattgattttatattgggagaaagtataatattcatgaagttattcatttgtatcaggcactcttttttttctgtgcattctatgcactgaaatataggagtgaacatacaagattcttgttctcttctgaagaggttacattttactaggggacacaggtgaaaagaaagataaagaaatatggaataaggtacgtagtgataaatccatgaagataatggagtctagagagttatattatttgtatatgtgtgtgggaattgctattttacatgtaacttttttacgtggtaacttgatgtcttgctattttacatggtaacttgttttcttgctattttacatggtaactagttgtctcattctaaatatgtacttggaatagaatgccaacagatttttcaaaatttattgtataagagtatgagagaaagaggaataaatgaaaatgtgaaagttttagactcgccaattatttgaatggaattgcttcttacaagataggggaaaacatgctggaggaacaggtttataggggaagatcgagaattcttgatcatgatcttgctaattttaagatgcttgttgatgagcctggatttcagaagggaagatagaaacggagttaaaattttgggagacataattatatagatagtattcaaagccattagactagatgagatcatacaggaagtaaatgtatgttcagaaaagaagtgtttcaaaggtggagtctggattccttcagtgtttaaagattagagagaagagggaaaatcaagaaagcagacagaaaaagcagctagttagatagaaagagaatcacgagaaagtgttgctctgaaagacaagtgaaaaaattgtttcaaggaggaaagcatcatcatctatatcagatgactgtgatagtttgagtaaaatgaggccttaaaattcattattgtattaggagggatggagctattgatgactttgaaaagttattttaacagaggggtaagcagaaagattgactggaatgggtttatgaaaaaaaaaggaagaaaaggaagtaaagacattgcatatacacaacttattcaatgggttttgtcataaagcagaccatagaagtcaggctgaagagtccatggagttcatgaagttttttcatttcatcttgttttgctttttaggatcatatattgtatgatagtgagaattattaaagctagaccaaaattgatgatgtaggagagacgggggaaaacagtagtaacagtgtccttaagaagacttaaagggaagggatccagcgccaaatatgggggggggtgtccttggataggagcctggacatttattcattgtgatagcaaggagggcggagtatgtgcatcaaaatataattggtcagatttggtgtgtgagcatctggaagtttccttctggttgtttctattttctcagtgaaatagaaagcagtcattagctgagagtaaataataagaaggtgatgttatagatttgaggagagagaagaagtatgaagtaatcattgatgaaagtaggagaaagtccctagtgaaatgtagtagcattgttgggtattgctaaggtcttacttgaggtcacttgttgattttaaagtgaaatcagtcagcatggttatattttgtcttcagtcacattcatctggttgggtagaagtgcaggataggtagagatttggatttccctaggatatatgttttcgcaagtgagttcattggagagagagaagagaaagagacataggagtagatgcaagaaggtggtaagaatgactaaccatggagtgtaagccaggtaaagagagaaaaaaattatgtgaagacggtgaggaacagtgaaaagtggtaaacttggaagatgagcgatggtagagagtgcaatgcttgaaattagtaatgacaaggtcttggatatgattacggaagtagatagctaaggcagaaggaggaaacaaccactggaaataacaatgttaaataaatgagaggccagtgtattaggatgatttaagttggtattgaaatcattgagagttacgacatgtggtagtggagacagtaagggagggaaagaaagaaggagggattgaagaaggaaaaagtgagaaaatcaaagaatttcagtttctacaggtaaggagctttgaagttgccactctatcctaacagtacacaaaaatctgaacaaactgaaaaatcaacaactcttcttacatctataagagaagtgagatcacaggacaaacagtgtctcccaaaattggagtgacagacaaatacagagaatcacaacatatcagagcagaaacctccatggaaaccagtgctgggataggaaaacctgacctgtaattgacaaatttctggaggctctgtgtggacaagtgtaagagttaaaaactccaggaggacctagttttaaatggaccctcacacttgagaattgtacctgtaggagcttgactaggttctcacagtaaatattggagaaaaactcccttgtgttcccagcagcagaaggggaaagggatctatctgggaatttgccagagcactctgttctttttaataaggtctgacctcaggagaaactagctaaccagagcctaatctgtggggtttgatcagagcctaactgatctgggagaatggaaatactcaactctagtcatcctgtcccacctaaaaggggagaaaaaagactagaaaatatttgttcaagagttcagaggcataggtgcactgaaaggctgagacctaattgtaggactatagaatgtttcccctttccccacaccttatcaccacattactaaaggcctatttacagctattgcttttacccagtatatcatgtctggctgtcaagaaaaaattacaaggcatactgagaggcaaaaaacacagtttgaagagacagagcaagcatcagaagcagacatggctgagatggtggaattatcagatggaatttactactatgattaatatgctaaaagtgttaatggagaatgtaaacagcatgcaagcacagatgagaactgtaagcagaaagatggaaattctaagaaagagccgaaaagaaagtgctagagatcaaaaacgctgtaacggaaatgaagaatgccttgatgggcttattagtagactggacatgactgaggaaagaatttctgagctagaggatatattaataaaagactctaaatctcaaaaactaagagaacaaagactgaaaaagaaaaagaagagaacatccaagagctgtgggaaaactacaaagatgtaatacatgtgcaatgagagtaccagaaagcaaaaagaaaaaggaatggaaatatttgaaacaataatgaccgagaatttatctaaattaatgtcagacaccaaaccatagaaaacctattcctaggcatgtcgcttttaaattacagaaaatcacagaataagaaaaaacctagctggctgcagtggctcatgcctataattccaacactttgagaggccaatgcaagaggcttgcttgaagcaaggagttagagaccagcctgggcaacaaagcaacaccctggtttctacaacaacacaaaaaacgaaaaagccatatgcagtagtgtgtacctatagtcccagctattcaggaggcaaaggtaggaggattgcttgagctcatgagctcaggaatttgaggctgcagtgagctatgatcatgacactgtacgccagccaggaccacagagtgagaccctatctctaataaactaaaatgtacgtttaaaaattaaaaagaagaaaaaattctgaaagaggacagagaaaaaaaaatcttacctatagaggaacaaaggtaggaactacatctaactactcaacagaaactatgcaagcaagaagtgagaggagtgaaacatttaaaggtttgaggaaaagaacaccaacttagaattctgtaccctgtgaaattatccttcaaaagtgaaggggaaataaagactttctcagatgaacaaaaactgggaaattttattaccaatagatctgccttgcaagaaatgttaaaagatagaagaaaaataatatagatgagaaacttggatctatgtaaataattgaagagcatcattgaaggaattagtgaaggtaaaattaaaacttcaattttactattattgatctatcagacagataacagtttgttaaaaatgataatagcaacaatttgattatgtgtgcttatgtatcatatgtatgtatctgtatctatatatgctcatgtataaatgaaataaatgactaatatcacaagggaaaggaggaaggaattaggattatttcattattataagttacactacctatgaagcagtatagttttatttgaaaatgaacttgcattagttgtaaatgtatattgcaaactctagagtaaccacttaaaaaggaaaaaaaaagaagcataattgatacacgaaaataagagagaaagtggaatcatacacaatgctctgttaaaaaccacaaaaggcagagtggaaaacaaaaataggaacaaagaacaagagcaacaaattcggtagatattaatccaactgtattaataaatattgtgaatatcaatgctccaaatgcaccaattggaagacagagattgttagagtgaataagaaaaataagacccaatgaaactatatgttgtctacaagaagtccactttttcttgagacagagtctcattctgtggctcaggctggagtgcagtggtgcaatctcggctcactgcaacctctgccttccgagttcaacaattctcctgcctcagcctcccaagtagatgggattacaggcgcccaccaccgcgcccagctaatttttgtacttttattggagacggggtttcaccatgttggccaggctgatctcgaactcctgacctcggacgatccatccacctcggcctcccaagtgctgggattacaggcatgagccaccgcacccagccaagaaatccactttaaatataaagacacatatagattaaaagtaattggatggatgccagtcctaagcaaaacaaagcagaattagcttgcttctttttctttctttctttctttctctttctttttctttctttctttctttctttctttctttctttctttctttctttctttctttctttctttctttcttgctctctcttctttctctctctctctttctctctttatctctctttctctctctctctctttctctctttctgacagagtctcgctctgtcatccagactggagtgcagtggtgcaatctcagctcactgcaacctcaagcgattctcctgcctcagcctcctgagtagctgggattacaggcacgtgctgccatgcctagctagttttttttatttttagtagagataaggttttgccatgttggccaggccggtctcgaactcctgacctcaagtgatctgcctgccttggcctcccaaagtgttgggattacaggcgtgagccaccgcacccggccagctgtattaatttctgatagagcagaatgcaaagcaaggaaagttatcaaggataaagaagggtattacgtaatgataaaggagtcagttctgcaagagacataacaatctttaatgtatatttgcctaacaacagatcaataaaatataggaggcaaaaactgaaagaactgttgggagaaataaatgaatctactgttatagttgaagacttcagcacccctctatcagaaatggacaaattcagcaactggaaaatcagtaaggacatagttgaactcaacaacaccgtcaatcagctggatatgattgatatctgtagactactttatccaataacagcagaatatatattcttctcaagctcacatggaacagctaccaagacagaccacattctgggccattaaacacatcttaacaaatttaaaagaatagatatcatacaatatctgttctcaaaccacatggaattaatctagaaatcaatcacagcaagataactggaaagccccaaacaatatgtggagattaagcaacatactttttttttttttttttttttaagacagggtcttactctgtcactgaggctggagtgtagtggcaaaatcatagctcactgcatcctctgcttcctgggctcaagcaatcctcccacctcaacctcctaagtagctgggactacaagcatgtgccaccacacctggctgatttttcttttttttgtagagtcgaggtttctccatgttgcacaggctggccttgaactcctgagctcaagcaatctggtctcctgggcctaccaaaatcctgggattacaggtgtgagccaccacacctggccataaacaacatacttctaaataacacatgggtcaaaagaaaaatctgaagagaaattaaaaatactttgaactaaatgaaatgaaaacataacttaccaaaatttatgagaggcagcaaaagcagtgcatagagggaaatttataacattggttgcatatattagaaagggaaatagacttaaaaaacctaagcttccattttaggtaactagataaaggagggctaattaaactcaaagtaagcagaagaaaatgaataataaaaattagggcagaaatcaataaatttgaaaacaggaagtcaataaagaaaatcaacaaaaccaaaatttggtaagataaaattgataagcctttacccagcctaagaaaaaaaagacgcagattactaatactagaaatgaaagagggaacatccacagatcctgtgaacattaaaaatgttataatggaatgctatgaacaactctatgctctcacatttgataacagagaagaaatgtactaattccttgaaagacacagtctgctaaaactcacacaagaagagatagacaatctgaatagaccttttagctattaaagaaatggaaccaacagttaataatcttcccaaacagaaagcactaggcccagatagtcactggtgaattctgcaaaatatttacaaaagaaattatactgattctctacaatctctcagaagatagaagcagacagaatgcttttgaacccatcctatgatgccagcatctccctcatacctgaactgacagagacattataagaaatgtcttatgcagaccaatatctcttatgagcatagatgcaaacattcttaacaaaatattagcaaatagaatccagcaatgtataaaaagaatgacatatcatgaccatgtcctagccatgaaacagcgtcctagccattaaaagatgtatttagtgttttctaaaggcagaatcagtgaagactgaattttctgagtacttatccgatggacgataagatgctttctgcttctaaatctctagtgactggagaggtagccagagggttggagtgggaaagaggtgatggtttgacagcacagatgagatgggttagattaagagtaaccaggagagaaactgggtggccatagacagaaaatatctgtctgtttcaatcagagagtagtgttgttttctttcttatcgcataatcaagacatttgaaatcctataaactttattttaaagtttctttctgaatttagatgaagactgtcacagcattctaattcttggcaataattattaaaagggttgtatgcatgcataaaaacaggagtagaaacaagaaatgatatcctttggactatttattcaatttctccccaaaaggaaggttgtacaaaatgtatttagagttctagtttgctttttttgagataattaactagtttacttcatttttttatttctgtaaatttcctatgatgaaataaataatcaggttaaactttattggcatattaccttaattttatgtatttattttttaagaactgaagtgccatgttagtgattaagcaagtgtattgtggcttatgctgggctaatgtgacaagtatgtggcttgaagccagttaaatgtttgtatgttcccaaccctacttagtgttttcagatatatagctgtcatagttactgtgcctgttacaccgttatgattgagtctattgttaatagtacaagttattgctgaatgtcaaaatttaagttatattgtttctttgtatcattggctgggacgatttttttggtatatcttttcaatgttgcaaatgggaccagggatttacagtagaactacagaagctttaaaatattaacagcccattaagtacaggatatggttcatgaggtttaatgggaagttgttaaaaggagatggaactattccaatggttggggaggcatggttagtggcaaagaacagggcatagaatttctaaaagcttgtttttttgtataaataatattcagtgtttgggcacactaaacaacagcaacagcaagaaacctcctctgtctgacaagcagtatcttggagctcaccaaatgagaattccatttggtgcatatgttaactttccttttcagaagatatccaacagtgttgtgttaaaaaaatttcctgtggatttgagatgcttggcattcattaaatcaaaccttaaaggactttgaaatagcacctactttgtttaacatttaaaaaattacaaggctcctgagactagtccttgggatagtctttagtgattatccagagtataataaaaatgcaagattttcagaagagggtatttaaaaagcaaaatagtgtaacacttaggagcataatgtttaatatacacctgaatcttggttccttagagagtggcacacacagactctgtgtcacatggtcagtgattagagtataatgtatcatgtgtgttccatacacatacttagatcttggctcccaaatcagggtagcaggtctagtcttctacttgcttgaattaaatactttttcccctagttccttaatcctgagcaatttttgtaacttttctgagactcagtttttttctctatgacgctctgctacttcataggattatttataagatcatatgaaatcaggtacgtgaaagcactttggaaattatcaagtgttaaacttactatatataatattattactagattagagtagataagacagaagctaagactctgtaagtttggagggtcaaatactggaaacatagctctacttaatgctgctgctaactctttttagtagacctaagttagatttaccacacatgcatcatggattttttcctttggattttatattagatccatatcattgaagagaatttgaagaaaactgagagccctgtggaaacttgaatgagaattaagtgaacattcagcatgacttccataccttaattccctacttgagcaatcctcctcaacccaatccatgttattattcattattcactatctggaatgctgacatgtccagctttttattgcttcgtgataagttgccccaaaacttggtggcttaacacaacagcaatcatttttattattgctcgtggtttctctgggtcaggagtttgggaagtgctcagctgggcagttctggctaggtctctaatgcagttgtagttagactgttactggaggtgaaacagcaggggactgaagcagctgggggatggccgggcatctttctctcctaatgtggtttttccaagtggactagtttgggcttttgtccagcatgctggcttcagggcaaccagcctgcttgcttggaggctccaaaggccagtgttgcaagagaaacaagggaactggactgtgatgtaagacttagcctctgacactacaagcctgccaagaatcaagggaaagaaacatagatcctgcctcttgaggagaatgtcaaagtcacattatatgtggatgggagatgctattgtgaccatctttggaaaaaaaaatttgccacatgaatgattaactctgtcacttcatatatagcttttgctccctatttacctgacctctctagggccactgtatggaatgatttattcttccttttattttgcagctacacagttttcctgacacaaatgaacaagaaagaaataaaagctaactaaaagtaacagaactcctctttttatatcctcttaaacctaaaatcaacatcattttggaaagattgttttacacatacaatgaaaaagaaaaactcgcaatttttcttgacatcttactttcttaacaaaagataggctcctaaatattgttttggaaagctcatattaaatagaaaaaaagcattgctactgacttgcattaaaactccagaaattcatgctcagagaatcatttgtactctgacaggcattgaggatgtttaattttatttcccaaggcactgattttttataggctgagtctttgtgtaagaaaaaattcaaaaattgtagagatctgtttacataatgaaatgtcctaatacacctcaaggaattacaagttttcagatgataattcagccatttggagaaatgatgagagctaggtcatagtgttaaaattatggatataaacattagcttttgcataacaagtatggatacaaacatgcattaatatacttaaattggcatatgttcatggaaggattatgttaaagaaatatgattgcaataaaacagttttaggggtacacatttttaaaaggagtttgcaatgacatttttcctacacacttttttaagcaattgttcaactggccaactttccatatgtccaatacatgtaatattttaagcctagagagtaataagacattctttttagcttcctacctttgtgttctatggagaaaggatagttttggtaaataatgtttttggcttgagtatttgaactaattttcaaagttggcttgcaatgaatgactataaatgagatctactgagcacattttgaaaatcagtttttaacaggaaaaataaaagcattgctaacttcaaatgttgagaaaatttggtagagttggcagggagtatttagagtatactactcacatcttgagattccagataagttagaaagacatgtaaaatataatattttaatatttcatgattatcatgtctcagatagctgtaagattgctggataattaaaacatttaaactcttaaacaatcgaagagattttttattttaaatcaccaggcagttttataatgttggtttttccaaagtgttagaaccttctgaaagtgacctttaaattctaatatttaaagataatttaactttgcaaagaaaaggaggcttctcagagaagtggctgatttcaggagtataggttagggtcagtgctaaataaaacaatggggtcatataacaagaacacagggatcctactggaggcattcccactggcgaacttgagaccaattgagcacaaaaatataaagtatagtaatagtttgtaaatcactgaaaaactaggaattgataggcctataaatagatgaggaagagaggttcctctttatagtaaaatactgagggctgactagtattaatatatagagagacctggagttgaaaaatcaccatgataaagattgtattaggcaaggatcatgtatggatgctaaatttgggggaggattttgatgaggagcagggtatttgattaacttcaagtgttagactgcttattaaattgcaataaggaaaaaaagtctactatttatgtagtggagaaatcagataacatcttgaccaggtgataaaagtttatacaatgaatgaagaacagatagatctggtatttctccagatgtgattttcttctcaagaatgtataacctcaaactaatcacatcagacaaatgcaaaatgaggaattttttattaaaagaaagggaagatggtgtcctttaaaaaatgttaatgtcagcttgggtgcggtggttcatgcctataatctcagcactttgggaggccgagacgggtggatcacttgagatcaggagtttgagaccagcctggccaatgtggcaaaatcccatcgctgctaaaaatacaaaaattagcttggtgtggtggtgggtgcctgtaatcctagctacttgggaggctgaggcatgggaattgcttgaatccgggaggcagatgttgcagtgagccaagatcatgctactgcattccagctgggtgacacagtaagactctgtctcaaaaaaaaaaaaaagttaatgttgtaaaagacaaagaggctgttgaaatattccatgttaaaagagactaaagagatatgacagctaaatataatgtctaaccctaaactgggtcctgtactagaagagaaaaaataaatactataaaagacagacaaaattggaatatggatggtagagtaggtaaaagtgttgcaatgtaaatttatgcattaaggtatgcattaagtggatttcttaggatttacatactgaaatattaaggggtaaagggccatgatttcaaatagttgagaaaaaaaagtgtgtgtgtgtgtgtgtgtgtgtgtgtgtgtagagagacacagagaacatggctgcaaataataaagcaaatgttagcagtatcaatagataagtctgggtaaaaggaatatgggtattccttgtgctattttcattttcgcaactttattttaatttaaattattttcaataagtttttttaaggaacctgaaaacacctacctcattttgaaattaaacaaacaaacaaggccaggcttcgtggttcatacctgtaatcctggcacttgggaggccaagttcagcagatcgcttgggcccaggagtttgatacgagactggcctacatggcgagaccctgactctacaaaaaatgcaaaacttagccagctgtggtggtgtgtgcctatagtctcaactagttggggggctgaggtgggtgaacagagatcgtgctactgcactccagcctgggtgagggtgacaaagtgagaacctttcaaaaaaaaaaaaaaccctcaaaaaacaaacaaaaccaacttcccaaggcacagtttcataatttaataaactagtagaagatccattacttggagacatctgaaagtatatcacataaagacatgaaggagattctttatgagcaccaaagtgaacaatatgatgtaattagctctggtgtctataattctttctctctgtgacgtttcaactgatataaccaaagatgtgagaaaagaaaggttgtagtaaagatgaaacaaaatagcagtgagtttattgataatatcctaatttattatttctgttattttggactattcacatgtacagtatgaaaaaaggacctaaactattgtctttccttttagaacatatgcagaattagagaagaaataacatacattcttttcaatggcctgaatgactgaatttatgctgttactcatgaaaatagttgcctgacctctgctggtatattaaccgttctgttgtatcttgctttgaaagctcccttctgtcctgaagctttgtaattagattcattaatcctctaatctactctagtttttaccagctcacggaaatctctgtcagcctactctatcaatgccttttttacttatttttttctctcatctttgattggatgataaagttcctcttatgaactgtttaggcaggaggaatcttgacacattcagacactttaaaatgctcgagtaagcaagtcacaacaccaggtgaaatctctcactttagtgaacctggtctatactaaaatttgtcatatttttatgaccttattaatattaatatgcttgtatcaaattgtgaaaaagtgacaggccatatataaatgaataaaactaaatagttttttttcaatgacttatttctactttcagaattgttcaagagtgctagaattactatataatctgttaagccctaattacttatacttctaagacactgtgattttgggctttgagagttctcttgaacactctacatcctgttgttttcattaaatcaaagaaaaacgtttctaatgacaaaattccaaaaatggccattaaaggtttctctttattgtcactcaaatgacattgcataagcagtaattgctaaattggcctatctttaagcccattgattaattttgccatataaagcctgaaaactgaaatcaaattttgcccattagacctcccaattattaccaggaactggaaaaaacaaataagcccagccaaatgccagatagctatgtgataataaatgtataggggggaaaaaaggatgggtactaaattttactaacagctggctttggctaggtactatgtatctagtatcacagtttcaaaagagaaatgtacagactccttgtaaagaaaaaaatatactctcatatcctccaatattaaattatttttgctttgtttaaatatgtacaaatataaaacaaaatgtttttatgcttatagctcttacagaattataaagtcataataaattataattttaataacgacaaaagtacaaaaccaataggtgttacaccttactaggaagttcttccatactaggaaggcagaaatcattactgaaactaaattgctttctcaaagtgagtatgacacaggtttctctgaggcttagtatgcctgtaccactgtatgataattattctcccatcatttttctttattccaagtgttggaaacctttatttctttctttctttttttttttctttgagatggagtctcgctctgtcgcccaggctggagtgcagtggcgcgatctcagctcactgcaagctccgcctcccgggttcacgccattctggtgcctcagcctcgcgagtagctgggactacaggcgtccgccaccacgcccggctaatttttttgtattttcagtagagagtttcaccgtgttagccaggatggtctcgatctcctgacctcgtgatccgcccacctcggcctcccaaagtgctgggattacaggcttgagccactgcgcccggcctggaaaccttcatttctatagcattgtgacttttttgagccttcacttgacacgaaaacattctttatgtaagtatttatctatttctcatatggctatgacaattaaagtagtaatatttggggacagtgccacccagaacacaaatgccaaagcaggcactgacactacgtagcagtattttgttgtaacatgttcacattatgtttgtttttatgagaatatactcatgttcattttttaaaagatcgtcatcaagatttaaatctaaatgaaataagaaattatcaaaaggaagattttatagactcctaggatgagtgacactgtattatcagatctaatcttgcagatgaggggattgaggtctagaaaatttagtaacttgcatcaggtcacgcagtgagaaagtacatttaatcgcgtgcttttctagctccaaaaatcatgctctttctgttaaaacaacttgcctaaactaaaagtttaggagctcaactgagtgtaggctgagggtttcagtgttataacttcatcccctgtacctcatcagaacctcatcagaagtttcagtgttacaacttcatccgctgcatacatcagatgcagtggactacagaaggatggtagttgtaggaatggtaacagtcagattgcatgatatatttagtgtgacaatctgaaaacatttattgtacaaattctttttttttgggggggttggagtctcactctgtagcccaggcaggaatgcaatggcgcgatcttggctcaccgcaactctgcctcctgggttcaagcgattctcctgtctcatcctcccgaatagctgggattacaggcacctgccacaacgcccggctaatttttgtatttgtggtagagacaggttttgccacgttggccaggctggtcttgaattcctgacctcaggtgataggcccgccttggcctcccaaagtgctgggattacaggtgtgagccaccgtgcccggcctattgtacaaattctattatttgtttatttactttagtctcataccttatataggtattctaaggcataagaatgctatggtatttaagttcactgttgtttcaattcactgaatagtctttcatttgtggtagtatatagtaatctccccccacttgctttttcttttttttggccagaagattaaccaacaaacctcactctggaaattttcagagtgacccatgaaaatccacatgaggtgaacatcaaacgagttattgatgctctccttctttaccacgctctgtgaccataaatgtcaccactgtaaaaccgctgattattacctactcggagagtaagaaactcattcatgcaatccagtgtcttgttgtatccttcagacatcaggctcatttgacccaaccatgaatctgaagttaacaacgaccttactgtcaacctgtcagacattttaaacttttaatttaaaaggcacactataagtatatataaggtgtgaagtcctagtcctgtgctggatatagaattacaaaattttaaaaatgtgatattaatcacttagctacaatagtttgatgattgaagaataaaggaataattaatctatgaagtacattatatttcctattttgaatatgttttaaatgtgaatatgaatatgaatatatatttgcactcatgggtaattgtatatataatgttagttttctagctttcaaattaaacttcagactaatagtgtaggttttgtttcttagcacttatgctgttatcaataattctgccttatatttgaaccaaagaatgactctctactcatggaatttcaggtaccacagaaggccaacatgagataatttttaaattgtgtcatttctaaatgactgaaatataaattggcttgcattattgttcttctttccatagcaaatacagtgaagtcatctttgtttttcaataatcattttgtgcttatctttggcaaaaaatgaacagtcaatgcttgttaagatgttgattaaagaagttaatacttggctgggtgcagtggctcatgcctgtattcccaggattttgggaggccgaggcgaatggatcacttgaggtcaggagtttgagaccaacctggccaacatggtgaaaccctgtctctactaaaaatacaaaaattagtgggtgtggtggtgggcacctataattccagctactcttggggctgaggcaggagaattgcttggacgtgggaggcagaggttgcagtgagtcaaggtcaggccactgcactctggcctgggtgtcagagtgagactccatctcaaaaacaaccaaccaaccaaaaaagaagttaatagttaaggtattgtatcatagttcctcatatctcctgtgcttggtagtataaattagcataatatttctgcatcttgttgttaatgtaaatcaacggtgttaaacatttttcaaacttacctttgatctatcaggtacacttctagaaatgccttataaggacacaaacaaatgtatcatcaaagatttgtgtacaaggatattgccatactatttattatagataaaaatcaggtgcaacttaaatatccaataaaggggagtgtttaaatatacattttcaaatatatgaaaaataggatagatgtactcatcacccaactttaaaaaggaacattttttaaaaaaagaaaaatgtgaaatattatcaatgttagacatgacataataatatatagcctggaattcaatgagaagaaaaacatatttaagatgtagttgagaaatcattggtattctttgtggaggactcataattctggtagaattatagcttatttagtaaattacatagcccatattgttaaaatgttcaataataggctggagggattctgataaaatttagttgccgtgaacagcttatcttttctctaaccatagaagacatcactgcttcttaattcttagtcccttctccaatgctcagccaaaataagcagtggtaaattgtaatgaccacattgaaccttacatttggtcagtgcttttactttatgagatacttcacataatgtatttcttatgttaattttaaattcctacaattgcttcttctcatgtattataaaattggctgtatttgcccctttctttataaaatactctgtaatctgagataagatcatgccatagcaaaggaattacaagcatctttctatcctcatgctttagaaatttattgggaatcagaattaattgatcttcatatagagtggctcaaaatgtaaataatttaagaaattaaaatataacaataaataaaataaaaaatgatgataatttttactaagtggtactatgaatcggtcctctgctaagccctttatacatagcaattgatttcatactaatataatctcacttcacagtggagaaaactgaagtacaaaggagattacccaagatcatgaagacccagttaaaaaatcgcaaagctgaagtccaaacttgggtctctctgagtttagtttgcagtcattgttgtctgaatatttgttagtgtttattttatgctactgtgcaatgaagtgattctacatttgtgaataaaaaattcatactgtctgtactactggaatttctattctaaaggggaaagataggcaataaacaagtaaacaaatacatatttgctaattctgatgaattctgtgcaggagaaaacaagatacaatgtgctatgatctgaatgtatgtccctccctgcccctgaaattcacatcttgaaacccagtatccaaggtgatggtattaagaggtggagacttgaggaagtgaatagtgagggcagagccttcatgaatgggattagtgcccttataaaagaagcctgagggagcttgttagccccttttgccttctaccatgtgaagatgcagcaagaaggtatcatctatgatgcagaaaacccttatcagacaccacatctgctgctcccttgatcttcttccctgcctctagaactgtgagcaatacatttctgttgcttataaattacccagtctaaggtattttgctgtagcaagcttaatggactgaaacagataatggtatcaagaagtggggtgttgccgtataacaaatacctaaaaatgtggaagcaactttggaacttagtaatgggtagaggttggaagttttgtggtacatagctgtgaaaggaggcttaaggacaattctggcaagtgctcaggagaagaggagagctgtagaaaaagcctcaatcttcttagagattacttaagtggttatgagcagaatattggtacaaatacggataaagtaggtcatcttaatgaggtctcccatggaaatgaggaatatgttattggaaactagaggaaagatgatctctgttataaattgacaaagaacttggctgaattgtgtttgtgttctgctgctttgtgaaagatggaacttctgagtgatgaaataggatattgggcagaagaaatatctaagcaaagtgttgaggatgtggcatggtttctcttgtggcatggtttctcttgactccttatagtaaaatgtgtgagagagaaatgaattaaagatggaatttataataaaaaagaaagcagaatttgaagacttggaaaattctcagcctggctatatggtaaagaatgaaaaatgtttgggggagaacagtaagggtgtggcccatcaaacgtttgataaggagattagtatggatagaatgaagccagatgctattcatcaagacaacgaaagaatgaccctaaaggcattttggtaatctttggggttgccccacccatcacagggtcagaacgccagggccttggtggtggaacgttttaaggctctactccccgagttctgatgcagtgctccttcacagatttagttgtgcctcgggctgcctttccaaaaggcatgggtggtagatcacgctggtgttcatgcagtagcatcttcatgactgtgcagagagcatgaactgtggtggtatgggtacctccacctagattccaaaggatgccacagagagccttggggctcaggcagagaattgctatgaggggagtcaccatagagggcccccactagggcaatgcctagtggagctttggagagagtctccactagggcaatgaccagtggagctgtgggggtgggaatgcccccaacaccccagagcagtagaggaatcaaagtgcatttccagcccgggagagccacaggcacatgactacaattggtgagagctgcagtgtgggcttcaccaagcaaagccttgagagtaggattgcctggagccttgggggcctaatccctgtcccagtatgtctggaaggtgagtcatggagtcaattattctctagtcttaagattcaatgttgtttgccctgttgggttttgaacttagaaccagctacccctttcttccttctcatttctctcttttgatttgggaacatctatcctatgcctgacccaccattgtattttggaagtttataacttgttttatttcacaactggagagcagtttgcctcaggatgagtcaaaccttgagtctcaccaatatttgatgactttagacttttgagttgatattagggtgagttaagacttttgggactattgggatggaatgtatgcattttgtatgtgagaaggatgtgaattttgtggggtcggagcaaaaagtgtatattatggatatatatgtcctcccaaaatttgtatgttaaaacctaaccctcaaggtgatgatattaagatgttgagccttcaggaggtgactaggtcctgagagcttagtcttcatgaatgcaattagtgcccttataaaacagatccaaaggagcttatcttctcctttcaccatatgagaacacagcaaacaattgccatttaggaagtggactttcaccagacgtagaatctgcttgtgccttgaccttggacttcccagcctctgggacagtgagcaataaatttctgttgtttataaattaccctgtttaaggtattttgttatagcagactgaatggactaagatacataaaagagaacagtagagggcatacttagatatggtggtcaggaaagacctctcttaggagtgacacttaagcaaatatctgaaagatgaggcatcacctgtgaagggcaatgagaagactactccaggcctagaaatagcatatgccctgtggcaggaggaaggcaaaaatgaagtatgaaatgaggttgaagatcaataaagtgccaggtccccattcttagaaaggcactgtgttttgtgtgatgctgtcttgtcatcatcttgaaattcttaagtgctttatgcaaggatacaagctgatggctcaacatcaatacatagaaattaaaattgaatttgacaatcatgacccaaaatataagtatccaatttcaaatgagtactttcggagttcaacttgttcaattacttgtatttcaggagagtgtggggctcaaatcagatatttcataggagtaatattgagacttcttatatggccaagtcaggtaatgactaataccttatctaaacatttattagaaatcttaatcagtggatccaaagttgatctttgaggaaaatcttagctttgcctgcagatatgccttactttctgttgaggtgacaataccattttggctttttattatattagaaaatccaagagttacggagtttccttcatttagaactcttgtgctcccagctttttccaaagagttaacctcaaattgtgtgtgttccaaaaagcaaaagtctagctgaaataatttttaagaaaaatagtccaagggagctgctagctatctactcttctagttatacaaaagtctgtttttagcattatgatatattaccatgtttgaattatattattgtgattcattttacacattccacaaatactaatttgaaaataaccttaattcctcacagaatggcatttatcaagtgagcttttactctgtatctataaaactattgttaaagatatcatgtgttacccaaattaagttttctataacttttctttagtttcatttttttaaactctatgaagaatctctataggaaaagtctgtgtctttcaaaggattactatgttttcttttatcagcaacaaaaatggtataatccagaggccaggcatagtggctcacacttgtaatccccgcacttttggaggccaaggtgggtggatcacctgaggtcaggagtttgagaccagcctgtccaagatggtgaaaccctatctctactaaaattacaaaaaaaaaaaaaaaaaaaaaaaaaaaattagccaggcacggtgatccatgcctgtaatcccagctactctggaggctgagacaggagaatcgcttgaacccaagaggtggaggttgcagtgagccaagatggtgcccttgcactccagcctgggcgacagagtgagactccatctcaaaaaaaaaaaaaaagatataatccttcatagtttccattttgctttggttacctagaagcttatagccaaatttaatgtttaatacaatgtttgcctttttaactgtcacaataaagctagcacatttgcttttttctgtacttgaccatttaaaaattttcattttgctgaccttttggtgaggaagagagaacaagagagagagacaaagagagagaatcatttagtatatgcctcattagattgtttttgaaaagaaagaaaattaacatttgtaaattacatgagttatctcaagtgcagttactgtatttatagggttataattatgtttatcatttagaaaataattttctaagaattctgtacttttgcttaatttacattaattgagctttcctcaatcagtagccagaatttccacagtttcaaatcagaatacttatacaactgttactgcatatagaattttatatgtcataagtcattattagaaaaattataagacagatggtcaaaatgtaaaaatgtttatattatatgtattggacaagtgtttaatatcttcaatagtaaaaaacttacaaaccaatgagagaaagctatacattccagaagcaaaatggaagacataggtgataatttaatacacacaaaaaatctgtggccaatacagttattaaaaaatgttagatctcaccagcaaacaaagaaatgcaaaaataaattttaaaaattttgtccatcaatttaggggcatttcagaagtgatgagtcatattcccaatatgtttttgctttttgagacagagtctgacttttttacccaggttggagtgcagtggcatgatcttgtctcactgcaacctctgcctcccaagttcaagtgattctcctgcctcagcctcccaagtagctgggataatgggtgctcgccaccacaccctgctaatttttgtatttttttttagtagagatggagttttgccatgttttccaggccggcctcaaaatactgacctcgagtgatctgcctaccttggcctcccaaagtgctgggattacaagcataagccaccactcccggcccccagtatatttttaaaggtagtatagtataaagtgctagttgttaattccgtatgtactgatatgcataatctataagatatataactaaatttaaaaagcaagatgcagaacctatacagcattctcagtggtatgctggtgaaatggctgtctggagaaaaaaaagttctgatttatactatttttatattttcttggtgtaacttattccaccatggcctattttattactgatatgctgtcacggaaaatggagatggaaagagacatggataatcagtcgtcatgagtcagtaagaactgactccagcacactgttaaatagtataatgtatatctattaggaattcgagaaataaatatgaaagttactcttgatttaaccttaagttaaaaggcaaatgtatgtatcaaatatttattgtccatatataattatttatataattatatataaacacacatgcatacgtgtgatcccagttttgtttcaaggttatttacatgtgtgtgcgtgtgtttaggaggggtgagaggagaaagcggggacactgtttgccaggtatcgaggacatgaaagttatgtacatgtgtgtgcatgtgtttaggagggctgggaggagaaagcggggtcactgttttccaggtgttgaggaaatgaaagtgctaccaacagagtcttctctgtgacaatgtagaaaagaaagaaaatcagtttattattaagtaagcataacagaatatgcacacaggcagcctgctagagactacaaagttaggatgagatctcacataatttatatggcaaagcagagaaaagaacaataatttttatcaccttgtgacactctgtacatctcatgagagccctgggctaattctggcagtatgtgtttacatatgtagaagttatttggtcttacaaactttcatgtatctctttactataaaaatggagcaaagatggggttcaatccctagagacatttatctatattcaaaggttaaagacttggattcaccatgtcttcaaggaaaaactctacaaaagtgaagagggataaaaaatggcctctttgccctttacaaattgggaaaataatttgtatttactcttacacagctgtaaatgacgactaaaacaaaggattaaatgaggattaaaacaattttttaaagtggttgtttgatgactggctttatttttaaatgattacctgtgttttccagatatttctaatgaacacatgtatcttataattatgaaaaaatgttattaaaaacagattttgaagacttgattttacaataagatcatgactttttttttattctcttgagattcctttttaaaatctccagttgttttattgttaatcagtgtatgcagaagtttattactatgttctcttttctattctggagaatacagaaagaagcacagagaatgactttgtcttcaagagtttataatatattcagagttagaagcttaatttatatgaaatagcagtgaatgatacaagcaaatgatatatatccagggatttcagtgtgtagtatggtgctgtagtaaacagagaaagaactcagggtattcttaagttgaagaaaggttatttagaagaagtatgtttggggttagctttggatgttgcttctttagggggatgaaaatccctttagatgagtgtaacatcataagacaaggcaggggggcaaaaatgaaactggaggagtttttaagagaattatgtaatttcacgcatattgagaggagtgaagaaagcagtgtatatagaatggattcctttgatggggagagcctggaagtagagaggtcaattcggagacttttgagaacaaatgaaactcaaaggactaaactgaattagtaccatgagaataaagagaaagactgataggcattgatggttgattggatattgggagaagatagagaaggataagttaaagattattccaagaggtatgggagaagaatgaaagggaagaaaaatctgtagaataaaataatgctttttatatttgaagcaacagttctgcatctaatttgaaatgtccatttgtcagatgctgtatgggttggattgtatccccccaaaagatatggtgaagtcctaactcccaatccctcagaatgtgaccttatttggaaatagggtcttgcagatgtaagtagctgagattactccagtatggtagacccttactctgatgtggctagtgtccttataagaaaaaaagacatacagagacagagacaaacatggagaatatggccacatgatggtagaaccagatactgaaatgatgcatgtcaaggaataccaatgattgccagcaaaaaacagtagccagaaaaggcaaggaaggattctcccttacaggtttcagagagagtatggccctgctgataccttcatttcaaacttctaccctccagaaattgtgatatgataaatttgtgttattttaagctagccaatttgtggtactttgttatggctgacatgagaagctacgatgctggtgctattctttcattcttctttcttaccatccctcccacccactgaaactttctccctggaaaaaatttatcaacacaaaataaagcaaaaaactatacaaaacacaaatgaggtacatagagtcaaaattagagtgaacaatgtgttaacattttgtaatattttgtatctactagtattttattctctttatcattcttaaatgggattttaaaaggggctaaatcatctctccggattgtgcagggatagctcattggagtgtgtgctctgcatatccttttaggaggtatttaaagatagtaatgtctctccagcttgtttggcagtctagaattccattgcctaactttttattcaagaatatcagatgtcagaatgaagtgacaacttagccatgtggaaatgggaagaatatggggatcacaaagtaagcaaggcagtatgggtcatagagcacatgggcaaaggcatatgcttgaatgccttgaggacccactgtagtaagaggaaatataaaaatggagagagaaggaagtacttgtctctgtcactcccaccagaaatttctcacttgagtatttgtattaatgttgttgtctttactgattttttcaaatttttaatgattgaaatgagatcagtcatattctattccagaaagtgttccctcttttcttaatctgtttttcttgttgagtatatttatatatatataagtcttccatgaggtaggggggatactctcacccctttttcgactgttaaatcaacaacttttagagattggtcaattaggttaccaaacattttacataacttggaaaccaaatattttacataatctggaaagtaaagctgttttgttaatttttttttttagctttttaatttttttgagacagggtcccactctgtcttctgggcttgagtgcagtgctgtggtggttatggctcactgcagcctctacctcccaggctcaagtgatccttccacatcagcctcctaagtagctggggccacatgtacatgtcaccatgcctggctaatttttgtattttttgtggagatggggttttgtcacattgctcaggatagtcttgaattcctgaggcaattgatccacctgccttggcctcccaaagttctgggattacaggcatgagccaccatgccgggcctgtaaagctgttttaagtgcatgtgaatatatgaatttggggaactaactatgcctaagccataagcttttatttcttttctttccttcctttttttttgagatggagtctccctttgtctcccaggctggactgcagtggcgcaattttggctcactgcaacctccacctcctgggttcaagctattcttctgcctcaacttcccgagtagctgggactacaggcgcgtgccaccatgtccggctaattattgtatttttatttttatgtttttattttttattattattttactttaagttttagggtacatgtgcacaatgtgcaggttagttacatatgtatacatgtgccatgctggtgcgctgcacccactaactcgtcatctagcattaggtacatctcccaatgctatccctcccccctgcccccaccccacaacaggccccagagtgtgatgttccccttcctgtgtccatgtgttctcattgttcaattcccacctatgagtgagaatatgcggtctttgtttttttgttcttgcaatagtttactgagaatgctgatttccaatttcatccatgtccctacaaacgacatgaactcatcattttttacggctgcatagtattccatggtgtatatgtgccacattttcttaatccagcctatcattgttggacatttgggttggttccaagtctttgctattgtgaataatgccgtaataaacatacgtgtgcatgtgcctttatagcagcatgatttataatcctttgggtatatatccagtaatgggatggctgggtcaaatggtatttctagttctagatccctgaggaatcgccacactgacttccacaatggttgaactagtttacagtcccaccaacagtgtaaaagtgttcctatttctccacatcttcttcagcccctgttgttttctgactttttaatgattgccattctaactgatgtgagatggtatctcattgtggttttgatttgtatttctctgatggccagtgatggtgagcattttttcatgtgttttttggctgcataaatgtcttcttttgagaagtgtctgttcatgtccttcgcccactttttgatggggttgtttgtttttttcttgtaaatttgtttgagttcattgtagattctggatattagccctttgtcagatgagtaggttgtgaaaattttctcccattttgtaggtttcctgttcactctgatggtagtttcttttgctgtgcagaagctctttagtttaattagatcccatttgtcaattttggcttttgttaccattccttttggtgttttagacatgaagcctttgcccatgcctatgtcctgaatggtaaagcctaggttttcttctagggtttttatggttttaggtctaacgtttaaatctttaatccatcttgaattgatttttgaataaggtgtaaggaagggatccagtttcagctttctacatatggctagccagttttcccagcaccatttattaaatagggaatcctttccccattgcttgtttttctaaggtttgtcaaagatcagatagttgtagatatgtggcattatttctgagggctctgttctgttccattgatctatatctctgttttggtaccagtgccatgctgtgttggttactgtagccttgtagtatagtttgaagtcaggtagtgtgatgcctccagctttgttcttttggcttaggattgacatggcgatgcaggctcttttttgattccacatgaactttaaagtagtttattccatttctgtgaagaaagtcattggtagcttgatggggatggcattgaatctgtaaattacgttgggcagtatggccattttcacgacattgattcttcctacccatgagcatgcaatgttcttccatttgtttgtatcctcttttatttccttgagcagtggtttgtagttctccttgaagaggtctttcacatcccttgtaagttggattcctaggtattttattctctttgaagcaattgtgaatgggagttcactcatgatttggctctctgtttgtctgttgttggtgtataagaatgcttgtgatttttgtacattgattttgtatcctgagactttgctgaagttgcttatcagcttaaggagattttgggctgagacagtggggttttctagatatacaatcatgtcgtctgcaaacagggacaatttgacttcctcttttcctaattgaatatcctttatttccttctcctgcctaattgccctggccagaacttccaacactatgttgaataggagtggtgagagaggccatccctgtcttgtgccagttttctaagggaatgcttccagtttttgcccattcagtatgatattggctgtgggtttgtcatagatagctcttattattttgaaatatgtcccatcaatacctaatttattgagactttttagcatgaagggttgttgaattttgtcaaaggacttttctgcatctattgagataatcatgtggtttttctctttggttctgtttatatgctggattacatgtactgatttgcgtatattgaaccagccttgcatcccagggatgaagcccacttgatcatggcagataagctttttgatgtgctgctggattcggtttgccagtattttattgaggatttttgcatcaatgttcatcaaggatattggtctaaaattctcttttttggttgtgtctctgcccggctttggtatcaggatgatgctggcctcataaaatgagttacggaggattccctctatttctattgattggaatagtttcagaaggaatggtaccagtttctccttgtacctctggtagaattcggctgtgaatccatctggtcctggactctttttggttggtaagctattgattattgccacaatttcaaatcctgttattggtctattcagagattcaacttcttcctggtttagtcttgggagagtgtatgtgtcgaggaatttatccatttcttctagattttctagtttatttgcgtagaggtgtttgtagtattctctgatggtagtttgtatttctgtgggatcggtggtgatatcccctttatcattttttattgcgtctatttgattcttctctctttttttctttattagtcttgctagctgtttatcaattttgttgatcctttcaaaaaaccagctcctggattcattgattttttgaagggctttttgtgtctctatttccttcagttctgctctgattttagttatttcttgccttctgctagcttttgaatgtgtttgctcttgcttttctagttcttttaattgtgatgttagggtgtcaattttggatctttcctgctttctcttgtgggcatttagtgctataaatttccctctacacactgctttgaatacgtcccagagattctggtatgttgtgtctttgttctcattggtttcaaagaacatctttgtttctgccttcattttgttacgtacccagtagtcattcaggagaagcttgttcagtttccatgtagttgagtggttttgagtgagattcttaatcctgagttctagtttgattgcactgtggtctgagagatagtttgttataatttctgttcttttacatttgctgaggagagctttacttccaactatgtggtcaattttggaataggtgtggtgtggtgctaagaaaaatgtatattctgttgatttggggtggagagttctgtagatgtctattaggtctgcttggtgcagagctgagttcaattcctgggtatccttattgactttctgtctcattgatctgtctaatgttgacagtggggtgttaaagtctcccattattaatgcgtgggagtctaagtctctttgtaggtcactcaggacttgctttatgaatctgggtgctcctgtattgggtgcatatatatttaggatagttagctcttcttgttgaattgatccctttaccattacgtaatggccttctttgtctcttttgatctttgttggtttaaagtctgttttatcagagactaggattgcaacccctgcctttttttgttttccatttgcttggtagatcttcctccatccttttattttgagcctatgtgtgcctctgcacgtgagatgggtttcctgaatacagcacactgatgggtcttgactctttatccaatttgccagtctgtgtcttttaattggagcatttagtccatttacatttaaagttaatattgttatgtgtgaatttgatcttgtcattatgatgttagctggttattttgctcggtagttgatgcagatggtctttacattttggcatgattttgcagtggctggtaccggttgttcctttccatgtttagcgcttccttcaggagctcttttagggcaggcgtggtggtgacaaaatctctcagcatttgcttgtctataaagtattttatttgtccttcacttatgaagcttaatttggctggatatgaaattcggggttgaaaattcttttctttaagaatgttgaatattggcgcccactctcttctggcttgtagagtttctgccgagaggtccactgttagtctgatgggcttccctttgagggtaacctgacctttctctctggctgcccttaacattttttccttcatttaaactttggtgaatctgacaattatgtgtcttgggagttgctcttctcgaggagtatctttgtggcattttctgtatttcctgcatctgaatgttggcctgccttgctagattggggaagttctcctggataatatcctgcagagtgttttccaacttggttccattctcctcgtcactttcaggtacaccaatcagacgtagatttggtcttttcacatagtcccatatttcttggaggctttgttcgtttctttttattcttttttctctaaacttcccttctcgcttcatttcattcacttcatcttccatcgctgataccctttcttccagttgatcgcattggctcctgaggcttctgcattcttcacgtagttctcgagccttggttttcagctccatcagctcctttaagcacttctctgtattggttattctagttataccttcttctaaattttttttaaagttttcaacttctttgcctttggtttgaatgtcctcccgtagttcggagtaatttgattgtttgaagccttcttctctcagctcgtcaaagtcattctccgtccagctttgttccgttgctggtgaggaactgcattcctttggaggaggagaggtgctctgctttttagagtttccagtttttctgctctgtttttttccccatctttgtggttttatctacttttggtctttgatgatggtgttgtacagattggtttttggtgtggatgtcctatttgttagttttccttctaacagacaggacactcagctgcaggtctgttggagtacccggccatgtgaggtgtcagtgtgcccctgctggggggtgcctcccagttaggctgctcgggggtcaggggtcagggaccaacttgaggaggcagtctgcccgttctcagatctccagctgtgtgctgggagaatcactgctctcttcaaagctgtcagacagggacatttaagtctgcagaggttactgctgtctttttgtttgtcttgccctgcccccagaggtggagcctacagaggcaggcaggcctccttgagctgtggtgggctccacccagttggagcttcccctctgctttgtttacctaagcaagcctgggcaatggtgggcgcccctcccccagcctcgctgccctttgccgtttgatctcagacttctgtgctagcaatcagcgagactccgtgggcgtaggaccctccgatccaggtgcgggatataatctcgtggtgcgccattttttaagcccgtcggaaaagcgcggtatttgggtgggagtgacccgactttccaggtgccatctgtcacccctttctttgactaggaaagggaactccctgaccccttgcgcttcccaggtgaggcaatgcctctccctgcttcggctcacgcatggtgcgcgcacccactgacctgcgcgcgctgtctgacactccctagtgagatgaacccggtacctcagatggaaatgcagaaatcacccgccttctgcgttgctcatgctgggagctatagaccggagctgtttctattcggccatcttggctcctccccctaattattgtatttttagtagagatgggatttcaccatgttggccaggctggtctcgaactccagatctcatgatccacctgcctcagcctcccagagtgctgggattacaggcgtgagccaccgtgcctggccgcttttatttctttctaaatgaaaacatacattttgaggttcactgaccttaaaatatatttccttttcccagaagagtatatactgttcatttggtttccatgtaaaactctccccttgaacatattgataatgagtaatctttatttccctaggaaataaaggaaaataaataaaggaaaaaaaaataacttccctaggaagttagttctattatcagctgtgaaatctgagtgactctacacttttgttgcttcagatgatttttagaattgctgttttggtgcagaattaatcacagcaagagaaaatgtatcaatatggaaaaatataagggctaaaaagaagccagatagctcatattcatataggttgctaataatatacccaatgtatagtacttaatatccctattactgccaattctattaaataagatgtcaaaatattttaatattgtctcatgagatatcataaggctatatgagtgcttagaatttcttgatttattagttgttttctgtgaaatctgggtggctgtaattatagttcacatttgctgtattaagattctactgtttttttttttaatgaagcgtaacagtgattaatggtttagctagctaagaacataagaaagatgtgaatgcccagccaaaaaaaaagatagtttttctttctgatgtttccgtacttcttagtttgaactatatgaaattgccacttttgtaggtcaaatagacaactttttatggttcaacctattatatggtttagaataataatgtctatagtctactctgccctagccagctctacataaaactttaacttgtgggctataaacttacccaatttatacaaattttggcgtaattatttctgtttttattttttgttattagggtttgctttttagagaggatctcactcaggctggagtgcagtggtgtgatcatagctcactgcagcttcaaactcctgggatcaagggatcctcccaactcagcctctggggtagctgggactacagacatgcatcaccaaaactggctagtttttaaattttttgtagagacagtctcactctgtcacccaggctggagtgcagtgccttgatctcagcccactgcccactctgcctcctgggttcaagcgcttctcctgcctcagcttcccaagtagctgggactacaggtgtgtgctaccatacctagctaatttttgtattttttagtatagacggggtttcaccatgttggccagactggtcttgaattcctcacctcaagtaatacacccgcctcggcctcccaaagtgctgagattacaggtgtgagccaccaagcctggccaagtcattgtttttcttatgcaccaagaagtttggaggtagccagtccaagggcaggtgtagtggcttcacaataacattgatgttccagactctttctatatttctactctgacatacttagcctgtggctttcattctttttcgtgttgctttagacccaagatggacaccgcatttccaggtattacatctaccttccaggcaggaagaagagaagaattaaaagcctcattcttttgaggcttcctctcattgcctacaaagaagggaagttatcttgaggggcttctccctgagagtatttcagttaactattttagcttcatgtctctttagtagaggaaggcacagaaaaaagcattgaaaagcaaagtgagggacactttgaagcaacaaatggtaagccattcaagactaataaattgtaggccaattgagttggtttttgtattttaaaggcaagtgtgctttgaatagcatcaggatccaaaagaaatgctgttgctggtgaaatgatcatttaaataagcaaaaggagtttctattcttaaatgtagagagacaaattgatttctgataaccatcttgctacagggaaatgtgaaattggaataagagggcaaaacagacacactaggaccaattcttaaaagttaagtaacctttagtcttatctttattaaatctttcctttcaaaatatagccctgtaaatcttctgagttttgtgaccttagtgacagtagacttttagcctttgattactttgtgaaataaaataatgaattaaaaaagataatttttttgtagtaaaatatgccatggtacaatcacaaatagaattttatgtgattggtcatatatatacacatatatatacacatatatatatacacacacatatatatacatatagatatatatatatgtagtactgtttggtttatatacaacagttgccagtttgttccccaggaaacaagattaatattcaggaagtttgtaagtgggaactcttgggatttacacctgtagggaaagggatggaagcaagattggacaaaaggagaagttggatcgtgacgcagtcagaagaaaggcctcaaccagctgcatgggaaggctgtttggagttgttccaggttgaagtaaggaggctgagcctttgtactccagtattgaccagtcatttgatgcaaattgcccctaggagatagtgtgatcctgggcaaggtaatctgtacaattgagggtaattcccagagaggactagatagctgagggatgacagcagttgagaaataaattctccaaacttaattgtatcttgggaaaatcagatttaacttataaattttagttttacatcttactttttaggaatattacccatggtaagtgcaatattgtacccatatgtgttctcaaggctctagggttggagtattaaagatgatttattctagctcaggataaagaatgctcttttaagattaatatggaagctccacttgagactcctcccacctccaaaaatattaagttaattctgtttcagtcacttatttgtaacagcatcctgtgtatgccgaatactaaagaggaatagtgagctgttattcagttttttagtttttaattcaatttgatcatgggaatattcatttcagtacagctccatgattatctctaattttttaaggattctgatgtaatgcataattcttgattcccttgtcctgtctcataaaataactggcttttatttaaaaagtctccccaccccccgcatcattctttttcttggaatgagagctcagaaagcacagagtctgtcttggttgttatccatgcctccttgcctcttggatagactgctaaaatttattttcttttggcctttccctgaaagtcatccagaagcaacagtatttatagaacagagcagctctactactgaacatggcagggggtggtggcgggagggtatcctctggagtgtgtatttactgcaagaacagcagtcagatggattgaatttagattttactgatttaatacttagaataatctgaactttaaatctatgaacagttagtaagaatctggggtcagcaagatgatagctttaggagcattgatttttatgaaattagattataatgaacacactatgtgatggtcccacacatcttatatagtagaattagaatttttggagtgaaaatctacaaggctaaaaaaattagtaacagtttaagcaccattttactcagctaccaggggcattgtgactaacttcttggttcaagtgtttctggtcttggttggattcaaatatcattggtagattttggtagaattctatattaaatattttcttttccttcccattgttctttttctttgactattttaagacattgtcggaatgaaaatgttatagatagtacttttataagacctgccaacatttttttaccattaccattagtaaataacttaaaatattttatataggattctctgaagcataatttttacttctacctttatctaaaactaaagttattacattcctttgtcccttaggaggttgcatttatcaggttaggtgtgtttgcttcaggttagttttaaaaacaagtttctctgagatctgatgcaatgattggttttaaacccagaacaaatggatttttgttttgggggttttattcaatgactttgtacctatggtaccaaaagagatttttttttttgttttatttaatgattataaagttcaaaaacagaaccagaaacttatctcttagcatttgattatatagaaataaatgctcatttcctggaactatagatgtattaaatctgtaaagtgctgaaaagcatgtactcaagtgaaacaattggcaggcaaagacacattttactttgtaaaataagagcttatataggatgttttatagtttgtattcgagctaattttacataaaaatgtgaccatctataaaagatatactaaatagggtccttataacagggttcctagtcccttagaaattctgttccaaataatttattgaatattgctccttgttcagttaatttttttttttttttttgaaacagagtctcactctgttgcccaggctggagtgcaatggcatgatctccgctcactgaaacctccgcctcccaggttcaagtgattctcttgcctcagcctcccaagtaactgagattacaggcatgtgccaccatgactggctaattttttgtgtttttagtagagatggggtttcaccatgttggccaagctgatctcaaactcctgacctcaggtgatctgcctgccttggcctcccaaagtgcttggattacaggtgtgagccactgtgcccagcctgttcagttaatattgagaagtattttctaagtttgcccacttgcaaaatcatttgtgaatactatgcttcagcttatgagtagtttggttttttattacttgattagcataattctatggaattattaagacatattattgtccctaatcttggtattgtctgtatactccagatgagtgatctggagtatataattaacaaatgatagatctcctgattgcagtggtctttctgccacatcatactgtttaccgtggatgacatcatactgtttactgtggatgatcagttgttttggtttcagtacaagttaagtagttcctctctgcctgggccttgagcaagcaaaacctcttttaaaaggaaagaaataagtggtgttaggttataaatgatgcagatcttcattagtctggcaagatctataacctcgtaagttgatctgatttgagcatcatatctataataagtagcctgtaagaaattcaatcaggcaggccaggcgcagtgactcaagcctgtaatcccagcactttgggaggctgaggcgggcagatcacgaggtcaggagatcgagaccatcctggctaacacgatgaaaccccgtctctactaaaactaccaaaaattagctgggcgcagtgacgggcgcctgtagtcccagctactcaggaggctgaggcagaagaatggcatgaacccaggaggcggagcttacagtgagccgagattgcgccactgcactccagcctgggcgacagagcaaggctctgtcccaaaaaaaaaaaaaaaaaaaagaaagaaattcattcaggattccatagtcaataacttaacaaaaggcagcaggaaagctttactgatgatagtgttaccagcgctgtgtttcaaaactccagggggcatactcatattgtattctttatgttatcctctggtgttgtgcaacatgatgatactccatgatattttaagaatattgaaagagagttgtttaatgaaagagctctgaagattgagctcttttattctggctaactctgataatcagtaagtcattttcccagagagaatcttttcgtcttaaaaggctgaggtcaactgtcacagctgcagtttctccagggaaaaatagtccttgtacttagccaaaaacctttcaatcaatatttgaagagagagccatatcctgcagtcaaattgagggtagttttgcccccttcaaacacagagcagttggctttttagatggatgaactgcgtttggccaggtgacaggagttcaggacactagagtccttatcaaatcttcatgtgatttttgtgcttcagtttttctaaattcaaaatagattgtgaagatagttctcagttggctctgagaattttaagttatggcttagatcaaattaaatatcctgggattatctttaaatgatttatagttaggcacaagcttttcacaacattaacatttctatttgatacagaaaatcattctttttgaatagttggtgatttattttgatttgaaattctaaatcccaaagataattttcttaccgtgaacattgtgttgtttggctggtagttttccctaaagattatttaaaagtctcttattcttaattgaatatgttacacagcctagaagtccactaagcaatgcttccaaaaattatttgcatttagtggattatgcataaccccattttagagctgatgaaaggagtaagcttaaatgcattttcaagatgttgaaacactcgttgccaaaaagaagaataaatattggtctgaaatgaattaaaagtaaatgttttctttgataccagaaagtaccattttgggatgaaaaggtaaagatttttcaaatttatgttaatgataacatttgcttttacttttctaatgctaattttaaaatgccagcatagcattattttcagtctatgcataagggatgtgtaatttttgtagcacaaaaggggtgtgaagctattgttacaaccttgctggtcgtagattaaaccattttagtatgttatcatattaacctaaaagtagaaaaatagaaataaccatatttgaagcagcttatgttgaaattgtatcagtaacatactatagtattttctgagtatttctcccaaaaggttgagtattagctattttatttacgtgagaattatatcttatccatggattagtatgtactcagagaactatagtacaataatatttaatacaaacactactttgaatataatttaatatacaatgaatgtgaaaccgtgacaggcttctgctgtatcttggggtacatctttatgagttttagatattatatggtaccttggaaaaatgctaattgttctcattttaccttttggattttggataaactggggtttgttatatattcctgctatattctttgatgcagaaatttaagaagcaaattatttttattcagtgatattcaagtttgctttttaaaaagatttcttgacagaaataggatagctctatttgattgcatttatgaatgattcctctactggagtgaaaattgtagactaaactctatttgtctctcgcaccactgaaggcagaaatctcttctgaagtcagtaaaaggttaacaggggaaaagaaaaatatgtgatggaaagaattgagcccaataattcttgccattatggtacttacatctgaaacatgtagagtactcttcaagctctacttcccattgttgaattaatatagaaatatttatagaatatgattatgagcagtgtttacttttctagatttataattttattttttaagaaacagtctcagagaagtacttagccttggataattttttggaggaaaaacaatattctttgacaaaattgtctctggtcaaaacgacaacatgaaatgaaatgatttttgattagattgtttaataagtttaagtacttttctgttatgtagaagatttcacctgccttcctagcaatgctataaagttgagatagccgatatgggaaaattacagtacaatgagatgcttgccaaatggtatatatagctagttaccactgactgggtatcaccaggactagaattcacatcgcctgacaggctaacttcatgttcttttcagccaaccacagcctcattttataatctgtggatcactatgaaggcaaagttttgatgttacagagataagccctttcaaaaatctaccagaatgattccttcaggtatactaccactacttaataccaagcagttttcttgagtgataaattaaaaattaccatggtaggccgtctgcagtggctctcgcctgtaatcccagcattttaggagggcaaggtgggcagattgcttgagcccaggagtttgagaccagcctgggcaatgtggtgaaaccttttctctacaacaaatacaaaaattagcctggcatgatggcccatgcctgtcatcccagctactaatggaggctgaagtggaaggatggcctgagcctgtgaggtcaaggctgcagtgagccgtgatcatgcaactgcactccagcctgggtgacagagtgaaaccctgtttcaaaaaaaaaaagaaaaagaaaaagaaaaaaaatcaccatagtaaaaataactttcacccaaaaaggtagagactaaataaggtgatgcattgacttactatttcctagcccagctaaggtaccatttctagcccaactgatttagatctttatcctggcttgaatttggtggcacctcctagtccctcatggactttttttccacatcagacaaaaccactgaatggttttgtgtagtctggcaggattgttagttgcggtggtgtagaagcggaaacaatttgggagttgtaggttgaaactgaggtgcctagttctatgaagtggtattggtactgaactttgagtaccagatttatgtatatatttaaaacatttttttaaaggtggatagtagtggtggctatttgagtgtctttggaatactgagacactcggcataattgtacatcttataaagtggaattttggagcaggatgggttgtaaattcactgtaaatttagaatccaaacaaaactcatttcatgtttgtctaaactattttaaaccattttgatcttactaaaatttctttctgtagtctgtatttttgtgtttaaggctaggtttttctttttcactatggggttcatattcagttggcctgctaaatcacttccatactggtcctaagagaggttcatgctactctgttacactaaatccattataatctttattgacaaataatattgaggatccacaggattcactaagttcttaggagacctgacgtgataaagagaagatatgatcagtgcctaccaaaagcccatgttatagggcattagaaaagcatggtaaactattaaaaaaattggtaaaaagttttatcagatatacagcagtaagcaacttacatgaggtagataagtttggggttgttttaagaacatattttgcttcttcttttgaactcttataacattcactctttttcttaggtgtcggattaaagaatcagatcacattgctttgtaatggtcaattcccaccgtgtgaatgaaataagaaaaatggtcttgaattttggattacaaatacaatattgccttcaatctacaatttcattaattttttacacagttacctacattttctactttttttttttacacttcattataacacattgacttgtttcttgttttttcctcagctctattaaggtataatcaacaaacaaaaatagtatatatgtactgtgtagaatgcaatgtattgctatatatatacattgtgacaggattacatcaagctaattaacatatgctttacctcacatactgatatgatttggatctgtattcccacccaaatctcatgttcaattgttggaggtgggtgcggctggtgggtgattggatcttgggggtgatttattgtggtttaacacaattctcctagtgccgttctcttgatagagttctcacgagatctagttgtttaaaagtgtgtagcaccttctacttctctctcttcctcctgctctggccatctgaagtgactcactccccgtttgccttctgccattattgtacgtttcctaaggcctcctcagaaaccaaacagatggccagcatcatgttcctatacagcctgtggaacatgagccaattcaacctcttttctttataaattacccagtctcaggtatttctttatagcagtgcaagagcagactgatatacatacatacagttatttgtggtagagaacactgaaaatatactctcttagcaatttttaagtatacattattatcagctatagtcaccatgctgtaaaatagatctcgaaaacgtatgtatcctaactgaaactttacatcctttaatcaaaaacttcccccttcacctctccctagcttgtgataaccactattcaactctactgtgagtttcacttttttttttagactctacacgaatcagtatttgtctctctgtgcctggcttatttcactcaatataatgccctccagcttcatctgtgttgtcttaaatcacaggatttccttctgttttgaggctgaatagtatttcattgtgtttatgtagaatgttttcattatccattaatcatagatagacaattaggctgatttcatatttttgctactgtaaataatgccacagtgaattgactttggacatatacctgtaagtgggattgctggatcctatggtagttacaattttaaaatttggagggtcctccacactgttttccataatactaatttatattctcactaactgtgtagcagggctccctttctctacatcctctgtaacacttattatcttttgtctatttgatgatagccattctaacaggtatgatatgatttctcattgtggttttaatttgcatttccctgatgattagtgatgttgaatattccttcctatgtttgttggccatttgtgtaccttgttttgagaaatgtcgttcatatcatttgcccactttttgttctatggatcagaagattctttgtacatttttaattggctgattggttttcttgctattgaattgtttgagttgcttatatattttggacattaaccccgatgaaatatatggtttacaaatattttctcctattctgtaagttgtcttttcactctgctaattgtttcctttgctatgcagaagccttttcatttgatactgtcctattgtctgcttttgctttttaaatctgtgcttttgaagtcatatccagaaaatcattgcccaaaccagtgttgtagagtttttctcatatgtttttttctagtagttttagggttgcaggtcttatgtttaagcctttaatccattttgagttgatttttgtatatgatgtgagttaagggtccaatttcattcttctgcctgtggctgtccacttttccagcaccatttattgaagaaactgtgttttctccattacttgtccttggcacctttgtcaaagatcaatttagtgcaaaagcatgaatttatttctgagctgtctgttctgttcccttgggctatgtatctgtttctgtgtcagtaccatggtgttttgattattacagctttatagtatattttgaatgaggtagtgcgatgccttcagctttgttctttttattcaaggttgctgtggctatttgaggtcttttgtggttccatatgaattttaggaattgttttttctatttctgtgaaaaatgtcattggaagtttggtaaggattgtatagaatctgtatattgctttgaggagtacagaaattttgacaatattgattgcacattttggtcttgttcctgatcttagaggaaaaaccttcaccttttccccactcaatatgatgttacctgtgggcttgtcatataggatctttattgtgtttaggtacatttcttctgtacctaatttgttgagaagttttaccaagaaagattgttgattttgtcaaatgctttttatgcactcattcagatgatcacttgattttagttccttattctgttaatgtgatgtatcacatttattgttgaaccatcctgcatccccaggatgaatcccatttactcatggtgaatgatccttttaatgtgctgttgaatttgctttggtagtattttattgagaaattttacattaagcatttatcagtgatatttgtctgtaattttcttctcttgtggtgtccttccctggctttggtaccataatacttgccttattaaatgagtttggaagtatttcctctttttcagtcttttggaaattttgagaaggattgatgtaaagcctttagatatttagtataattcactagtgaagccattagtctggagtttttattgctgggagtttttttgattactgatttgatctccttttacattatttgtctgttagagtttgtatttcatcatgattcagtcatgataggttatgtatctctaagaatttgtccatttttttagcttattcaatttgctgccatataatttttcatagtaatcttttaggatcttttatagttctatggttcaattgtattgccatctcttttgtttatgttttttttgaaactttcttattttttagtctagctaacgatttattcaatttgtttttcttttcaaaagacccactcctaatttcattgatcttttttattgtttttttagtctctatttcatgtattttgctttgatcttcttccttttgctgactctaggcttaatatgttcttttttttctagttccttggggtgcaaaattggtttttattgacatttttctttattcttaatgtatctattgctatatactttcctcttacaaatgtaagagtgtgcatcccataagttttggtatgttgtgttttcacattacatcttacaaatgtaagaatgtgcatcccataggtatgttgtattttcattttcatttgtctcaagatattttttgattttgcattctatttcttttttgacccattggtggttcaggggtgtgttgtttaatttccacatatttgtgaattttccaatttttttctattatttatttctagtttcataccattgatacacatgaagtagttttacacagtttttgagtccagtaaattctattatttatgcttttattatttgacactcctctcctcctttgtcttcaccccattatacctcacagcaaactctttaccaaacccagttagcatttccctgtctgcactagaggatattttattaataatattattacccctgaaaaataccttcatttaaaataagaagctaaataaaacagaattgaggtatagaaggaaagtagaggtagaaagctaaacaccttcaatgcttattctctgaaacacataattttaagatatcctaaaacttcagagagcagctgcatcaatatttagttggaacttaaaatccccagtagagtccaacttcccagcaagatagagtttgagcaaagtgataaatgttagtatggtattattggcttgaattaatttgaagagacatacgcagaggggatccttggcagtaatgataatgcatataaacaaaagatactaaatgctaaacaagaaaaggtgcaaaatattttccaagaaaagaactgaaaagcatggctctttggagctggccagctgctctctggtcctcttgtttggctgttcctgttatattgcatgccttccattcttatgaaatatgcttttgagataaacaagagggaaagaatagcagttgtcatttgacataattgtggagaggttcaatgatacaccacaaccagaaccaggatggagttctcctgtttgccaaaattagggatctttctattgatgacagctagttttcaagagacccacaaaaatgttttatttttaagataaaatatttgcacctgagattattttagtggattattatgtctgtcttcatctaacatttttatgattgtttacatttttctggctctcaacttgcaaaataaataccgtattgatgaattgaatgtatgaaatacattgaaaaaattcaaaatggggaacatttttttagtcatttaaatgtagtctaacaatatgtctactaaatgcaggagccctgatactaaaaaaaggaaaaaaaagtctgaacatgaattgtttcttagcattactctagtgtataaatgtgtgtgcttgtgtttgagctaggagcgcaggaatgaaacaataaaattaggggataacaggaaacaattttaaaaataaagaaacaattagagtagataaaccaaccttatgacagcaattataattccagaacatattttctgaaataatcttatgcctgaagagtgtgtattattagttttatacaaattcctaatccaattataatatacaaactctaataaattaattaaaatgaagctgataatgttaatataattaaaatagctttagctctcgattagacttcttggtcatgctttagataagatgctttagttcctttgtttattatttcccatagatagagtaaatccaattctatttatccaaattggctttgtgttttacctctcaaacagtcattattttgaaatctaagtggctaagtgccatgacgggctaaagatggatttagagaaggcatgtgatttgagtgagagaaaggttatctttactttggtcaaatgtatttctcttgtttcagtaatgccagatgtgggtgtcacagttcaatttcccttttgccctaatgatttttttgtgagagagtcatgtcctatatagcataggaattgagtaagttgatgatggaagttgaaacctcaggtgaagataaattttccaactaatttgttatttggaggatcattctgagctattgaatcttgcacttcttgtctaaaaaagtcaccaccttggaaaactcgtccttgtacagttttaacataccattatcatcacatcttttaactattttatcagaaaaatgtttaggattggaagcagtgtcagtgttaaggaactagaggaagaaattagaagatatactagatttggccaacaaacaacaagagtacttcagggatttcaaatctgatttataacttctttaaaaatgaaagttaactatttttaacaggactcacgagactaaaagaataccaatgtttttggaagaaaggttgaggaatatttgaattggcaaatgaagaaaatttacaagccaaatatgccttcatagttgccacaatacctttcccgacacttcatttatcttaactatattagggctaataagtttttaggttggcgacctccaaggaaaaccttgttgaagattcggaataaaatacaaggcttgatattagttacattataatgccacaaataccatctttcagtgtctattttttttaattcaattaagtgagaatctacagaaattagaatattgttagctgcttcataatatttagtaaaagagatattattcctaaattaaagtagtttactgagcgaaatttgaaatttgtaattaggttttagtaaagaaatagaagaataaagttagtagtattatcaaatatcaattcaaaataacaattttattaacgactgaattagccatatctaataaattagcttacaaacatttactcatattaacaaaagcaacaataattaaaatgtcaaaaatatttgttaagccttattacatgaatgcacagcttatatacattatctaagtctatctagataatgtatatatacattatttgtattatttgtagaaatcataaggagctatagtagccattattttccccattttatagataagaaaactgaagttccataagtaggtgagggatgagataattctgtaagtagaacccattttagaaccctattatggaagacacagaagcagtagaaatcattgcctctgctctcattgtgattgcaaattagttggagagataaaattaaatgaaaaaaatgaaaaatgcaaagcaataaagaattaattgcataatttaagagcagctggagctcaaggaagagatcaacagaagagtaggcataaaatgcttcatggatgaggtgaatcatggatatctcatatttacatagaaaggtggtagaggaggtatggggaaagaaaataacacgtatggaagaaaccatgaacactgcacttgataccagtccaaaaagaacaatgaactaatatgtcagtcattactactgcaacaatttaataatctatttgaagaaaaggcttaaatagtcttccagagagaagctttgggtttttttgcatatatttttgttatagtgtcaatattcactaaagtttccattgcctaaacatgttggaagagactaactccctttagatgagccaaagaaagaaagcttgtgtgtcttgttaactgctgtactcacaaaatctagaacagtgcctccctgcacatgttatgttcacattaattatctgttgaataaatgaattaatatataaatatatagaatttgtgagtaacatcacagtttttaaatctgagaacatttaagctttttccaaatgttaatcattgataaatatcacagtaattttatttaactagaaactaaagaatagtgagagttaatgtttacccagcattccatagtgattcaatattagggacaagaatcttcacatttcctctcttccaaaagtaaaagttttcattatgttaccttcaacaaatgataagaacactagactgttttcaaaattactgagtttgaatcccaccaagtttactacttcccagccctatgctgttgggtaagttacttaacttctgtaaatctcagtttgctcatcatagattgaaattgtagaatgaaaataacctttttgcttcctatacagcagaggttattgagatccaaatgagataatttctatgggggaaccattaacatattgtagaaatgttacatgttttgaatcatttctttaatattaacaatgtttctggccaagatgcacctcatagataacaacataatgttaagcctgttattattatagcattaattatggaatgtacgtatttacctatagggtaagattcattcattcatataaagatctaaggagaaatcctcaggtagaaagaagttattcatatttaggaaagaatgtaggccattgtgctcaatagtgaatgagaaggaacatagtgctggagggtctcatatgtcgtttaggttcttagatcatttacatatcatttagggtcttataggccatgacaagtagggtggatttattggtaaatatatatatcattatgtttatttgaaatgtagtacttttcaactgaggatggcagtgttatcttactttttaattggaagagaaatcaagataagagaacttataggtatgtacacaactggattatgagagatgagcagttatatatatgctctgtggtatcctgcacattttttaggctaagtaaaaacagtaatggttatgatattactgtgtcttaccttaaatttattttagagtcatctgatctattctaaattttgtttggccatgaattatattttatttagtcttgtgtaggacaggatttttctttgttaaaatttttttttaccgaagtattatagtatataattatggggataagcaacagtttcttaccccgtcccttcccactcatagttgagtagcttagccaaaaaccgctgttaattttttaaaccattacttctggaaattggtgccatatttctaaataatatgatttttaccactagtttttgatttgtcaatttgagacattctttttatttacttctctatgggtaagaatttcactgatttaaagaacggactctatgcctatcttcctgatatatttaatcattttaaattcttcttttggttatcattttaactttaagcaacaaattcaccttttttcttattttatcacttataaacatctttgcatctatgctttgtagagggcagtatcagtgcctgctagatactttgacaagttggctagaacagcgttgttcagatggagcatagaacatcgagattacttttcttcaccatggcaattgagtactgatctttgtcttccatctcttaagtacatttacttctgaactatgtatgctatataattcatatctgtgatagtagtgggtgacttgatagatattatctggctatgtgtacttccatgttagcaagtgatttatgtgtcaaagtttctacccagtgggaattaggtcagtttaattttgttgttgttgatgttttttccttcttcttcttctcttttttttttgttttttaagaagacgaattctctctgtgttgcctgagctggaatggagtgcagtggctattcaaaggtgtgattatagcacacaggggcttcaaattcctggcctcaagccatcctcccacctcagcttcctgagttgctaggactacaggctcacaccactgtaccactgtgcctggctaattttcttggtattttatctggcatagctccacatataataaggtcattataaaaattcttttttagatatttatccataaacattcaaacagatttattcaattaatgacagaatcaaatgcctagtagaccaaggtaacccaaagagttataacatattgtgattccccaagattttcattgttttctgcaaaagaaatgtcagcattctgggaattttaaacttaactctttgagactttgtgaagttttaaaaacattttggttatttatactttatgctgtatagcccttgagacagtcaatgtcacttgagacaatcacttgaaagtgatggagcaaatttaataagtctttcataattatatattttccagaggactgtgaattctggcactcagtcttgtagaacacttaaacacctcttgtagatatgtgatggttagatttccaatgttaaattattggcaactggaattggaaagaaatatggcgccatcaaagctttatatcataaaagagattagtgttagactaaagtaattttgcaaattagaatattgatttgaaattagaattatgaaatatagtaggagacaaacataaagcattatggttagagagggaaaatagcataaagtccagaggatgagtaactgactatgtataaagttagaggccgggttcagtggctcacacttgtaatcccagcactttgggaggccaaggtgggtggatcatttgaggtcaggagtttgagaccagcttcgccaacatggtgagaccctgtctctcctacaaaaattggccgggcctggttgcgcaagcctgtaatcccatctactcaggaggctgaggtaggagaattgcttgaacccagaaggtagaggttgcagtgagctgagatcgcaccactgcactgcagcctgggtgacagagtgagacaccctccccaccccctcacgcccccaaaaatgttagaaactcccttaatagtaaagtattggcattagctcacaatataatgtggttaaagcaaacaaaatacattgtgacataaatatgaataaaaaatgtaggaaactcgagattatttttccattgtccttctcacttggtcagacccttacatgagctttgtttctagttctctgtgctaccgctaaagaaggacgtggaaaagttggagaaagttcggaagaggaccacaaagataattaaagggttgaaaaagaaacctaaaagaaaaaaattaaagtagcagggattattgttccagagaaaagaagacttagaggtatttaacttatgcctgaaggatggaggccagatgttctcaatcttcactgaaggtcagacaaaaaagaaatcaacttaacctgcagcatgaaggatttaagttaaatatgaggaaaattttacactgagaatgttagaataggctactatagaacgtgtgacatcctttacaacactatagatacttactgacaacatcaaagagctcaaagggcattcatctgatgcacttatcattctagtagctcattagtaaacacgtattttagcatttttgaattctgagtgaagaaaattaacagctgatctggacattctgacttatgatcagttccatggaaaatgtggttgatttcatagaagtaatgtaattaaagttacaatgaattctgtttataagacactgtagtgtgctgctccattaaatcagaaggatagacaatctgacctctgaaagtctttttttttttttttgagacagtctcactctgttgcacagctggagtgtagtggcacgatctcggctcactgcaacctccgcctcttgggttcaagcaattctcttgtctcagcctcccaagtagctgggattacaggtgcccaccaccatttctagctaatttttgtatttttagtggagatggggtttcaccatattggccaggctggtctcgaactcctgacctcagctgatccacccacctcggcctcccaaagtgctgggattacaagtgtgagccaccatgcctggcctcaaagtcttttttaagcccactttcttttaactacacaaaactttaaaaggcaaaggacagctgtttcttatcagttggtttgatgataaataccagtaaaaaagcgaaatgattacattgaaatttaaatatattttaattctagattttaatttttatatacatatttaaaaattttaaagtgctgtggtgattttttttatagagtagctctttcatctgcatttttattatgaagtccagttttcaaaattagtgttgttgaataatttgccagactgtaaataaaaattctttaactttgcaaaccaacttccaaggtactgcctagcagaattagactattggctgcttgaagctagacttaaaagaccctactaacaatagaaattttttctttttattgagcaatgtgtaacatgtatattatgctttttcttccttgacttaaatagcttctttggttttgaggtttttgaggaagacaaaataagctgtgtactttattttaaggcaaagagctgttgtggtctaccatgttctgtaaaactaaaataatactgtagtaaaaatttggaaagaaaaaattttagatgtagtaaagtgtataaaccgtcttcatattacaagtaacattaaatggactgatcaattttttattgttcataaagcattttcattatatgctggtatcaagtatagtttttaattcctttttaaatttattttttgtatttaaaaaatttattgtttttattgtatattgacaagttataaaatttttttaatgggcaataattgtatatatttatggcgtacaatgttatgttctgatatatgtatatattcattactggatgattaaattaagctaattaatataattatcaccccacatacttttatttgtggtacaaacatttaaaaatctacttccttagtaatttttaaatatacattacattcttaactatagtctccatgctgtgcaatagatctcaaaaacttattcctcctaagtgaaaccttgtatgctataatcaatatctccccattcccttctctcccatccctagcctgtggtaaccaccattcaattctctacttctatgagttgagatattttggatcccatatatgagaccatacagtatttgtccctctgtgcctggcttatttcacttaccataatgtcctacaggttcatctatgttgtcttaaataacaggatttccttctcttttaaggctgaatagtatttcattgtgtatatattaacacattttcattatccattcgttgtagatagacagagattgatttcatgtcttagctactgtgaattaccccacaatgaacatgggagtgcagatagctccttgacatactgactttggatatgtactcataaatgggatagctggatcctatggtagttataattttaaaatttggagggtcctccacactgttttccataatactaatttatattctcactaacagtgtagcagggctccctttctctacatcttctgtaacacttgttatcttttgtctttttgatgatagtcattctaacaagtatgagatgatttctcattgtggttttaatttgcatttccctgatgattactgatgttgaacattctttcatatgtttcttggccatttatatgccttcttttgagaaatgtctgttcatgtcatttgcccactttttgttctatggatcagaagattctttgtacatttttaatagggtgattagttttcttgccattgagttgtttatatattttggacattaacccctgatgagatgtacggtttaaaatattttctcctaatctataggttgtcttatcactgttaaatttcctttgctgtgcagaagctttttcatttgatataatcccgtttgtctgtttttgcttttttaatctgtgcttttgaagtcatatccagaaaatcattgcccagatcaatgttgtggagcttttctcctatgttttttttctagtagtcttatggttgcaggtcttatgtttaagcctttaatcctttttgagttgatttttgtatacggtgtgagttgagggtccaatctcattcttcagcatgtggctatcaagttttcccagcactgtttactgaagaaactgtgttttctccattactcgttcttggcacctttatcaaagatcaattgagtataaagcacagatttatttctgggctctctgttctgttccattgggctatgtatctgtttttcgaaatgtggtagttcaattcctccagctttgttctttttgttgaaggttgctgtggctatttgaggtcttctatggttccatatgaattttaggaattttttttttctatttctgtgaaaaatgtcgttggaaatttgatagggattatatagaatctgtagattgctttggaaagtgcggacactctctgccaatattgatttttctgatccatgaacatgggctatctttccatttatttatgtcttctttaatttttttaatcaatgtcgtatagttttcagtgcacagatctttcacctttttggctaaatgtattcctaaggtttttttttttaatggtattgtaaatgggattattttcttgatttcttttttgggtagttcattgttagtgtatagaaatgctactagtctttttacattgattttgtattccgtatttaccgaatttatgttattagttctaacagttttttagtagagtctatttctgtatttactgaatttatgtattagttccaacagttttttagagttttctatatgttagatcatattaccagaaagcagagacgattttatgtctttctttcaaatgtttgtgtcttttatttttttcttgttctttttcctttttttctttcttttttgcctaattgctctgcctaggacttccagtactatgttgactagaagtggtaagagtgggcatcattgtcctgttctaatcttagagacaaaaactttcacctattttttattcagtatgatgttagctgtgggtttgtcatataggatctttactgtgttgagatacatttcttttatacctaatttgttgagaatttttaccatgaaagattattcagttttgtcaaatgctttttctttacccattgagatgatcatatgatttttgtccttcattttgttaatgtgatgtatcacatattgatatctatgttgaaccatcctgcatctccagaatgaatcccatttgatcatgatgaatgattcctttaaggtgctgttgaatttggttttctgttgaggaattttgcatctatatcaatgagtgttatttgcctgtaattttcttttcttgtaatgttcttgtctggctttgatatcatgataatgctagcttcataaaatgaatttggaagtagtccctcttcttcaatcttttggaaaactttgagaaggattggtataaattcttttttagataagtcaaaattggatgcagcagaagatttcataaaggtaaatttaagctagattattaggggttttgaacttcaggctaacgtgtttagattttggggacaattgagtttttgagtgccagaatggcatgagcacaactgtgctttctttaggaataataagctatgtactgtataagatagatttgaataaaagatatttgcattaatcctaacacagttaaaggtataaattagggatttgtaaatagggtcagaactgaaaggacaaatacagctacactgagaaagatttttcattcgtatgaaagaagaaaggaaagggaagactcaaaagtgacttcaaagtgaccaaagttcagtctaataaattgtactccaatggtgtaaaagaatgaaaacactttcttattctggtaacgtataatcaaacctttcctgattatagaaaagtttctaaattttctaagttgagagattatgtcagtcttatgtgctttttctttccctgatacctggtaagctctggtatttgttgaaaaagtggtttaatttttttgattcactaatcatgaaagaatatcttattaggtgaatttttatgtgaatcaaacatattccattatctatttaccaaggcaatactatattaaatataccttttaaattgttttgattcccttacaaacatacagcaacttcatgatctgtattttgatacttcaaaaataatttttttcttattttttcttatcttttgtggtttcttacacattttagggttttcgttttctgtgaattgggaaatggaaatagggagtggaaattggaaggttattagattactggaaattaaggatattgagaatggatttgtgtaatcctaagctgatataatctttctagagggctttaactctataaacattataaacacttactatgctccaggaatttttttagatgctgggatacaatcgagagcaacagagaccactccctaatctcagagaatttgagtctagtgtagaaaaacgcatatgtaaaaattaccagtttgatgagagatatgtaagaaaaatttaaggagctaaattttattaggggaatctcagttaggaaacatttccttcaggaaatccattgaaaagaatccgaagaattagtaggaataacctagccgaagaaagtttagtcagtagaaaagtgagccagatagcatgaatagcatagtcagatgacataaaatagaacaaagcatttttgtttgggaaacgaaaataagacgaatatgtcttgagactgaaaagagaggacagagtggacataaggcaacagaattggataggagtcagatcatgacaatataaatgataatccttaaatatgtttcactccttggaatttataatggaaaaatcagacaaatatataaaaatatagtgatgttcattgtgattaattttgtatcagtgaaaacttggaaacaaaaattttcaacaatagagaattcttcaattacacttttctacatccatacggtaaaatatgataaagccattaaaatgatatccatatatctttcctgacttagaaagattttcaaaatatgttggtaactaaaaatcaggatgcaaatgatgtaatatcccatttttgtggatgtatagaaatatagtaataacttatttattgtaaataaatatgtaacataatttagtgacagaacaatgaaagagaaagttattttgttatccaggagaaggaaaagggttggaatagtaatgaagaaaggcccagaggacagatgttataatctgttgaattggggttattgatgatggcaaagaagtgaaaactctctattcataggcttttgtaactgagctcttgttagctaaatcaatattttaaaatggtgtggggacagttttgccagggcaaaagacatttctggctatctctatgctttccaataaaaaataccctatattagaatgaatgtaaaactcaaattatgatgtgactagccagggagatattttacaaatggtaaatctttaattcatgctatcagcaaaagcatgacgattagtgatgttgagcattttaaaaatgtatgtgttggccattcgaatgtctttttttgagaaatgtctgttcagattatttgcccattccttaaatggattgtttgtacttttgctgttgagatgttttaattccttatatattctaggtatgatgttaatctcctgtcagatgagcagtttgcaaatattttctcccattgtgtaggttggcattgtattctgttgattgcttattttgctctgcagaagctttttagtttcatatagttccatttgtttatttttgcttttgtggcctgtgcttttgaggttttatttataaaagttcttttctcagaccaatgtcctgaagcatttcccctacgttttcttctagtagttttaatgtttcagatattacatttaggtctttgatcaattttgaattgagttttgtatagagtgagaagtgggggtctggtttcattcttttgcatatggttatctggtttccccagcaccatttattgaagatactgtcctttgcccaatgagtgttcttggcacctttgtcaaaaatcaattggccgtatatacgtggattaattttgtgttctctgttctgttctattggtctatacatctgtttttaatgccagtaccatgttgttttggttactgcagcttcgtaatgtattttgagttctggtagtatggtgcctccatctttgttctttttgcttatgattgccgtgtctattcggggtcttttgtggtttcttacacattttagggtttttgttttctgtgaagaatgttgttggtattttttaaggaattacattaaatccgtacattgatttgggtagtatggtcattttaacagtattaattcttctgattcataaccatgggatatctttccattggtttgtgtcctcttcagtttctttcatcagtgttttgtagttgtccttgtagaggtttttcacctcctcggttaaatttattcccaagtattttactttatttgtagctattgtaaatgggattgtcttctggatttttttcaactagttcatttatgtatagaaatgctactgatttttgtacattaattttgtattctgtaactttactgaatttgtatatcagatctaagaggttttttgatagagtctttaagttttctatatataagattatgtcatctgcaaacagggacaagttgacatcctctttccaatttggatgctcttcaactttccctttcttgctttattgttctggctaggacttctagtactatgttgagcaagagtggtgagaatatgcatgcttgtcttgtttcagattttagaggaaaagcttcttttctctgttaaatatgattttggctgtgggtttgtcacatagggcctttattatgttgaggtactttccttctgttatggtttagctgtgtccccacccaaatctcatcttgaattttagctcccacaattcccacatgttgtgggagggacccggtgggaggtaactgaatcatgggggtgggtctttcccatgctattctcatgatagtgaataagtctcatgagatctaatggtttcataaaggggagtttccctacacaagccttcttctcttgtctgccaccatgtgagacatgcctttcaccttccaccatgattgtgaggcctccccagccacatggaactgtgagtccattaaacctctttttttttgtaaattgcccagtctagggtatgtctgtgtcagcagtgtgaaaatggactaatacaccttctatacctaatttattaagagtttttatcattaaacaatattgaattttatcaaatgctttttctgcatctattgagatgattatgtgggttttgtccttcattctattcatgtgatatatgacatttattgatttgcatatgttgaactatccttgcattcctgtgataaatctcatttgatcatggtgtattatctttttgatgtgctgttgtatttggtttgccactattttattgaagatttttgtgtctacatttatcagggatattggcctggagttttcttttcttcttgtctccttgtctggtagtatcagagttatggtggcctcatagaatgagttaggaaagatttctctctgcttcacttttttggagtagtttgagaagaattggtacttacccttcttagaagatttgttagaaatcagtggtgaagtcacctggtcttggacttttctttcttagaagtctttttattattgattcagtctcttataattggtctgttcaggttttctatttctttttggtcaaccttagtaagttgcatgtgtccaggaatttatccatttcttctaggttttcacatttattggaatatagttgttcatagtagtctctaatgaccctttatgtttctgtggtgtctgttgtggcatcacttttttttatttctgagatattattcatttgagtcgtctctcttttcttcttagtctagcaaatggcttgtcagttttcgttatcttttcaaaaaaccacctttttgttttatcgatctttcatattttttagtttcattttcatttattgttgctctgattttgttatttcttctacaaatttggggtttgggtttttcttatttttctagtttcttgagatgcattgttaagttgtttatttgaaatcattttagttttttgatttatgcatttattgctataagctttcctcttatattgcttttgctatgtcctataggttttggtatgttgtgtttctatttttatttgtttcaagaaattttaaaattttattcttaatttattccttcatccatttgttattcaggagcatgttgtttaatttcatacgtttgtatagttttgagtgttcttcttgaacatctgatgtttccttgttgattttctgtctagatgatctgtccaatgctgagagtgacatattattgcagcctatctctctctttagatctgataatatttgctctatgtatctgggtgttcctgtgtagggtttatatatatttacaattgttatattctcttgccgaattgatccctttattattttttaaataatactttgtctctttttacagcttttaatttcaagtttgttttatctgatataaatagaggtatacctgctctcttttggtttcggtttgcatggaatacctgtttttatctctttacaggtgaagtgtgtttcttgcagacaatttatattgggtccttttttttttaaatctatttagccagtttatatcttttcaatggggaatttaatccatttacattcaaggttactattaatagataagaatttattcctgtaattttatcgatcattttccagttatttggtttatcatttgctccttccttcctctcttattgtttacttttaccattgggtggttttctgtaatgctgaggtttgattcctttgtctttattctttgtgtatttgcttgaccagtgagttttataattctacatgttttcatgatgatggttattattttttgatttccagatgtgagatttccctgagcatgtcttgtaaggccaggctagtgttacgaaagttccttaggttttgcttgtctgtgaaataatatatttttttaaatttctgaaggatagctttgctgggtatactattctttggtggcatattttttttttctttcagtgctttaaatacaccttctcattctctcctggcctataagatttctgctgagaaattagctgttagtctaatggtgatttgtttatatatgacttgacacttttctctcattgcttttaaaattctttgctttgacttttgacaatttgactatgtgtgccttggagaggacttgtttggagtaaatccatttagagttattcgagctttctggactctctcctaagactttggaagtccatctctttcccaagtctttggaagttttctgttattatttcataaaatatggtttcctcacttttttccttcttttctccttctggaagctcataatacaaacttttgttaacttattagtgttccataaatcctataggctttcttcattcttttttgttcctttttctttctttactttttctgcctgtgttatttcaaaatacttgtctttctgtttggaagttctttcttctgcctgatctagtctgttgttgaaactcttgattgtatttatttccttcatttaattcttctattctagtatttctcttttcttctattttttatttcatatttatctctattgaatttctcattcaaatcgttaattgttctgatttcattaaattgtctatctatattatatctcactttccttaagattatttttttgaattctttttctggcatttcatatatttccttatgatttggtttctgttactgaagaattattgtttttctttgtgggttgcattttttttttttttgctttttttatgattgacatgttcccatattgatttctgtgcaactggtagaaaagctacctcttctaattttatggagtaggtttcatagggaaagattaatccatataaataggtcttggggtgtcagtttggtggggtctgttagccttggttctagatagacacagtagtattgtctgtgtatagtttcttcagctgtaattcacattagtggtgtttgtgaatttctcagtgaccttggctgagagagtttgttttgatggtggcatagctttgccggggtgggcttgctgggctatttctcaggtcagaaatgtatgcacatggtgggttggctagcttgcagtctgactcactaggtttagggccatcgtgctattactctgattggaaacacaggcatgcagttacttagacagcctgggggtgtgcctgccaagagtggcttggagggctatttctcaggtccaggacatgagtgcacagctgcttggctggcatggggatgtgtctgccagggttggcccacagggctatttctcaggcctgtaatgcaggcataaggatgttcagctggcttggtggcaagtctgctgggggcaggctgtttatcttgcctaggacacagctgcacagctccttggttagcctagggcgtgtttgccagtggtggcccacacggctgtttcttaggcctgggatgtggtcacatgacttcttggctggcctgggtgggtgtctgctgcaggtggcccatggggctatattcctggctctgggctcaggcacacagctgcttggctggctgggagggtgtgtctttcaggggcagcccatggggctgcttctcaggcttgggattcagacaaaaggctgcttggctgccctgggggcatgtctgctggtggtggaaggtaacgctatattttggagatcttaaaatgcaacttaatcatgtgttttggtcagtttcttctgatagccatgcctaggcaaaagtgactagaagattaaagagttgaaagtatccatacccaaaaagtataccaacgttacagtctcaaccaaattctctagttttgatcttgctcaattgtccaacgtcattatgaatttagggtaaaagaatggcaacatatgcattcatctactcactcaaaagtggaaccctgatttccctaaagtactgggctttatgtagattccctatgaccaactttcttaattctttttcatctgaagccgttattacactttcacgaaaagaaaaccaaaaaagtaccatagggataaggtgctatttttctatccaaattcagaataaagaacattttccaattttatttcagcttttcttttaattcttagcattccagtgtacttcttagcctagtctgaagttaggatcacaggcctaagtttgggggcttctgccacctgtgggttggtaaggatttagtagtgactgatttttgtaaagggtgttgagagtaagcaattagaattccttttcctcaatctcttctttcttcaatttgtactgctgcaataaaagtcctaaaagtataccaattatatatttgggataaagcgagactccttgcattatttttctttgtaatttttcctgaagtggcttggatctggaggaaaataaggtaaacccacagtatggcagagaagagttgatgggatgtagagtgaatatgatgcaaagtaaaaatgagaaagttaggtaaaagaaagaaagagggtgtgaagttagtgaagattattattatagcataaaatttaaaaatgatatttaaatataagatgggagacgactgagagttatatcgaggaactgaaataagctggttcatatttggcctactttaagagacattggcttaagtgtagtagagcttgaattaaatgatttctcaagatttttacatttgtaagaaatatggggctgacagcacagagaatagtttgtgggaaaggaaagaatcaggaatttatacatgaagaagaaggaaaataggaataagagaatgaatagagtaagaaatatcccacaaaaaagaaattgaaaaaggtaaaatatgagataatagtaagtttataaaatatgtaaataataaactaaaagcaattttgagttttaaaaaatgtctcaaatgattaccttgcacttctgctgaacattttgttatgtgcaggtaacatgatattgagtgagtatacacaaagtatggaaaaatattcatattcatcaattctatatttgaatggaaattaagtatagtgaagtttaccttcaatagaaactttaatgtttcagatttattattcccaatttatagtataaatacaacttgattctatattatataattcatggataagatggtgtactttttaatccatgactgaagtctttcttctgcccacagtctgtttctgctattccatgatacatattcagggaaggcaattataagaatggcctaaagaagataaatctattagaagtaggtatcatggtagatatagccacatataaatttttttttattaccttgtcatgccttccatttatcaatctggaatttttattgttgcaaactgagctaagctagtatgttcaggcaaaaccttaggatttggtggataaaggttatcagttataatgaagggaagttttagatcaaattccattataaatataaatatctgtaaaataagcaggaaggcacaaatatcatattccttattttataagcttgatgacattccaactctgttatttaggtgctctgacaatactttgcatgaagagtgccctcaatttgtatatgaaaatattatggggacagaatttattacccttatatttgttatcaggaaccctaatactccaaaccattgagtggacatacaggacaaatctcagatgtgttacctaagtatacatcctgcaaagcttgtggggtttttgtatgggttcatgcaaagtggggcagtgcttctgaaatattttggccaatctacagatctggagcaccactaattttttccttcaatgcaatgaaaaacacatttttaacattcattagacattcattggctaattatcaagtttctcttgtgtttatcatcagagacaggcatagctgaaagagtttctgattaaagttggttgtacagaaatgtatatatgtatgtatattctccctactctcccacctctcccttagatacccactgttatccttccagatttatatctatatataaactcaatctgtatatatactcatggtttgaaaaaatccttctctactatacaaactattttctaagttggttttgtctataagaaaaacaaatctggtttagcattcaatgtttcagcctctctgaaattctcatcgttcttcagatatgccatactctttctagactttgttcctttgaatactctattcttttcttggaatgcttttacttttctttttttttaatctggcttaatctttaaaacctgtttcagatgtatgtcctatatgaatctgtttcctagttttctatgtgtattcactgttttgtctgtatttctatattttgtttttaagtaggttatggcaataatcatcatgatagtagttaacaaatactgattgcataatgtaactctaactatttttacatttattttatttaatcttttttcaacatttttctgtaatatatcacttgtgttttatttccccaaatagaccaaaagtaacttatttatctttctattcctagtatatggcactatacctgggcatatgataaatgttcagcaaactggtagaccagttttaggaagggcactgtggaacttggaggtttagaaatagattctattgaaacatctgtatctgcattaccatgaaaagtcttcctttacgttttcttgaagactgctagaaaaggttgtggctatgtaacaataggcataacacactatgttgcaagataaattgactgtgacaccaagaatatactttatggtgcttcgatgagtacactggtaccctctctatatcttacattcgagggtgttccaagcattgcagtcccatggcttaccaattacaaaagaagaaatagagaggatgaatatgtgaatggtcagaagagaagtttatgcaagaggaaaagaaaatccctttcctcaaatgtaaaatgagcaggatgaagagtttgaaattctaaagatagacagagggtatctccagaaattttaatgagttcaacaacccagtgatatggctggttataatatacaatttagtctggtgattgataagtaagaatgggattatttgctaaccctctcccctactaatattgactaatcgttatttatatataataaaagagaactcttacaacttgaatttccctgtagtttgtgaagctttactttttaactgaaatcttttcgcttctagcataaaacagaggcaaataaaaatttttagccttttacatttattttttactctcactttagaaactttaaatacttttggttttaaaaatgtttacaaggatatactgaaaatgcttaaaataaatgtttatatcaatattgacaggattcgaaatgtaatatttttaaaatatgcaacattatggactcaatattttgtattgagttataatgcagcatggtatagaataaatctgatcaacattagggaaggtttctattgacagattcatttagcctgttgtaaaatcacttaaaaatatttgtattttagccatgctaatttgctggtatacaactaggagaaatatgtaatataaattttattcccattgttgtattacaatatctttttttctttaacaagaacctgtgctagagttaaagcaactccaaatagtgcctatagctcagaagtataaaatgcagtctgtgtctgtaacaaaacctattcccacaggttcaaaggagattggaaataagaagccacctatttgcgttttgcagaagtagtaacagtctgcagacaaggtactctagcttcaaaacagtatggcagatcgttttatggaacttgcgattacaaaaatccactttaacctttctttcttactggcaggtgttctattggcttgcagccagaggctgtgagtgtagtgctgcctgtggtgtccctcagcactgtagagtgctgaaaatgccgacactccagttgattgctcataattgcattaattgtggtctgacaacttcaggagagaagtatgatgaatatagaaaaatatgttacaaatctgatcagattacaaatttcatctctgttttctccatagatatgatatctgcacttataaaaataagccctgtggaacactgggtaagttttttttggtttttttttttttttttttttttttttttaataaaggtagaatggttctgattgtctttttggaccaatgactttaatctttattattaatttggtcattttcctttctgtacatctgaaatcctaaaacctgttacacccagcctttgtggatatgtcatttactaggaaacaaatatttattaccatcataaatattatataaatttcattggcttttttgacaactggaatgattattaaaattaacttagaatatgattcaaattcattaaagaattataaatcgaggttatcactcatgttcatataatctatctctgtaatgtattttctagaaataccaagattgtgagagtaaatgaaagcagtcaacatcttgaaatttcaggctagaaaaggaaagaaaaaaaaaacacaactaaggatacttaatgaagaggcaccaagaacaatactttttttggtacaattttgtggaaaaagtatagccccataaattaagatagtattggaaattttatactacccaaacaacaacaacaaaaaataatcttataaaatattatagccacaggtgaaaagagaggacaggattatctttcttgtgctccctaagggtcatttgtctttttaaaagcatttttgtagtattctagaattttaaaaattacacattgttacagagcataatttcatagttaactgcaaatacaaatgggcaaaaaaggtagctctccagtagtctaaattattaagcaactaaagttattttaaaggacagaagctttttttctcaattttttaaggtcatagagactttttacagactcagaaggtaaacaactgaagatgaattctctagtttctctatgacaagtctcaattttcttatctgtaaaacaatagttatgaaattgattcctatgcacctcacaagcattttgcaaagatcaaattaaagtagttgtaggaggaaaagtgttatgcaactgcctgggaagttcagtgaaatatctcttcggaaactaaaatttctcttgataattttacctgacttcccaggcttctcctacccatttcccttaggatttatggctgaagaagaaatctcaaatagccaatgctgagtattaactatggagaagcttgctagttaaaaagcataatggagacagagctctctttgctgagcgagctcacatcaaaaagatttactttgtagtgttttaagctaacaagaccaacataatccaacagaggggactctgaactgggaactaacaactggctttgacagtttcagtacattaacttttacagtgtatttaagctctttgttcctcaattttgttatctatgatgtaggagtaatatctgcccttatgctacatggacatggttaaaatcatttaaggaaaaaaatgtagatgtatttagtaaagaggtttataaaaatgaactggtattatttaatgtagaaattgcctattcttttaaacttaccccccatatttactgttcacagattctctaagtatttattaagtgttcagtcaattttagatataatagacactagacctcaaatcaggtgcacatattagccagagctagtatttttctagtgtatctatatttgaagaaatgtgtatatacacacatacacacatttgcacatatacactctctctctctctctctctctctctctatatatatatatatatatatatataccctcactgtctctccctatatatatattctgctttttgaaggtaggttatttacatatgctcttcattgtattagattggtgcaaattactttgcaccaacctaatgacattggtaagacacacatacagtgaattttacttttattttgataaataaagtattttgagaaataaagtattttgagtactgcctagtactttgattgtcattattggcaaagatttgaggtgttttcctatgctacttctcattttatttttctcaaaataatgtgttctaactttgatagtttattaatttatagaatcagtacattaataggtatgtgtcaatgcactttcaagctcaatataagttatttttcaaattataaacttgtatattgtttttatactacttcttgtgaaaactgaatgagctgcatatatatgtatatatacacacacacgttttaacttcatctatggaaaatatattatcagtacagaattgagcagattactttttaagttgtattctagtcactttcatattggtttttatactgatttttccatagtcttttgcttaataattctgatgaccaattgtaacatggctaagtaggcttaagggtgcaaactgtggccatcaagctgaggaaacctaaatgaccgaaatagttatcaaatcgccattaacacaatcacacataagaattttgacagtctcaattttataggtatacagaaaattgtggggggttgtgaaaatacattagcatttaaaatactttcattttagttaagatttagctttatatttcaataagtaggaattttccaagtatattctttctgaagttgttgttctagcagagataataattttatataagatggcagaagtaaatctgtgcttgtaaatacaccttgaggagtcattgagaattctcaattgaaaatacagccacatggcacataccaaaaaacgacacaacaacaacaaaacccaaaagctaacccatggaataatagattttgggaaatgtaagaaacattaatttaacaataattattcttagtaattctgcttttcttttgaaaaaacatacatttcataaaggccaaaacagaaacagtattcagagtggctttgttcttcccatataataggccacattgaaccaaataacttaaagccagataatataatgcaatttttaaaaaaatatttcaggtattttcctattctacttctcattttatttttctcaaaataaaagtaaaattcactgtgtgtgtctgtctctttctctcagtggagattggaaatgacattcattaaaatattttaaatatttaaacaaatattaaatattaaccaaaaattaactgaaacaaaaaaataagttatcctgctccactttttacattctctttttcaggtcccaatacctctaatgaatggaagggcagcccaggggtatcaccagtatttataactctgtgaggcagaaatcaactccctccccaactcttgcctgtctcgcataaaacagtaggaaaagcaaacgatctattagcaaatccagcattaatctcatctctgttccaatgtagctgttgatactcatattagaaaatacagagaaacacaacttctagagctttcttgtcagtaaaaatatggattgaataccatttattgtttctaattagtacagctgggaaattatacctagcacagaacattgcttactgtattcaataaatattcattgaattgaatcgaaatcacttttggtgggaaagtaattattaatgtttgggtgatgatagtagactactgaccataaaaaatgtttttcctacttccccttcaacttctaaataactttttgtttctatgtgcatgaaatatgatttggcatctgtttccttataagagatgacatttttgcttttgcacaaaaattctttttttaagcactgctttaaagttctgtagtatttcacacagcatgatattcatttgaaagtaaatattaaaacttctacatactaaaatccccaaggggagaataccttgagtaacataacatttcactggaatcagcgaattaacaccatagtatttgctttattagtaaaactctaatgcattgaagtaagggataggagagaggaaaaacgacactgaatgtgtgaatgactttcctcctattaaaatactaaaagaaattgttgcatcactgtcaggattaatttgagattaaaaaaaatgcaaaaacctcccatctttaacagttctcctttccatcttttgaatcattcattttattttttaataaaaatatcacttaaaaaataatttgggattccccctttttttggtaactagaaagttgcttgtatatttttatgaacccactaaacttaaacagatctctttagaaaaataatgtggatatattttgctttctacagcctgaagaatgttaaaatagaaatgctttcttgaattccctcttctggctcaagttactaggtggtcccaagttaccagaagtaaaatttataaatctaacccctagtctagacattttccagcactgactgcagttcaaaaaatattaatgtctagccggcaaagtgaaattccccccagtgattttgcaaatgactagaaagttaaccttttgccaacggctccttctgtgcatggaggttattaaaaagaatccaggcatttataaatataggcttttaaagactgaaacaccttggcttgaccctttgtgtctctttctgtttattcaggcttggcctctgtggctggaatgtgtgagcctgaaaggagctgcagcattaatgaagacattggcctgggttcagcttttaccattgcacatgagattggtcacaagtgagtgagtttaagaaaatcaaaataaattttagaactctgctcttgagcaacttgtaactactgtatggaaaggctgtgctgaaccttattttactacctttttgtctgattccaatagatgatgttattattgtgggtattgggataaatcacctgaagaactggagacttgttagataatctttgttattcaaagagtagtatcctcagtggtgaatgcaccacatttaagtttttgttcagtctcctcaatacctgtttccttataaagtccagttatttaaatgatctttattttcctcaagtgacaatgcatatatattttaaaatcattgacgtcactaccataaaatgtatttttagttttcactcttcatacagctgtcagcatcccttttccaggcataaagtttgtgcagacattgctatgtaacttgtattttcaggtgcatttgtatgtcattgataaagaaaaaaaaaactgcaagaagtacacaataccatcctcctttctttctaggaggacctgaaggttttaatgtttgttttaagtgaacctgtgccaaaggaaaaactatcttatgtaccctgcccccacccatgcaaaaaataccatttttaaaattttaaacaacaggcagtagtaatatgaaagcctattcatgtggaggaagagaagcttgataatactttttttttaaaatttcaacatttgtgttgaaatttgactgaaagatgacttgcctcaattagtcaatttctaagctgattctgatgcttttataaaggtaaaaactaaacaaacgagcttccaatttactaacaggattttttttttttagcaggaaagctcttctaaaacagaaacagttgacgtttagcaaatgactaattatatctgctaacaaaaaatgagagaaaactttaaaatgttagtcaagcatttttagctaaaacaaccagcttacttgcaagaactcctgacatttgtagaatttaagttttatattctgctttttttggtggcgtcatagataggggaaaaagaacaaataaaaatcaatgttttttatatacttacctcagaggtaattcctgaggtaaatctgtagttcagcttttttgttgttgttgaagtggagagtaaaattgggtcagtcggctgcattatttcaaaattgcaatcaaattttatcaagttgatatgatttaggtgtaaatttaaataaacagcaagtttcaaacccggcttgattcagacacaggaaaagtcagtattacactcttaatgaagactttaaaatattggtattctactttccattgtaataaacatcaggtgaataaaaggaaaagcccccccttaaccaagcagtttatctttaattcacttaaaaatctggctaattaatgactgtcatactcttatgcaatcaaactgaatttattaggttctgttagattcagttaaattggaaggttaggaaaagtaacatacagtgggtgaacactgtgtatgtgaaaacactattatcttatgtagtcacaagttagtcaatgtcaacacacacatttcacattccattcttgtatgtacgtacttaaatagctgaggtaagggtttatctttctttgtatcttttataaagattctgattgggcaacttcccaggtttcctagattttgttgttgttgttggccttataggtaaatcctttcaattcttcctacaatgaatggcttgtaccttatgtagaaaaattgtgaaagagaaatagaatatacctctgaagttttatgtatcttggagtaactttgtttcacagttaactcttgtttgaaagtatgagtgttaaaaatggggaaaaaattccacaaaatccttggattgagagccagaaaaatgcttccatttaaaaatgttgtttgacagacaaaaaaaaaaataggtttttccccatgtccagtttatcaccatgtttctatcccccttccccagacaactgggcagatgtgtttagcatatatagtctgttttgtgttgctctaaaggaatacctaagtctgagtaactcattttaaaaagcggtttatttggctcacaggcatacaggctgtatgagaagcataatgccagcatctgcttctagtgagggactcaggaagcttccacttgtggtggaaggcaaagcaggagccagtgcaccacatggcaagagagggagcaagggagatgctgtgctcttttaaacaaccagctctcatgtgaactcatagagcaagaattcattcattctccccaggaaggcaccaagccaattatgagggatctgcccccattacccaaatacctcccaccaggccccacctccagtatttgggatcacatttcaatatgagatttagagggaacaaacatccaaactatatcaacatactatttttttcaatatgtcaaattattatttggtcaattagggaaaatttgtttcatatgtgaagatccctttactttcttttaagatcttagggtttagcctttagggacttagcggtcaactctggcacaattcatgtcatcattaaaatacagtgatctctattcttcctgaaccaaagcagtagccatagtaaatatatccaatatattttcaggtgaagtatactgattttttgtgacttgtatcctttatgagatggatgttaagtgacgtgatgatatcaggagattaattacagtgaagaatatttgaccataaactactgagaagagcccctactgagtaactagactgtgtgaatattttctccctttctttaaattgtgtagaatatggttttgcacccagtgtttacttgtgtagggatataatatctatttaaaatagctgtgagataacattttctttggctaagccttagtgaccacttttatttctctccatcctctccatccttttgtgaaaacaagaaatttatttccttgtcaaatgaaaaattgaggtttatactatatttaaatgacatgtctaggtttaatataggctataagccaaaggcacttaatgaaaccttataggaaagaatgttctttgaaagattttaaaaattaattatgtagttgccatgaattttataagttgaaaagattataatgtcaaagaggggtggcaagaattcagccagacatctagtatattgagaaagctatctagtgtatctaaactgtacaaaaacaaataatcttaacaaggggtcttaaaaatactcattttttggttatgaatgcatattgaagtatgtgagactgaagtgacatgatgtccaggattttcttttaaaagaaaggaaaaaaagaaagagaaaacaagaatagcaacatcttgaattttattatcttgatgatgtgtttatggcagttcattatgccactgtttctactattgtatatgtctgattttttccacaaaatgagttctaagatcatacattgtttaggtgtggcttaactcatttattaatcatgattgagtgaactttaactctaatattgagagaatttttaaagtattacaatttgtagtcagacactgtggctcatgcctgtaattccagcattttgagaggccaaggtggaggattgcttgagcccaggcattggagaccagcctgggtaacatggccaaactctgtccctacaaaaaatacagaaattagcaaggtgtggtggcatgcaccgtagtcccagctacttgagaggctgaggtgggaggatagctgagcccagaagatcaaggctgtagtgaaccatgatcgtgatcatgccaccgcactccattctgggtgacaggccaagaccctgtctaaaaaaaaaaaaaaaagctatattgaaagctatagggatatattggtcttgctttaggaagtaaatatcagtatcttgtctcaaccgtaggaattctctctgtagattagttaggagatgagttttaatgttagttttataaaatgaattaggaaatattttctagaatagtttgctttcccataagtacattttaaaacattatttagatgtaatttacatacattaaaaatgcacccattctgtatatggttcagtgagcgttggcaaaggtgtataaccatgtcccaccaccacaatcaagatatgaacatttctattacctgaaaaagtcccctttacagttaatttctaccctcctccccactcctccatccccagacaaccatggatctcctttttaccactatagattaggcttgcttttctatagtttcatttaagtggaattactcagtgggtactcttttgtgtctaggtatttccgctgagcataaggtttttggagagccatctgtgttgttgtgtctatcagtagttcactttttttctgaatagtaatccatatcacatatcacttttctggttgtttttagttttgtgctattatgaatagaactattatgcacatctgttcataactatttgtactgatgtaagctttcatttctcttggatgatacggttggtagcatggtgtttaatgaagttagtgatggtgagcatcttttcatgtgcttcatatacataactcatatatcttctttgaagtgtctgttcaaatccttttcccactttaaaaaactgggttgttcttttcttattgaactgtattatggataaaagtcttcatcatatttatgtgtatattatgtgtgtatatatacacatataaatatgataaagacttttatccattatatatataacatgtagcatatatatttatccgtaatatataacataaaacatatatagtttatatatgtgtatatatcatgatattttctcatctgttgcttcctgtttactttttaaattgttgccttatgaaaagcagaaacttaaaattttgatgaagtgtaacttaaaatttttcttctgtggtttgctttttgtgtcctaaaaaagctttgcatatttcaagattgtgaggatattttcctggagaagatttatacttctagcttttatatttagatctatgctccattttaatttttatgtatagtaggaggtataggttgaggttcatcttttttccatatgaatatccagtaacttcagcacaatttgctttaaaaagttggttggtttgcaaggacttcatgtctaaaacaccaaaagcaatggcaacaaaagccaaaattgacaattgggatataattaaactaaagagcttctgcacagcaaaagaaactaccatcagagtgaacaggcaacctacagaatgggagaaaatttttgcaacctactcatctgacaaaggtctaatatccagaatctacaatgaactcaaacaaatttacaagaaaaaaacaaacaaccccatcaaaaagtgggcaaaggatatgaacagacgcttctcaaaagaagacatttacgcagccaaaaaacacatgaaaaaatgctcatcatcactggccatcagagaaatgcaaatcaaaaccacaatgagataccatctcacaccagttagaatggtgatcattaaaaagtcaggaaacaacaggtgctgaagaagatgtggagaaataggaacacttttacactgttggtgggactgtaaactagttcaaccatcgtggaagttggtgtggcgattcctcaggaatctagaactagaaataccatttgacccagccatcccattactgggtatatacccaaaggattataaatcatgctgctataaagacacatgcacacgtatgtttatagcggcattattcacaatagcaaagacttggaaccaacccaaatgtccaacaatgatagactgaattaagaaaatgtggcacatatgcaccatggaatactatgcagccataaaaaatgatgatttcatgtcctttgtagggacatggatgaagctggaaaccatcatcctcagcaaactattggaaggacaaaaaaccaaacactgccatgttctcactcataggtgggaactgaacaatgagaacacatggacacaggaaggggaacatcacacactggtgactgttgtggggtggggggaggggggagggatagcattaggagatatacctaatgctaaatgacgagttaatgggtgcagcacaccaacatggcacatgtatacataggtaacaaacctgcatgttgtgcacatgtaccctaaaacttaaagtataataacaataaaattaaaaataaataaataaatgaaattggttggtttgtaattttcttttaatgcctttgtccagttttggtatcagaataaagtttgtcttataaaatgggttaagtcacaatcaacattatactgaatgggctaaagctagaagcattccccacaaaaactggcataagacaaaagtgccctctctcaccactcctgtttagcttagtattggaagttctggccagggcagtcaggcaagagaaagaaataaacggcattcgaataggaagagaggaagtcaaactatccctgtttgcagatgacatgatcctatatctagaaaaccccatcatcccagcccaaacatttcttaagctgataaacaacttcagcaaactctcaggataaaaaatcaatgtgtaaaagtcactagcattcctatagaccaacaatagttaagccaagagccaaatcaggaatgaactttcattcacaattgccacaaaatgaataaaatacctaggaatacagctaactagggaggtgaaagatctctacaaaaaaaaaaaaaaaaaactacataccactgctcaaagaaatcagagatgacacagacaaatgaaaaacattccatgatcatggataggaagaatcaataacaagaaaatgaccatgctgcatgtaaatttacagattcagtgcttttcccattaagctaccattgatattcttcacagaactagaaaaaacagttttaaaattcatatggaaccgaaatggagcctgaataaatagccaaggcaatcctaagcaaaaagaacaaagctagagacatcatgctacttggcttcaaactgtgctacagggctacagtaaccaaaacagcatggtactggtacaagaacagacacatagaccaatggaacagaatagagaactcagaaataaggctgcacacgtacaactatctgatttcaacaaacctgacgaaaacaagcaatggggaaaggattcccttttcaataaatgctgctaggataactggctagccatatatgtagaagattgaaactggaccccttctgtacaccatacacaaaaattaactcaagatggattgaaggctagtcacggtggctcacacctgtaatcccaacactttgggaggctgaggcgggtgaatcacctgaggtcaggagtttgagaccagcctggcaaagatggcaaaaccccgtctcttctaaaaatacaaaaattagccaggcatggtggcacatgcctgtagtcccagctacttgggaggctgaggcaggagaattgcttgaacctgggaggcagagattgcagtgagctgagatcgtgccattgcactccagcctgggtgacagagcgagactccgtctcaaaaaaaaaaaaaaaaaaaaaaaaaggaaaagaaaaagatggattgaagacttagatgtaaaacccaaaactataaaaccctgaaagaacctaggcaatacaattcaggacatagacatgtgcaaagatttcatgataaagatgccaaaagcaattacaacaaaagcaaaaattgactaatgggatttaattaaactaaagaacttctgtacagcaaaagaaactaccaacagagcaaacagacagtgtacagaatgggagaaaatttttgcagactatgcatctaacaaaggtctaatatacagcctatataaggaacttaaacaaatttacaagaaaaaaaaatccccattaaaaattgggcaaaggacatgaacagacacttcaaacaagacatacatacatacatatatgaaaaaaaagctcaacatcactgataattagagaaatccaaatcaaaaccacagtgagataacacctcaaaccagtcagaatggctattgttaaaaagtcaaaattaaccgatgctggtgaggttgtggagaaaaaggaatgcttatacactgttggtgagagtgtaaattagttcagccattgtataagacagtgtggtgattcctcaaagatctaaagacagaaataccattcaacccagcattcccattactaggtatatacccaaaggaatataaatcactccattacaaagacaaatgcacatgtatgttcattgcagccctatgcacaatagcaaagacatgaaatcaacctaaatggccatcgataacagactggataaagaaaatgtggtacatgcacaccatggaatactatgcagccataaaaaagaatgagatcatgtcctttgcagggacttggatggacctggaggccattattctcagcaaactaacataggaacagaaaaccaaatactacatgttctcatttataagtgggagctaaattatgagaacatatggacacataaagggggaaaacagacactggggccttttggagggtagagagtgggaagacaactaacgggtactaggctttttaaacctggatgtattagtcagggaaataacctataaaacagacccccatgacacaaatttacctatgtaacaaaccttcacttgtacccttgaacttaaaagtaaaaaaaaaaaagagagaaaataaaatggtttttctattttttggaatagtttgtatatttaatgttattttttctttaaatatttttagaattcatcaatgacgtcattggagcctagaatttttattgtgggaagatttttaattaaaaatttaatttctttattagatataggataacattttctaaatcttctgagtccttgttttgtaattatgtctttcaagtattactcaatttcagctgaattgccaaatttattaacatttgtgatacgctgttattgttttttaatgcctgtaaataattatattccctcatttattcctgataggtacaatttgttttctcccctttttcttgatcagtctagctataggtttattgattttattgttctgtttttaaaaaacatcttttggtggccaggcgcgatggcttacgcctgtaatcctagcactttgggaggctgaggcaggtggatctcctgaggtggggagttcgagaccagccttaccaacaaggagaaaccccgtctctactaaaaatacaaaataagccaggtgtggtggcacatgcctgtaatcccagctactcgggaggctgaggcaggagaatcacttgaacccaggaggcagaggttgcagtgagccaagatcacaacattgcactccagcctgggcaacaagagtgaaactccttctcagaaaaacaaacaaacaaaaaaaccttttggtttcattgatattctctattgtttgctcatttccttcctctcttccttccttccttccttccttccttccttccttccttccttccttccctccctccctccctccctcccttccctccctccctccctcccttccttccttccctccctccctcccttccttttttttttgtttttgagacagtcttgctctgtcccccaggctggagtgcagtggcacaatctcggctcactgcagccttgtgctaccacacccagctaatttttgttttcttgtatttttgcatatatatataaattttttttttttttggtagatatggggtttcaccatgtttcccaggctggtctccaactcctgagcttaagcagtccttccacgtcagcctcccaaagtgctgggattacaggcccgagccaccacacctagcctgtttgctcattttctatttcattgtctactccttattatttccttactagttcttactttgggtttaatttgtcctttatttaaaaacgtttttaagagagaagtttgaatcattgattttggacatctcttctttcataaaattagcacttaacagctataaatttctttgtatgccctctagcagcattttacaaattttattatactgtatttttattttcagttaaaaatttttcgtgtgtgatttcttcttggattgtgattagataatatactctgattttaatctttctaatattgaaatatgcctcatggtctatcatatgttctaccttgatgaatgtgtctcacatccttatttttaatttttgtgtttacatagttgatatatatatttatgtgatatatgagatgttttgatacaggtgtgcaatgtgtaataatcacatcatggagaattttggtatccaacccctcaagcatgtatcctttgtattacaaataatccaattatattattttagttattttaaatgtataattaaattattattgattatagccaccctgctgtggtatcaggtagtaggttttgttcattctatttttttggtacctattaaccagcctacccgcatcccccaccctccccaactaccttcccaacctctggcaaccatccttctactctctatgtccataagttcaattgttttgatttttagctcccacaaataagtgaaaacatgcaaagtttgtctctctgtgcctggcttatttcgcttagcataatgatctcgagttccatccacgttgttgcaaatggcaggatctcattctttcttatggctgaatagtactctgttatgtatatgtaccagattttctctatttattcttctgttgatggacacttaggttgcttccaaactggctactgtggatagtactgcaataaacatgggagtgcagatatctcttccataacatgatttcttttattttgggtatatacctagcagagggattgctggatcatatggtagttctatttttaggtttttgaggaacctccaaactgttcttcatagtggctgtactaatttacattcccaccaacagtgtatgaggattcccttttctctacatctttgccagcatttgttactttctgtcctttggatataagccattttaactggggtgagatgatatctcattgtagtttcgatttgcatttctctgatgatcaattatattgaacaactttttgtatgcctgtttgccatttgtatatcttcttttttttttttttttttgagatggagtcttgctctgtcacccaagctggagtgcagtgccaccatctcggctcagtgcaagctccacctcccaggttcacgccattctcctgcctcagcctcctgagtagctgggactacaggggcccaccaccacacccggctaattttttttgtatttttagtagagacagggtttcaccgtgttagccaggatggtctcgatctcctgacctcgtgatccacccgcctcggcctcccaaagtgctgggattacaggcatgagccaccacgcctggcctgccacttgtatatcttcttttgagaaatgtctattcaaatcttttgcctattttttaatccagttattagacttttttcctgtagagttgtttgagctctttatatattctggttattaatcctttgtcagatggatagtttgaaaatattttctcccgttctgtgggttgtctcttcactttgttgattgtttcctttgctgtgcagaagctttttaacttgatgtgatcccatttgtccattttttgctttggttgcctagcttgtgggatattactcagtaaatttttgcccagaccactgtcttggagattttccttaatgttttcttgtaataatttcatattttggggtcttaggtttaattaagtgtttaatccatcttgatttgattattgtatatggtgagagatagggtgtatctttcatccttgaaaagtatatctgcccttgttgggcctggtattctagcattgtcaattagatcccttttgttgataatgtttttcaagtgtttggtattataccttttctttatagttgatcaatcaattactaagggaggagtgttgacaactccaaatgcatatgtagatttgtctacttctccttttcactccgtcagtttttgcttcaagtattttaagtttctaaattaagtgcattcacatttaagatttttatgtcagccaggcgcagtggctcacacctgtaatcccagaactttgggaggccaaggcaggtagattacttgaggtcaggagttcgagaccagcctggccaacatggtgaaaccccatctcttctaaaaaataacaaaaattagccggcttgatggcgcacgcttgtagtctcagctacctgggaggctgagacaggagaatggcttgaacccaggaggcagaggttgcagtgagccaagattgcgatattgcactccagcctgggcaacagagcaagactccgtctcaaaaaaaaaaatgattattatgtcttcttgatgaatcaacctctttatcattataaaaaggaaaaaggaaatgtttatttttatccttaataatattagttattctgaaatcttctttgtcttgttaatatagtggccccagctttcactttattgtttgcatgttacaacttttgtaattcttctgtttgtaactttcatacatctttatatttaaagtgaatttcttttaagcagcttatagttgtttagtcattttttaaatccagtctgacagtactcatctttcaattgtatcatttctttcacttatatatacaatgtaattacagatataactaggttttagttgataatattgctgtttgttttctagcttttttcatttgttttggttccattttctttttcaattaattgaatattttaaaaatatttcattttagaatgtgtatcctgcagtttttggatggagtattctataaatgtcatttggattaagttaattgatggtgctgttcaggtcaactaactatatatccttactgactttttattaagattgatctatcaattactgaaaaggggtgtaaaagtttctaactataggctgggcgtggtggctcatgcctataatcctagcactttgggaagccgaggtgggcggattgcctgagctcaggagttcgaaaccagcctgggcaacatggtgaaaccccgtctctactaaaaaatacaaaaaaattagcgtgtgacagcaggtgcctgtagtcccagctactcaggaggctgaggcaagagaattgcctgaacccgggaggcagaggttgcagtgagctgagcttgcgctactgcactccagcctgggcgacagagcgagactccgtctccaaaaaggaaaaaaaaaatgtttctaactataatagtggatttgtgtatttctctttgcagttctataagtttttgactcacttttgttttacacttggttgttaggtgcatacacactaagaattttttttcttcttcttagagaattgatgcttttagcattatgtaatgtcattcttatccatgagaattttcctttatctgaagcgtgctgtgtctcacattaatatagctaccccagttttctttagattagtgttagcatggtatatctttttccatcccttacttttaacctagctgagtctttatatttatggcagatctctatggtattcaacatatagttgggtcttatatttttcgccactctgacaatcttgggcttttaattggcatatttaaaactttcatatttaaagtgatcattgagacaattgaattaatatctgtcatgtgtgtaacttttctatttattgtattttgtttctttttatctttttctgccttttcttgttttaactgagcattttatgattccattttatctcttctcttagcatatcaattatacttcctttaaaatattttagttgctgctcttgagtttgtaatataataattttatatacaaaatatatttaatgtgtacatatatataaatttctaactaatctaagtctgccttcaaatagcactaaattgcctcatgtgtaatgtaggctcatttaaagaatgtatgtccagttcttcattcctgttccttatgacattgctgtccttcattttatttatccacttactgtaataactaatacattgttactattattactttaaatagttatcttttatatcaattaagaataagaaaaatttattttagccttagtgttttttaatttttagtttttatagatacataatagttgtatgcatttatggggtatgtgtgatattttgatacaaggatacaaggtgtatgatcaaatgtgggtgattgggatattctttttttgatgtccttcctttctgtatatagacctaagttcctgagcgatgtcattttcccttttcctgaagagctttaaaaaaatatttcttgcagtgcaggtctgccgataatgaattctcttagtttaggtttatcttagaaactctatttctctttaatctttgaaagataatttcactggacacagaatttacatggtttctgatagaaatagctgaaatttctattcttgtttctccaggagtaaggtgtattttttctctgtattctttcaagattttctctgtgtcttttattttctgcaatttgaatatgatatgcatacatgcagattttttggtatttacctatttggtatttctgaacttcccttcctggatctgtagttgggtatctgtcattgatgttgaaaaattcttagccattattacttcaaatacttttctgctcccttctctttttcttctccttctagtatgtcaattacatgtacatggaagtcacaccttcagatattgtctcaaaattcctggatggtgtattctggggtgtgggtgtggatgtgtgcgcgtatgtgtgtatgtgcgtgattcttttttctctctgtatttcagtttgggaagtttctattcaccctattatcaagttcactggttctttccttcgcatgttcagtccttagcatgttcagacattcatcatttcagatatctagcattaaaaagcttttttcttaagagttttcatcactctgcacacattaattatctatctcttcttgcatgttgtttactttttcctttaaagctgttaacatattaatcatagttattttaaattccctgtctgtttattccaaaatctgtgtcatatttaatctagctctgatggttgttttatcttttttgcccatgtttcagtatgtcttatatatattttttttaactgaaagctagacatgatgtattgggtaatgggaactgaggtaaacagtcgtttaatgtgtggtagtaggtattctgtcaataattgctaatgaatgatgcatgtttgcgttgtaaagtgtaactctaaaatgaaacttgtggctcctttaagtctttatactatttggaagaaccaaatggactcagttttttctggtatggaaacattttcagttaatgtagcatgactgaagcattttactctgtcagttgattaagtttcaaagctatatagtgccatagttttttatccaaacttgtaaaatcatgcttaataatattattttcttatgtctccacatttacgttataagttttaatcactttaaaatttttagatttttcagattagaacatattgctattattattaaagtagtactccatattgtcttttcataaatactaaattttggtcagggccagtaagatgccacaattatgctatctatgaattcacacacataaataaatgcacatacatatacacacatacatattatatatacaatatatgtaaattttcatctgtagacattcacataatgtggacatattcacatagtagctaaaacatagctaaaacaataacgtaaagacattctttagaaaagttattaaaataaagtctaacaattaaattatttcaataattaggcttttgccatagtatggactaatgccaaaaaataggtaagtccagtctgctggttactgcattaagtatctggaatttcagaataaactctgtgtgtgtgtgtgtgtgtgtgtgtgtgtgtgtgtgtgtgtgtgtgtgtgttgcagaaataataaaactactgaaatagattttgtcactctcaaacttgggaactttgatgagagatttttcttcattttgctggaaaaataaagaagttaatttgtaggcagacaccattgtcctaattgactggtaagagttttagctatcattaactaattcagcaacatttttctcatagtactaaagaagactacaatggccaaagtttccttgttccagctaccttccctatctttgcaatgactattatatatacccccacacacatacatacaccccaacatgttagtatatctctaatagctagcttcctccggtacctggcatctttacagtgacatgaaaagaaaaatgtgtaaagtagtagcagaaaagatataaataaattatggtactttctttgactattggaaacttaaccttcaactcagaagtgcttataccaaatgtgatcattattgtgtatggtatggggagagtctaggtcctagattctgctaggcaccacccttattaaatacattcctacctaagttcagtatcttgaattcactttttaaagtagattgcatataaagttcaaaagtagaattaaattccaaactctgttttagaaaacacatgagcaaattgtaataattatcctattgggtaaatactaaatctaaaaatgtttgccagatgtgggtatagaaggttctgactgagtacatcccttaaattctgtcttttctttactataacaagtgattcatagtcaagctcagttatgtataagaacagttctctaatggaaaatcattctaaattaagaatgtccttttattcccttggttttttttcttttctttctttttttgctccaatgggaaagcttaactttgagatttttacagtggcacagtttagactatcattgtctcatcattttaaaaagttgcttcttaaagaaaaaattaatcatattaaacagcatgaggaaactgttctttaatctggtaattttatgtgtgttatctctttgaagaactgactgatcatctatttattttttcctttggaggcagactttaaaagtacatgttctatgtactagtgattgtttaacaaaatgcttgacagagtttaaagtactatgattatctaacaaaaacaatgatgttgatatattagcaacatgattatcttcagtttaaaaattaagattgcttagacagaaaaatttaacgaggcattttaagattttccttcgctatacagatcttctgtttggtttgaaaacatctgttatgattttaaaaagaatctccagactaaatgcaaattaaatttacactcagtaggctatgtttgctctttccattcttacaaatctcccaacagaaccaataagaattgtgtacctaaatcaagagtaagctattattttgtggtacaaaatgcattatgttattttcacagtgttaggggggatcatataatataggaggaaatgacacaaaatatgatcacaaatgggctgcctcatatatcttaaaaaatgaaaaggtatgataaattctgtcgtttataatagcatgcttttaccctatgtaaggaaattttgttttgttaaatgacatttcaaaggaaaatatcatttgcataaaaaatgatctgctttaatgtttaaaatatttcagaaaagcatgcatgtcaatagactgatacatgctgagttacagaagcttaatttaatgaataacctttatggcacaatttctctcagtctctgtatagtaaccactttgtctctgactgatgatgccacttgttttgaccaaaaactctccccttttacccttttattacttattatatagtattatatattttattacattatccaccattaagggaggtatgtacacatatgatgcttccaaaattctgcctctcatggtttacagttagtcagcagatagtctcccattgatgcacaatttatttggattcagagatttgctgagcacctaattccagagatttactgagatgattacaagggatactgtgcattgtggatatagtgatgatgaaaacaaaagtcttatcctggaagaacatcttttttttttcacttttctctttttcttactccaactcttgatcagttacttcaagagcaacttcctctaacccgcttgcattcatgagccaaaacaaaaagcaaaattactaggctagggatgtgtagtgttatgaagaaaagtaacacacaattttaagtttgaacataaaataaaatcagagtcatttacctatagaactttttgataatacttaaaagtcccctttagaacttcttcagttattttcatttaccttttccttgttaaatctgcttttctttaaataccactagttctatagaaaactttaaaatatgtttcattctgctaaattgctaatgccaacagtattgtcatatactattcttcatttcacagacaatgatttagtgtgcaaaataggttaaataggcttatttgagccattctcagagataaaataacaatttataccattattttaattcaattcaatctaactttttttgagacacagtgtcattctatcacccaggctagagtgcagtggcatgaacacagctaacttcgcctcaacctcctgggctcaagtgatccttctgcctcagcctcccatgtagctgggaccataggcatgtgctaccatacctggctaactttttgattttttgtagagacagggtctcactttgttgctgtattcatccactcttgcatttctgtaaagaaatacctgagactgggtaatttctaaataaaagaaacttaattggctcacggttcttcaggctgtacagaaagcatgatgctggcatctgcttggcttctggggaggcctccaggaacttaaaatcgtggaggaaggcaaaggggaagtgaggtatctcgcatggcgggagcaggagcaagagagagagggaggaggtgccacacacttttaaaagaccagatctcacaagaactcactcactgtcccaaagacagtaccaagtgggggtggtaccaaactgcctccatgatccagtcacctcccaacacaccccacctgcaacactggggattacaatttgacatgaaatctgagcagggacacagatccaaaccatatcagttgcccaggctggtctggaattcatggactcaagtgatcctcccacctcagtctcccagagtgctgggattataggcatgagtcacggtgcccagctataccattatttttagagcaaattttttcagggttccaagaatgagcttcaaaacttgagaaccaaatcaatttacaaagccaagtctgctgtcttgtgtagttaatctgagaggagaaatcagttgccaaattgtagaacaaagtattctgtatatattcgggtatgtatatttaactatatagaaactttcttttaaaatattctgtgtgtgtgtgtgtgtgtgtgtgtgtattataacaggggtccccaaccatggcctgttaggaactgggccgcacagtgggaagtcagctgcaggtaagcaagggaagcttcatttgtatttacagctgccccctttgccccctccccacccccccactgccacattgcccacattactgcctgagctccacctcctgtcagatcaacagggattacattctcataggagcgagagcccttttgtgaacttcttatgcgagggttcttaattgcccactctttctgagaatctaatgcctgatgatctgtcactgtctcccatcacccctagatgggactgtctaaatgcaggaaaacaagctcagagctcctactgattctacattgtagtgagttgtataattaattcattatatcttacaatgtaataataatagaaataaagtgcacaataaatgcaatgtgcttcaatcaccctgaaaccaccacccccccgccaccaaccccaccctggtctgtggaaaagttgtcttcccatgaaactggtccctggtgccaaaaaggatggggaccactgttatatcacacatccatgtgtccaccattcagatttaacaaacattaatattgtcccgttgctgttttggggcttttattgttgttccttgaaaaggttgccaatatcatattgcttttaattaccatagttttataataggtattgaagttctcccctccttcttcaaaatgattttggccctttctgactctttactttcctatattaattttggaatcttagtgtcagtttctatttaaaaaactgatagaattttaattaagctgcttattcattcagccttgatgatgggtttgcaggaaatttacatgattcctaagtgttttctcatgcactgaatgaagacctgttcttatataaggtaatgtaaaaacctaggtagggccatccagggagagttatgctccagagaagagagaaacctttggataggacaggtgatgagataaggccaaataaatagaatgtctttttttcccttatagtggaatagctgcaattcttaagatcctatgttatttaaaattatgtttaaaagtattacttgcatatgaaaaaaattgattaccagccagtttccagttcacaattttatagttagttttcctacagaaattaaatgattaaaggtttcgatcaaacctaacagaacaaacataattgcatcattttttccttataagtcacactccgctagcactgtcttctctatttctttggccttgacctggcatttttacatggagcacaatgcataggcaccagtagttcttaacaaaagcacacataaccaaataacactccagtgaagtacctagactaaagcaaccatgtgttcctatgctacagacataggctttttatttttttcttcgaagttggtctagttcccagtaccccctgctgtataaccaacaggggtctagttaaagcaaattatgttaactaatgaactaagcacattatatccaattcacattatgagaactttactagtttggtctggcatcagagcttagataaagattcagtcaggaaattgtcaacatcatggaagtcctgtggattgctgtaagtgtatgtcccagaggttggagaacaagggaggctgcgactttaataccccaaagtcaaatgggatccttgcttaaaaagaaatgaagtactggccaggacctcagagtctcaggagcaagggaactagacaagtggtttagtttctcagactgggatataaaagagtgtcttgttcacaagaaacaggaccagagcctaactactagaattcacttgaaaactggaatagaactggaccgacaacatgccatattttaatgctgctctacaaagctaatgacctccatccctttaaattctctctaacaatgaatgaaattggtccctgatcccatgagcagagtggagccttgctgtatatgtgaattgtataacttcagtatggtaattgcaggaacaaacgggcagaaaaaagggcaaagttcatcatagtgaaaatggaattcatggcagatcctctggatcctacgttttataagagactgttgattaggtctgcattttaacctcgtgagtctcctcagtttatccaaatgaaataaatcgacctccactgagattcagttcacttcactaaacctctaagccttcatcaccaattgttagactgtttatatgctaggtacagtgaataaaatgaaatataaaacatactttttgctcagtgggatgactagtaaaaatggaattcagtgtcaagctatacacataggcttaaaaatttattattaacagccactttggaagacactttggcagtttcttataaaactaagcatacttgtaacataggatccagcaatacttaaatgtggaaatcaaactattaacgatttcagaagataatatggaagtaaatccccatgaccttagggtaaagaaggattttttaaataagacataaggaacatgaaatgtgtaattaaccagttcaaccacattaaaatgaagagtttaatcaaaagataccataaaacaaacagcacagtggaggaaaagatatttgctactgtgttacagtcaaacacatttaactgacacagtccagtttcaagaatatataaagaactacaaattaataaaatcaaatactccaatagaaaatatgcaaatagttgaacactttacaaaagaaggcatctgagatgtcaataagcgtataaaaagatgttcaacctaattaatattcagataaaggcaaattatacctactatgtttggcacaaattaagaaatctgaaaatactaaatattggtgaagatgtggtgcagataggattcttacacactacaggtgagaatgtaaattggtgcaatcactttgacaagctgtttggcattgtctagtaaatttgaaatgttacacaacttatgacccaaaaatctattttgcacatctatcctagagcagtgatccctgggatgtctgaggcattttcagatcaaagctagtttcacaatagtactaacacctcatttgccttaaaaaaaaattatattgatatttgcactgattgtgcaaaagcaattgcgggaataaatgctgacaccttagcatgaatcaagacagccatgccagtattcagtgtgtttgtaactcccatacactcacaataaaacccatgccattttcacttaagagtgtccttgatgaagcagcaaaattattagttttattaaatcacaacctttgagttcatgtcttcttaatagtctatgttactcattactgctgcatgaatgctggctacatgatatttctgggtcagaggcaaaagatgttattacagtacagcaagcatcataagcatcaacatatttacattggttccccttggccccaaattccacaagggtgacacaatatgggccatataaatgctgcacacgcagtgagtttgcattgcaactgagaaacacagagcttaaggaatctaccacttttatggcaagtaataagttaacctgttcgttgtccaagaggagagatgttacctcatctctgaaaattacccggacaaatggcctgagtaaaagaacaagtgatcaggcacctgcagcaagatgtggaggatcacaaaaggcccaaggacgactgtctctcccaatatgtatctgtctccatgtgtgcctgtgtgtgtgtgtgtccatgtgtgcatatgtgtgtgtctgtctccatgtgtgcatatgtgtgtgtgtgtccctctgactttttctctgtctctgtgttcgtgttcctaaaaccctccacaaatgagaatcattaactcaaggtaatctgaaatgtttactaaacacataaaactggcaatgaagatattctcttgttacccactgttcatccattggggtgggcccgaggtttgccaacactcctttgttcttgtttttgttcttctttttttaaattattatttttgaaactcaacagcagagagttgaattagttttcttttctctctatttatctatacttagttcaaggcacagcatcattatcagtatcagttcaagcagggacccttcttgtttaatacctgttattagtttttatatttctatagtcccacttatcccctctcatagacagctactcagataaatttgatatgtatatttgaatccctatgtatcctcgtaaaatattgcaggttgttttgcatgtgtgtttactttttactttttaagtttgaaatgatttcacatttacagaaatattgctatagtagaaagattaaccatgtgttcattacccagattcaaaaatagtaaagattttgcaacccttgttttatctttctctatttatatgtccataatatttttctgatctctttgagagtaagttgtagacattatatcctttattcctaaacatttcagcatgtatttcctaagaacaaaatatattgtcttatatagctgtcatacaatggtctaattagaaagtttgacattgatacactactgttatctagtatacagttcatactccaatttcatttattgtccccagcaatgtttgttttctgtagcattttttttctccctaatccagtttccattgcatttacttgttatcttttgagtatttaatctggaataattcttcagacttttttgttattcaagattctgtatgtaacttttgtttacttatgtggtgtagtgctaaagatcttgttccctttcttaatttttttttgctgtttttaagatccactcatataggccagatatgggggctcacgcctgcaattccagcactttgggaggccaagatgggaggatcacttgagcccagagtttgagatcagcctgggtaacatagagagatcccgtctttatgaaaatttaaaaattttccaggtttggtgttgcagacctgtggtcccagcgacttgggagaatgaagtgggaggactgcttgagcacaggaggtcgaggctgcagtgagccatgattgcgccactgcactccagccttggtgacagagccagaccctggcccccttgcaccaaaaaagatccactcatattaatgtgtagacatctatcttgtttgttgcttctaacttctgcttagtattccacagtatacatctgccaaaaaagaaatgtattttatactccagcctgaacgtcctattacagggatcttttgaagctgatgtcatgaatgtcagttgtaaacttaacattgtactttgtgtcactgtaagtgaactatttgacattgccagatcatttctgggatttcttatgtttgaaatgtagattacagaagtatatattctcttagatgactaaaacctaaatccttgagacaactatctgcatctaaatccttgagataactatctgcatctgacacctaaactataaagattgttaattgaaataaaactcaggattttctccttcagtacttgagttcattggttttaaaatctgttggcttacatacatctgattttttaaaaatcatgtaccttattgtgtatttttcagttgatgtccaaaatttttctttttatgactaagtaattgcaaaggatagaatttccagtgttgcagatattgttatttaaaaatagaattgatatatccctctcttaagtatatgcagtttaatctaaatgccatagcaattaggtaactaccattatgcatttaaaaaatacatgaactggctctatagtcaaaatttatatcattttcccctcttttaattcaatgtgctcattcccctttagaactttatcttaatgtatattttaatatatcctaatatattttaaaagatattttatgcttaagagtatttttaaattatatactgtattatatatctctacagcaaaaacatgtatatgaaagtttattaatttgtttctatgatcagaaagaaaattttcttctggatttaatgttcgttacattacaataattattagtttcagtgactgattggaagaatatatacatattacaaattttgataaataaatacataagtaaagtttttattagaagacatatcattaattggatgtattttttcaattattgcatttatctctgtattgctataatgaggcaggatttcagcatcaattcaatttctatagatgtgaatgctgagaaaatttgttcacataagaagtagacagggataaaaggagtttattatagaaataccactcaactctttgaactccttttgaattatttgtcaaaatataaccatgggaatctatcatcaaagaatagttttaaccattgatcagctggttatttgattatatgctcctgcaaacctggtaaaagtgaggaactggaaactacctgatatggtttaattaaaatcaaccatcaaaagttattctcttaacattgacacaaatgttcaattgcctcttttcttggcaccatgtttttatattccaaggcaatgcactattataaaattatagatgggtgaaagatatgcctttctttgtaagacaggagataggattttaaaagtagaagcttgattttttttagaaaagagtgcataaggagtcgagaatctcaaaattgattctcttaaagccatctgagcctgtctacacacctatcttaacatgaaacagggatacgtataaaattgccactaaaaggaaatagtatttttaaagctatcgttacttgaaaagaatcatagtgttaacacagtagcatcaacctttcagagaaataagaaacattacacatttacactactgaggtctttatgtgaatccatagttgattattttgacagaatatatgtttgatttgacacacttgaaacttcaccttcacattccttgaagaccattcaaagagacttactccactgtgttgaggtcagactagaataccaaatattggtgttcttggaaggttatttgatgttttaatttagggctctggatactctcatacatttctctttctttgcttatttttgttcctccacctgaattactagctcttcctaatatgtgtatatgcacatatatggggctgggagaaaaatatatatatttatgtataatatatatttacatataacatataatacacatattatatgtatataatatatacatgtatatgtatataataattatatattatatattaatattttatatataatttagatattaatatataataatgtatatgtatataataattatatgtataagtatataatatatgtataatatcatataaatatataatatatgtataatatcatataaatatatattatatgtaaatatatattatatgtgcatatatatatatatatatatattttttttttttttttggagacagagccttgctctgttaccctagctatagtatagtggtatggtctcagcttactgcaacttctgcctcctgagttcaagtgattctcatgtctcagcctcctgagtagctggaactacaggagcacaccaccacccccggctaattttttctgtatctttagtagagacagggtttcaccatgttggctaggctagtctcgagctcctgacctcaggtgatcctcccgccccagcctcgcaaagcgctgggattacaggtgtgagccacccggcccggcctatgaggacatattatatgtctttattatagctctttttatattgtacttatgaaagtcagttcattgtgcttcctaagcatgtctcaaatctaattctacctgtttatccggcaccctcgttcagaccaatatcagttctcagttggtaatgattttctgactactcccctggttccattctcttcctacttcaggatctccaccatggagttactataattacttgtctaatagacagatcaattccatattccctgactcagaaatcttccattgctcttacttacaagtcttccctgtttctatgctgccaagaggactcatattaatatttacttttattaattatcttgtacttacctattcccaactacctttccagactttttctccagcaactatcctcatctattttacactctagtgacattttcttgaacacgtatcatggtgcacttattagaatatatgtcgtaacagacacataaatttattttcttagtaatattcaaccaaaacttctggttacttgtgaagaaacgttaaaatgtatatgtaatctgtttatacacatacattgtataaacacatacacatatatatggtatgtagtgggtatatccttttcagaaaaacatttttattgttaaaatgtttttttagatcacattgttagcactaagcatggctatataacacaggaaaaaaatgacaaacaaaatattttaaaaatgaaggaggctacgataaaaaccaaaatccttaagtatatcaatggttttcaaaaggtgttttgaaacacacatacaaacgaccacaaattacatgtgtgttaaattctcttttattaatattaatgagaaaaaggacttacggccgggcgcggtggctcccgcctttaatcccagcactttgggaggctgaggcaggcagatcacgaggtcaggagatcgagaccatcctggctaacatggtgaaaccccgtctctactaaaaatacaaaaaattagccaggcggggtgacaggtgcctgtagtcccagctactcgggaggatgaggcaggacaatggcgtgaacccgggaggctgagcttgcagtgagccgagttcgcgccactgcactccagcctggacgacagagcaagactgcgtctcaaaaaaaaaaagaaagaaaaagaaaaaggacttatgtatttggcctatatcctaaaactcaactgatcatagctatcttcttgtagttctcttttggattcagcatagtgaggtaggatgaacactaacatgttaaaaggcaggttctgctaacaattccaacactgacaaactgtgtgatctttagcaggtcgtttatctttgctaaatctgttttctaatttataaagtaaggactgatatacaatatattcggctcaaagagaaattgaaacgtgcgataacaggtgagagtatgtgattacatttaaagagatttagacatgtattgtatcactgaagtattccttattccttagtctctttaattttaatcctaaatttctttagaggatctggcctatcctgatggaaggcatatgttgataaggctaataaatggccaaataaggaaataagggatgtgttggggtttttttcttatttatttattctatgtttcttcctcattaaaacagttttggtatgaaccatgatggaattggaaattcttgtgggacgaaaggtcatgaagcagcaaaacttatggcagctcacattactgcgaataccaatcctttttcctggtctgcttgcagtcgagactacatcaccagctttctagagtaagtaatctctggagagtgatgataaatagctccagaagtaagccactggtagaagcctaacatgtagtgctttcaactttgcataatgagtaagttttatagggcctactgatgtttcaactttttcctaaatactttaatatatcattgtggcaatttttttttcttcatatagaatttatagaatagaggaagtggagtaaggatgtaagtgggactgatggtgtgagtgttacaattgtttaataaatgggagacaatttcagaaagcattcagatttgcatgatttaatagcacataggccaaatttgagttcagtgattacatattttattttgtcagtgaaaaaactgagttctataggaaagccaaagtatctaatagtaacaaacaacaacaacaacaaaaaaaaaccaaacaccaaggaaatgaacactttgagaaaaagatttgtttttgaaagtgtattaagcgatccatttttctacagtttgagaactttttggtcctttaatgtatattccaagagtctggttatttaaatgtgaagaatacaaattagctcaggtataactatgttaagaaaatcagatgttcttccacatctcacttgcatagggcttcaggattgtactttggaaactgatagacttgggtctcactttctaagtgcgtgttccttaacttttctaatcttcagtgtcctaagttgttaaatgaatttaagtcatactgtttatgtcatcaggtgttatatatgtgattatatgtcatgctataatgtatataaaatacataacagacattctttaaatggtaaatattattttaaataatatcaagatttcagtgctttattgctttaccattatttttaactgttttgtgccatttttttctttagggaggagaaattaaatactctgtgaaaaagtaaggtatacataaagcacaggccagcaatggaaattcttcttaaaaattggctctgttcaaagtttatattaaaatgattatattgtaaaattttaaaaattcaaacaagttacatagggtaacattatttattaaaatttccttcatatctactaatagccagagcatatattttgaaaactatgattagatatttttaaaaggtcacaaacaagagactttaaattacctagcacaatgctttattaaaaaacaaatcaaaagataaatgtttaaaatgagctcttttaatgtaataataaagttgaaggaatttgaaatttatttcagaaggtagttcttctgataaccatattataacctaataatttttaatcttagtaacagaaaattataagattatacttgcctacagtgaaaactgattgaagtgctataaaggtagaccacagagcatttgtaagatatcttttggtcgttcttaatacaaagcactagcaatatcattttctaagatggttttaatgagatcatttacctaaattttaaacatttttgaagatccgctctccctagacatcaagtcagatctggaatttctcccttgacttggcttatgtttttataatggagtcttaatgtccatcaccagaaagacaaactgtataacatgctcaagattcctgtgcatttctgatggttgctcttatcttttttgtttgtttgtttttttgttttgttttgtttttgtaccattttcttttctcttttatcttgtgtctgtcccattggctatattgcacagctcatttgctagtaccatctctgtatactaaatacaaggaccagttgtgatcttctaccagatcttgtctacttgaaagcatactgaggctaagacactccaaaagggaatccctaaattgctggtaaaatgcagtttaaaaatcacccactggtttggtgagggacataaaagtattactagtttcaataaagtgttccattgaattaattaaaataattgatccaaaaagcattatttaagctttatagcatgtatgtgtaagcatgattagtgttgacagtgttctaatgggcttatttgtcctgtattttataaaaatatttctcatgtgcatcctcatgggaatgctcacaaagttaaaactattaatgaaagatagatgtgaagcacaatgggtagagacttggggaaaacttggctttccctcctctttaataataaaactaaacaaatctgattataatctgaccaagcaataaagggtttttaaacacaaagctctttaaaaaggtcagttcaccggagcacaaagacataacagtaactttcttgaatttctttgttcctttttattaatgcagtgaacttaattgctttaacagctatgcgtgatattttttaaaatccagtgctattttgatcagggattgaggttacatttatgttttatagttggctagaaaaggctcataacattttattttagcttctcttctcaagaaaaagaatcttgaaagatgaattgtttaggaactgcagcccagccaacaaaacgcatacctttctctacttagtagctgtataggccaaagatgatggtggattttaacaatgagctttctatgatttatagagattcacaattcactatgttcaactgaaaactattccatggccaatagaatacaaagtctctcgtgtcattctaaaacactagatgctattgatcaatcaggagatggtgtttaccaactcccaatattttttttcagatttcttaaactcggtgattcaataagtggttcatgaatcgcccagaagccgtcctgattaaataataaagaacccatttccgttaaaatggacgtgttatgccagcttctgatgttttccggcgacggctttgcaggtagtgtctttcctatctgcctgcgggactgatttatttatttatttagactatagagaaaggtgaacctggtattatggctcacactcattgatgactatggaccaatttaccaggcagtggaagacagccagaagtaatttaagccagtttttcatacattttccaccacttagcaataatacagaataatttcataaaggtttcaaaaattatgggggctctgtgaatcaactcttgctctgttaaaattaaagtctgttaacttttttgaactgtcaaagatccatagcaaaatttcctacagttccaaattaaatacagagtagacattttcacagaaagaatggaagctgaacgtattaagagaagcaatgttacagtcggagttgacctaggaagaaaggtgattgtagatctacaagagaactgatataagatgagcaagatgaccaaagcacttacatttcctctctagcaatgaccttcaaaggtcaacatcagactattatataaaaaacaatctttatagatgggacctttttaaaaaaatgtagaatctaagagcttggcaaaacaggtttctcctccttctgtttatctgatacatttgggtaaccttactctaaccataataactttgataagtcataattacatatagggggaaaagggtaaaccattctcaatacagtatttgtgtcttgaaagcttcaagctcagttatattaagggtgagagaaaaagatttgccttagaaggcagtacattgttagcttcattgagaagactgacaaagcagtttatgagactatagtacgtaagacagttgacttactgtagatgatatcaacccaattctattttgcttaatttatgtgaatcagcccaacttagtggaataaaaataggaggtggcattaagtgttaactttttgttgttgttgttaagagactgttaagatatatacagggttatatagaaagatttcttttttagattgacccactgtattgtagactaaaattcatattttatggtataactgttatagtgaaaatacatctaaaatcacaattaagagtatatcctaatgtgttctggaaacaaagccatgagtgcatattttacatagggatctgtaaatttttgctgatgaccgaactgtaactcatattcctatattcaaggctaatttttggattatgtaaataagacctctctaaattagaagtagaattcataaaatatgactttctcatcatactgcaaacattttgagaaatgtaaatatactttgatttactgtgaatttcataatcaagggagaagtatattctaaaactaatgtatttttttgcttagtcttagaagcgtaaacaaaaatagagtctaggaattcaataattatctgtgttgctgtcgatattaactagggtttgggtttttagttgtgattatatgctgctagggaaataatcacaggtctactttttatatgtacaattttgatctgacaagtatatgtttaataataaattgtaactacataacatagatggagactaacactattctacatttaataatgagtgaggttcatgttttctgagtggacaaatttgcgtattacaccaacatacaaaccatctatgtttaaaattattatttgatgagaagatttgtatataatatcactacagtgctattataattttgatagtagcataaataacactggacatgtaagaattgtatagttttatctcaattagctataagacaacttatatctaatattttatgaaaggaaatattaggttggcacaaaggtaattgtggtttttgccattaaagtaattgcaaacacacaattacttttgcaccgacctaatagatttacacatttataccaggagacatacaaaaagtgttcatatcagcataatttgcaattcttagaaattggaaataatccagatgtttattagtagaggaattataaataactgtgacatacttataaatggaatattaaagaacaataaaaatgaacaggctacaattagatttacacacatcaacatagaagtagctcatattcacaatgttgagcaaaagaataaagttacaaaagactacccacagtatgactacttttatataaagtctcaaaactggcagatgaataattagacagtaaaattattaagcaaaacaaggaaattattattataaaaagttaggatagtagttacctttgggggtggggggaaatgagggatattactggaataaagcacttgagaattttcatagaaaaaaagtaaggaaaagcactcccagggttaaatatacattgctcacatttatgtcttctacctctgtatctatatctgtaatatttcataatggtaattgatgactcagaggcatgaaaatatccagaattattttaagaattaattagtaactaataattatcatctataggctttagttacttgaacatagcaggaaagtagcagacaaattttggttaacatagttcaaaaagcatttttcttgcttaacccttagttaagaattaaaatataggccagatgcagtggttcatgcctataatcccagcactttgggaggccaaggcaggaagatctcttgagaccaggagttctagaccagcctgggcaagatggtgagactcagtatctacaaaagatacaaaaattagccaggcatgcctctggtcccagctcctccggaggctgaggtgggaggatcacttgagcccagtagttcaaggctgcggttagctgtgatcatgccacttcactccagcctgggtgacaaagcgagatcccatcttaaaacaaaaacaaaagaattaaaacaggaaaactatcccatccctcaaatatttaaatcaaggttttactgtatataccagatatggttactagaaggaaaatgtactacacatgtagtaaacgtgtagaaatgtacaaccaatttaaatccaccttgcagatacatccccacatttgctttactggaagacacttgacttgtaagccttgctaatttgtacaaatatagccaaatccatttcaaaagtcctttgtttattccatgtttctaaatgctggttcatttttaaagatccatatggttttcctttatattttatttcatatggtgttttattcttctgtaaaaatgtactggaaaaggagaacaagacttgtctagactacattaatacaaagcaataggtgcttccagagaactaaaacaaaaatacacttttgggataaactttcttagaagagttttgaccacaggtgcctgcagttcatggcattcttggtggggtgaaggccattgcagttgtcctctggtttggtattttttaaagaacatgaaccatgattagaaaaccactaatattaatatattgaaacaataattttagatgaagcaattattcttgcttccttctgggttaagtcagtttccaatttgccatcagaaaagaattttttcctcaggatatctattcttaaattcttctttgggatctacacagttcttcctctgattctgggttaattttatgtattactaaaagtaattattttaaaatttaaataaaataagttggtgtcaccaaaagctggtgtcacttaggtgaatatatcctgcacttttttggttatgccattgtaaatattttttgcctattggatacctacttcagtacacaatttaaaataaatattttccataaaaaagatttatagtagtacttaacttgttattttatttttattacatatttaattcctttcataaagatatttataattttattgtcagtagaaatgaaacagatattttagaagaaaattggggaattaaactactaattcagttatctcaccaatatcctaatcaaaatggttctttttccattgtactattcaaatatgacctctttgtcattaaccttaatatataatttaagatttactagtagcattacatttgcctaaagtttgcatatccttataaattaaagatattttacgtaataaagccaaaaaagcattatttaaaaaattcatctagaggtaatttttcttgctgaggtacatgtcaatttctaaaagtataataaaaaggaaataaaaaagtgttctgttatgaaaactggatagctgggtgaaaaaagtttgttctttgttagttagttagttagttagataccttgagcagtgacaaatgaaatgattgtagtagccagtggtaaaatccatctgtattagtaccatacttaatattccttttaaatatttcttattgattaaaaaatcaggagggcatgaaagaaaggagaaggatataaagaagacagtagtctgtctctttggtctttaactctatatcaccgtaggaatagtatggttcagtttttaaaaggtattaatttgctgctgtgtgtgaacatacctttttatagaacacattgactttgacatgttaagaatatgagaaacttttaagtgaatagcaaagtcattgttatgcatagttctttcttagttatctataaatgaaaaattgtactgtcctaaataacagttgaggaacttctacttgtgaaattattttcctttggcaaagtggatggaaaagatttggaaaaaaaaaaaaaaaacacaagtgctggcacaatggacaggaatgttggaaaaaatttttaaatgttggcataggaattctttaaaaattctaacttactcacatgtgaaatgaaagtaaaaaagcatctgtcctattttatgcacactgactaaataaaaatgaacaattatatttagcaaagtttaaagctctttaaactaaggtattttgtctgggttttggcgacctttatgttatttgttctactgaattaaaatattatgtttgagtgcaggcatagcttgaaacgcagaaattatacaaagaagagaacattctcttttccaattctgatgattctagatgaaatatgaaatttttgagagactaaacacttctaatatatttgagaggaaaactttggtcgttggcctcatctgtcattcaacccatttattagtgaaatatttcaagaacctatggacatgccttaacacaacatctattgttctgcccaaggtggaactatataaattaggtctttaaggattataaccataattattttttttttaattttctgcatttcatgtttttaattctactaccagatgtggttatattttcaataaaaacaaacaagaagcttagagcaatatgaaattctgttttgattccttgagaaattagcttaaatcaaggccaacgtgacattttcatattgttgtctgaaatgattttattgtgtcttggtgctaaaatgaattatttggagctcttattcaggtttcagtaaagctattctgttctgccatgtgattatttattgggagaatgtattgtttttcatgcgtcaagttattaaaacaaagctcaacacgtggtttcataattgtgactaaaatagcccatagaatacctaatttcctttgatcctttatgttgaacagttcaggccgtggtacttgccttgataatgagcctcccaagcgtgactttctttatccagctgtggccccaggtcaggtgtatgatgctgatgagcaatgtcgtttccagtatggagcaacctcccgccaatgtaaatatggggtaagaagtcttcatccttatgtttcgtcatttatacgtgttcttccatgacacagatgttaagatggaattacgatgaatgtcggttccctctagtaatatctttaatttaaatatggcttttgacactgcagtttttctgacatcatatgtacaatattttttctaaatgtttcaataatcctaagttaagcacattacagatttcttgtgagggatgcaggtagaattttagtaattcttaatatattttttctttaaatcttgaatttatgatgccaactttatttcgtcttttgaaatgttatggctttaaaatccctctgccacttttctgatactcttataattgagctaaagggcatttttacattagctagacagctttacttttattcctacttgatagtgctaagtcacttcatgttgcttcatccactgcccacattccagcaccacaaccaagcaggaacaagatgacattagctcaagtagtgaaacaaggaaaattgctatgaaagaaaaaaaaatgtaggcatcataatttattctgcatgtctgccttaaaaaaaagtcacagtgtctacatcagaaaatgaataaaattctttttaagtttcatagagcaagattttagtggacatgttcttattaagaacacaatataagcatagtgaatgaaaaaattggtttttaatatgtcaaattgcttaccaaaaaaattcagatttaaaaaataagttgagagccttgatttttttttctttttcttttttttgagacagagtctcgctctgtcgcccaggctggagtgcagtggtgcaatcttggctcactgcaacctctgtctcctgggttcaagcaattctcctgcctcagtctcctgagtagctgggaatacaggcgtgcaccatcatgcccggctgatttttgtatttttagtagagacggggttttgccatgttggccaggctggtctcgaactcctggcctcaagtgatctgcccaccttggcctcccaaagagctaggattacaggtgtgagccactgcgcctggcctgatttctatttctatgcaaatagtcttttaaatcctcttttagaaataataataattaagggttaaggtagtattgtactgtatcattgcactgtatgtatcctctttaggtacagaataaaaggaagtgttttcttaaatatctctttggtgacaagtatattattattattcttgttaggctttagcagcacatttgtgcactagcttgaaagattgtgtgtgattatatgatatgtagaaccttgtgtaaaactttggcttatccttaatcttattttgtatggttctagtttcttttgttcttaggttgtttatgtttcaataaaagtcagtcgaactttaatcatagtctttctatatatacttacggattaatacattgaaattcatgatcaaatgaacttagaaaatttctgttagattattcatatctatgtctctcatttctttgttagcaagtgaaataatctatatttttgttttctattggaaactggattttaactctacatgcaaatttctacattagataatttattcagttttatagaatctatggctacacgatatagtctttttctctctcaaataaattaataaaaatttgacttaattcttcttgctatatctatatatctaattcagttcagactaattgatttgaaatgagataaagaatacaaaattatatatttttactttatgttcctgatattctgcttttatattctttttatttgagatggagttttgctctgtcacccaggctggagtgcagtggcacagttttggctcactacaacctccacctcctaggttattctctcacctcagcctctgagtagctgggattacaggcgctcaccaccacatctggctgttttgtatttttggtagagatggggtttcaccatgttggccaagctggtcttgaactcctgacctcaagtgatcagcccgcctcggcctcccaaagtgttgggattacaggtgtgagccaccatgcgtggcttgcctttatattcttaatatgttttgtttataaagacttctgtaatagatacaaactaaaattggaaaactttgagaaagacattagtatcttacagacctacacagttttaagtattttatcgtgaatccttttcactttgatttgtagcaaaataatggtttccctagattcatatactatatgaaaatgcttgtgttatttgtttaagtgcaatatgttactaacaaagtgtattgagtcataattgattctttacaatcactcccacctctgaacttgtgtcggtttacacaaatctacgctggtttatatctggtgaatccctaaggttttaaacaattctaaatactactttggaaaacaatagtggcttcaaaggtcagagtccagtgggtaagcaaatcatacttcagatggcagctgaagggaaaaacaaaccagccctgatttaggtagctgtctaagtgtagcatgctgaaatgaacactaaatacagttgctgtagacttaggagaatattttagaatttttgagaggagatacatctggtgttgaaaaatcatgaaatgattcctctttcaactagcaggtctctcatgatgtcaggaaagattttaaagaactacagaatgggccaggtgtggtggctcacgcctgtaatcccaccactttgggaggccgaggtgggtggatcaagaggttaggagatcaagaccatcctggctaacatggtgaaacctcatctctactaaaaatacaaaaattagctgggcgtggtggtgcacgcctgtagtcccagctactcaggagtctgaggcaggagaatcacttgaacccgggaagcggaggttgcagtgagccgagatagtgccactgcactccagtccagcctgggctacagagggagactccatcttaaaaaaaaaaaaaagaaaagaaaagaaaaaaagaaaaaagaaaaaaaaagaactaccgaaggatctatactgcagaagtgatcagctttccatctcttccacttggccataaagtagtcattgctgggttaccaatgattacatctgtagttatgaaaaatcttgcctgaattcttagtgagtaggttcattaatatacatgttagttatgtttggaaatttacatgaaaatttttctgttttattttactcagggcaacatttttcactattattcttgcatatcatcttttcttatttttcaagtgttcttaaattcctatagaagttgtgaggaggttgtaatggctgtaaatacaaagaacaaaacagtacagtacaatatacagagtaatatagttgtataatgcagtattctataaatgatatatagtttctggtatttatgtagtgactttttttctgagctacttcagattgagttgataaaaatcataattattggccaggcacggtggctcacgcctgtaatcccagcactttgggaacccaaggcaggtggatcacctgaggttgggagttcgagaccagcctgaccaacgtggagaaaccctgtctctactgaaaatacaaaattagccaggcgtggtggcacatgcctgtaatcccagctactcgggaggctgaggctggaaaatggcttgaacccaggaggcgggggttgcagtgagctgagattgtgccactgcactccagcctgggcaacaagagcaaaactccatctcaaaaaacaaacaaacaaatcataattattatataatattttataggtgaggaaactaaaaatacagaatgtgatatacctactccaaagtaaataaataaataaataaagtcctaattgatgtcagttctgttttctattaggaatagtaattatgttaatgaaacacaggtagcagatgtattttgttttacaagacacttgttattaaatttttatcaggtaatgtctgttactaaaaatcttctctaaagtcctgtccccgtcttttttgggggagaggtggtcgggggaccttctctaaagtcattttttagggtcataagttatcagatgtctgaaactcttgagtcctggatttaagtgaatttcttttcttttaccttatataaaaagataggacgtcttcaaggtacctgcaaagctagattcttaccagatcatctaaaaatatctgctagctctgttgtaggtttctaaggggccttggatgattcctggatgaaaatacattgcaaataaaacagcagtatcagtatgtccaagaaatgtttctttggctttttagagtaataagctctttcctgtaaaactctggagaatctgttgtctcttccattttccattaatctcttttttattagaaaagaattacaaaaactgaattatcaaaaagcatactgcagtaataacaataagtttaaacgtaggaaggaagtcactaatgagcctatataatgtaggggctgtgggtaatcttttgactgcttcccaaaaagcatagattaattcaaggctcagcctcagctttagctctttatttctttattctgtcacttaaatcaaatctcaattattgttttccagtacacttaatggttcagtataggttaacaatatccagtacataatttactgttaattattaagagctgattgttcatctacaggtagatttaagaccacaaaatcaaagaaattttatagacatcatagctttgtttatttatgggaaatttttattgtctatgaagtttgtcactgtttacatagacttaaatgttagcacataaatgcataatagtgtgttgtacatgttactgcttattttaaatgtagaactgaagaatgttttatcagtaggccatatatcctgaaccataaatgggaacacatgagctaatacatggtgtcatgatggatggaacagcatatttttatcagaatattttaaataaaaaaaaatctgttcaccataaactattactatgacctaaaattgaccattaatagattttactcagttttgggcacttttttcagcgaacagcagccaggttgttcttgtaaacttcagacagcaaaaaggtatgacaagcatgcaaattgtcttttatttacctggcacatgacattcaataaatgttttcatttcctctatgaacctctgtcatccgtgataacatttcggtatagctgataatgctggtactgctttaggagaatctgaaccttttgtactttggggagcatgttaagatattccaaggcgcacatactgactcaatttcactcttcagtctcagctcaaatgccagtttctcttccgacaggccttctgtctgatcattcgctattaaaaaggctttcctcagttactctgtttcacattatactgtttattactttcatagcacttttagaaatccataatcatgttgcttatttggttacttattaagtgtgatcatgtaaatgaggccttttctaacaacattacttaatattgtacatccacgtgcacacacagacacatacacacacacttcctatcattttccttaacatttatcatttcctgacatactatctattttacttgtttatcttgcttattactactttcccccctagaaagtattttccttgggggcagatattttgtctgattcacagctgtatccccagtggctagaacagtgcctggctcatggtaggtgctcaattaatatttgttgaatgaatgagctgataattataatgggagtgtaactgccatgaggggaaggattccacctgacttgtttatggctatttgtgtagtgactagttcaatgcctggcatatgggaactcaataaatatttgacaaatagatgagtgagaagagttatctggtgaagagagtggagagaggacctttgggaagaccgagagcctgtgtatttgaagaggtgagagaaagccactgtgcccagtgctctcaaataaacaccacacaaaagaaacaggagaaaaaggtagaagccaagtgtaactgcaccttataggccacgttaagtttctatcttaaaagcagcaagatgccagaaaataacataatgtctaaggcatattatgtcttaggaaacaaatgtaattctgtaatctggaaaacccatgttagaaaattaaaggcttttataaagtgatctgtggtgtcctcttttcccttttctcttgccctccaaacacagcctacgcagagtactaaaacagctctgccactaatgattctccagtgtagcaatgtccttacttttataggtaaatatagaatttattctttttatactagagggtgcttataactctgaaatgagatgaatggaggtgtttgtgtgtaaaggtgtgtgggctccataattttgatttaagattgcagaatcccagtgtgttgtagtggaaacataacttataaaaggagaatatgacataactttaagacttcacattaatttttactctttccagtggaaatacatttgtgaccattgttatattttacttacagatcaccaaacttgaaagttttctcttctacttacctcaattagatgattaatgatagaataatctacaagtggttgagtgccatatttgttccaaactttaagtgataagagacttttaggatttaatattagaaatgaagatcaagagagtaaatatagatataaatttggatttattaatttatagtaagaaatctagccacatagtttatattcattcaattccattgaaatctgcatattttctcactgaaacaaacctacccagtaggccaatttattattgaaaaattattcagtaagccttgaataaaaatatggggtagtgcatagattattttcttaatatattaattaataactataataataatgccatcaagctgtgcctacctgaatatagctctttgatgtcagggtaactgctagagacaagatagttgagttctctgatcaaggtatcctttccctggagagtatttaataaaaactgacatgctttgtctctcagactcatgcttattcccttttgtttattttattattttatcaccaccaattaaaaaagattcagttattattgcattgttattgagaatcattctttcatataattgtatgttagttgtacgagtcttttggggatatcactggccacctatacaacttttttaagagatacagacaacttgggagaggatagcagggaaatactgagaagtacatataagggaatgagaaaatgagtttgagtagcctgtaaaaaagaaagctaaatgttggcctcaaaaaccattttctggttttggaacacttattacagtttgattgctggtaacaaattgttctgcttccctaccaagagcataaaatatcccacagttgtcttaatttttacagctggaaggttgtagattaggtattaggaagaatttcaagttattaaatattggaatgttaaactgagaaagattatagaatcacactttccttgaagattttaaggtggtataaatattctacagtgttgttttatacaggtttagggaataaaaggtgtgtaattattttagcacctcaatattcttttgaaatccaaacatatatttatcaggcatatacttgacaagaagtttatttgatttttttcttaaattctaagctaaaatcataagtccatgatcacttgtatctttaaagattactagtttttaccctgcatttgcttcttagaggttttttcttttcttttcttttttttaaccatttagtcagttttgaatacttttaagttggtgattagttatataaatgggatttgtggattaagggtttttttagtttagtttttggttttttgccattctaggatctgttgtacttaaatttcccattacccgtaacataacaggattaaactatttaaggcaaaaataagggtacattatcctctttcttcagatggctactaaacacctgaaactaggccataaggtcaccatatgttggttttcaattttcctttgtgtgatcaaatgataagtaacctttctaagcactgatgccccttcctgacctttagggctctgctctccctctttaccttcaggatcctttattgcaagcagctgttgagaggtgttactgataggctaatgtggacaaagaggatgtttcatatttagaatcaaggacccaacatgcctagaatttagagtttcccaagggccaaaagtgtgcgcatgtctcttttttagtctttaaacttcattttaaaaaaattttaaagccagccagcagctgtaaaccaacaataaaatcctaagctcctcaaccgttagaccccaccttccttcttggccaaggttattccaaagtaaacctgaaaatctagttgaggccacgatgggaaggtggggtcagacatacctcattataccgtcctctctttggaaggtacagctgaccaacattatcattaaaacagagatcttaagattgatgaaacagactctttgtagcaataagataccaaattccaacctgactctcgtatagcatcacatgacggatagcaggccccgaaagaaatggaaaaattttaccctaaaatctatttatttggcatatgttgaagcggccctgtagagctgtctcttgtagggagaagacacattctgctgagaatccccttccctttccaggtcttttccctgatccagcagagaattaactgggagtctggcacctttttaagtctaataagaaacatttacaaactattctctctgggaagcctgctacctggaggcttcatctgcataataagaaccttgattttcacaattccttatcctaacccagacattctcttctattgattccaggtctttagataataactctttcaaccaactgccaatcagaaaatcttctactccatctatgacctggaactccccaccccttaaaatgtataaaaccaagctgtagcctgaccaccttgggcatatgttcttaggatctcctggggccatgtcatgggccattgatgactcatatttgacctagaataaatctcttcaaatattttacagagtttgacacttttttgccgacacaataaagacaccattttctcttcacatactgctttccttaatgatataataattgtaaaatgattttattctttcatgatgtcacctcctccccttgtgtaagctgctaattttaattttcctcggtaaatagaagagtttctcttcccattttttagtctggtttaacgtatatagtttcttaaaaataatgaaaacattagaaaaggtaattctaacaatttttagaaattatactctttgtgaaacaatcattccattctgatcaaaaaagccctattttagttctttacaaggttattttctgcatattaggtaagttattttacattagatgattaccataaaactgttttctaaatatatttttattacccacttatatttgttaatattttaaattattgttaatatttacaaatagtgttgttcatttcaaaactcatgtaaaccaaaaatctgtgaattgatactaaaattttaaataagtaggagtatttttaaatgtcttgtttcttggaagaccttgaaacacttttgtgaaatatgttaacagtatctttttaaaatccacacccaagtgttgatattacatttggaagttcagtaataataatgcataagttgattcctaaactcatatattgagtgaagatgttataaattagtatataatagttataatttggagatattgtccgttaaaatcaaagtaaaaaataggagggtattaagtttagtgaggttttatattttattggaatacaaaagtaaaccattactaatcagccttaattggccagtgacatttttcagttctgatacatttaagagaaatgggaaagtagcttaggtgtgtggtgattatctgggacattgatatcgaacagagctgattcaaatctacatctagttagaactgaaacaaattgctaaattattctgaacctaaagtttctcacattttctaaagagattaccatgatgaataaatgagatacaaatatgaatatgcctggcatagttgttgatagtataccctgaaaaaaaattagttcctttcttttattcctgcctacaacatccctacatgatccctaagtgatcatgaaatatgtgctgaagtatctacagtgatggggattcagttttagttcatcatggttcactctgacttttggaagattcttctgtatatagaactgaaatctgcttttacgcattgattgaactgacttctcctctaggttgtcctgcatattttttccccagtcatttataaaattgactttctaaactctaggaaaatagttccagtttcaacaacaggacaaatagtaaacacaatcattccttcaggtatgaaaacaagaatgctagataaaataaaactaataaactcaactaaatttagttcatttagctacaacatgtacttatgtgatcagaaaggacataggaacagttgaggaatgatgccagtataatgcacaagccttgtttttttcatgtgtgaatgtttcctagtatattaatgatttgaagctatcgggcaagctttctcatatttaaagatatagtctatagcattaaagactcttagaaaggcctaaagaaaggtctttttataattcaacatggtggttggcttagtggctttatttccaaaacactaagctctttattgcagccatgagggcagatgatgaagctgtgaagatacacatcttttgtatcatttgtgttatagtttaaaagttgattgataaagctaaagtctggatccaattcttaatttttatgaaagaggtttctattggaggcaaatgtcctcaaaagccaatgtctctaagaaggaagcattacaaaccacagagattaaggctgcaaaggatcagctgattgggatgctgggaacaaatgccagcagagatttaactgtgcaaatgctttaatgaggcaaaaaatggctcccataagaaactgaagccccaggcttgtgcctcacataagaacaaagtaaaaccatatacagcctacatggtgctgaccaaataaatcaacatgacaaattggttcagtgaaaaccttgggatgtgtgatagaaataaatgaaggtgcacttctacaattcaagaggcacagaatacgcaaagaaaaaataatattcactgaagataagcttgaatacaaaataacaaacaacacgaggaaacaatccaccatgaagttgacagataggaagattaatgatccaagagaaaaagatagggaaatatctaagagaggttaagaaataggtggttgaaatgagaaggtctaacttaagttaaataggagctttagaagaaagaataggaaagatacacattaaaagagataataactaatagttttttagaatcaaagaaagacatagaaatcagagcatgaatctcaagtagataaataaaaagaacacttagatatagtaatgaagcccaggcagagtggctcatgcctgtaatcccagcactttgggaggccgaggcaggcagatcacttgaggtcaggagctcaagaacagcctggccaatgtggtgaaaccctgtctctaccaaaaatacaaaaattagccaggcatggtggcaggcgcctgtaatcccagctactcaggaggctgaggcaggagatttgcttgaacccgggaggcggaggttgcagtgagcctagatggcaccattgcactctagcccgggtgacagaacgagactatgtctcacaaaaaaataaataaataaaagatacagtgatgaaattgtcccaaagcagatagagaaaaaaattggaagcaacaagaaagactacaaaggtcgggtacggtggctcatgcctgtaatcccagtgctttgagagaccaaggcaggaggattccttgagctcaggagttcaagaccagcttgagcaacatggtgaaactctgtgtctaccaaaaaatacaaaaactagctgagcgtggtggcatgtgcttgtagtcccagctactttgggggatgaggtgggaggatcacttgagcctgggaagtcaaggctgcagtgagccatgttcacaccactacacttcagcctgggctacagagtgagaccctgcctcaaaaaaaaaaaaaaaaaagactgtaaagaagaaacagcagttagactgacaagtgacttttcatcagcctccacagaagtcaaatgacgatgaattttaacaccttcaaatgctaaggtaagataaatgtcagcctagtatattcaatttaaatatcattaaaaaatgagaatacaattaagatattttcagaaaaatatgaaaaagtgtcccttgctaaattaactgctaatggatgtatgtcaaaaagaaagaaattggattcagaagatagtggtaagatataagaagaaattggcattaaaagcactggtaaacacagatacaactaaacaaacattgactatcaagtcttgggcaatggaaaaaatgctcaacatcactaatcatcagggaaatgcaaattaaaaccacagtgagataccaccttactcctgcaagaattgacattattaaaaagtcaaaaaacaatagatgttgtcatggatgtgagggaaagggaacacttacacattgctgatggacatgtaaattagtacctcaatggaaagcataaaggagattccttaaagagttaaaagtaggtctgccttttgatctagcaatcccactactgggtatctacccaaaggaaaagaagtcattatatggaaaagactcttgcacacgtatatgtatatttatagcagcacaattcacaattgcaaagatgtggaaccaatctaagtgcccatcgactaatgagtgaacaaagaaactggtatatacaccttgtggaatactactcagccataaagggatcaaagtatgtcttgcagcagcttgaatggagctggaggccattattctaagtgaagtaacacaagagtggaaaaccaaacattgtatgttctcacttataagtgggagctaagctatgagtataccgaggcatacagagtgatataatggactttagagactcaagggggagggtgggaggggtctagaggtaaactacatattagttacagtgtacactactcaggtgagaggtgcactaaaatctcaaaattcaccacggtataattcatccatgtaacaaaaaaccacttgtaccccaaacgttattgaaataaaaaatttaaaaaaaagtcttgggcagcgggtcattcagaaacttttagacttttgtaggcaaggaaaattcccttctaaaaactagcagacaaggatagagatttcaattcttaattttgccagaaaggaacattttgcaaagcgtgccataagcatacagaccctgcccttgggaattttacagtctactgtaacaccaataaagtaaaaaattacaacttaacaaataaggacagtccattaaaataaaaagcattagttttatggaaaaaaaaaaaactgtccagtcttggtatggtggctaacacctgtaatcccaacactttggaaggccgaggcaggaggatctcttgagcccaggagttcaaggttgcagtgagacctcaaaacgaaataaagcaagcacctgttcacattgacatcatccttctaattttgtcaaagaacattaaaaactttatcatagagcaataccaatccatgccatttgggctacatgtctgactataacctacattttcctctgaagtgcccatgaattctaagtgattattatttttttataaaaccaacataatgcctggtgcatagcagattcttgataaatattctagaatgagttgggaaaaagctattacttttgtattgccaggcattcctcctaactgattggaagttgaccccataacattagagattccaattcaaatttacagtgtcatataacagaaatgtcctttagtggggactgtggataacttctctctccttccttaaactcaagagcaagcacaaagacccaaatttcccttacagagccttcccaaaacaaaatttaggattatcaaggggattctaacacacaggtgctgatttattaattcacagaggttatgaaactaatcttaataaatcttaacttctatcaggattcatgagtatgtgaaagagagctagagctaagctggtggatagtaaaaagaaaaaaagaaaatcattctttctcactatacttcagcacctcctatattttatttagggaaatctgcctactatgatggttgccatgcaaattccccaagaggcaaacaatttcagcatccatttaactttattagagcctggaacctatgttaggctgcttattcagcaactaatatgcatgtgcaaatgaaactgacatacctatgcaaatatatcatccatgttctaggatttagcagtttagagaaagaagtgtatttctgaaagtgtggaattgatctcaagttcatttaggaagtctacttcttgtttacttggtatgaaatgaaattttctttttatctttcaagagagtatcctttaaaagaaaaaaaagtcttgggaaacattccgaaattggataccagtatctttcttattcaagttgagattcaaattgcaagatctatctgaaaactcttcagagccttctccatgactagttctacattttgggagtgttcctcaacatagaattccactcccatactttaaacagtgattttactgtaaaagagaagttaatatggtaacaaaatttgaatccccaggagcccaccaaggtaacaaaatgcattagaagtggagatctagttttcaaaatgcatcattctctaaaaggtaagagggctctattgtgaatcttcagattaaggttttgaaaaaagtatcttaagcacctgctactttgggtagagattttcaaggcacttttggaaaataaagtttctgtaacctgactaaatagtgtgttttcctgatagatgcaataagtatcgtctttttcaataatagaactttcatcgcttagttttgtctaaagtaaactttaggcttcttttacctttgtctaaagtaagaatgcaacctaataaagatcacaaaagatcaggagtatcatccaggactatggatgaaaatttttcataatctttatattaatctctattaatggtcctctgtttttatgaacacatttttccttgaatttggatagatttttgatacatggagcaatatttcaaagcccttaaatgttactcttactgctttttaaatattaaactacaagaatatattaaggaatataaactaaaaaaccatctttttatttattttatttttattttacttatttatttgtttttattttactttaagttctgggatacatgtgcagaacctgcaggtttaaaaaccttcttctatagaaaaagagtaaagtagtataaataacctcttaaaacataaactaaagctttgaaagaaaagtgaatttgtaatattggatcgtaaacatgagaacgttttatgtttatgttatgatccacagtacatgatccctttctttctctttctttctttctttctctttcttttttcttttctttctttctttcttttctttctttctttctttctttctttctttctttctttctttctttctttctttctttctttctcttctttctttcttcatttctctctgtctctctctctttctttccatcccttccctcctaacttccttccttcctttccctccctccctacctctctctctctttctttcctttttttttttttttttttttttttttttgacacagagcctcattctgtcatccaggctggagtgcaatggtgcagttcactgcaacttctaactcttgggctcaagcgatcttcccacctcgacctcctaaactgtgggattacaggcatcagccactgcgcctggcccatgctcttcttttctaatattttgtctctctaggccactagttctccaaatggagtttaaacatttttaggtatttaaaagcctaataggaccaggcacggtggctcacgcctgtaatctcagcactttgggaggccaagtgggggcagatcacgaggtcaggagttcaagaccagcctggccaacatcgtgaaaccctgtctctactgaaaatacaaaaattagctgggcatggtggcgggtgcctgtagtcccagctacttgggaggctgaggcaagagagtcgcttgaacccaggaggtggaggttgcagtgagctgagattgtgccaccgcactccagcctaggtgacacagtgagactctgtctcagaaaacaaacaaacaaacaaacaaaaaccttaatagacactatatatctcctctctgcctggtaggaggcaccctaaagaggaacccaaagagatcccctcaattttttatactctgtggggcacttccatttgtaggaccagttaaccagtgacatcgatatttcattgccttaattctgattgtgtttgtaatgtgagttcttatgttttgggagttaaaagatcagttgaggaataaaagcaaaaggattaaatgtgatgttagtttacttttgcatttcagataatcatttttattataaatatatattatactaagttctagcttaagttaaaaacttgtaacattggtaatgatgctagttggtgattatatataaaaataaactgaaaatttgactattttcttcaaaaggaagctttttgggggcggttgaaaccctttatgtaggaataatattgaacggcttattttaaaatctgatatgttaatatagtattaacaaaaaagtattttatattgtcaatattagaataagtgttgtaattttcctatgctgaggtaggataatggaaaatcataggaaaggagacaactccacacaacatacccaaagcattctataaacagcagcatttgttcaaaaccaagtttcctttcatggaggtaggctaaattgatgtactgaaaataacgttgttagattgtgcctaggcgtatatgaatgttaaaaattactccaaaatatacttcaaaatttaaaaaattcatacattaaattcttatccattccatggtctattttcctgttttaaaattgtcttcatttgaatattatggtagatctaagaagtcattttcctggcatctctttattagtaattggtaagtttgtattattgtatattcttgagtgtaataaacatatatttcctttctacatagtcatttttttctccctattcatctatattaatgaaatttctatacactattgtaaaaagatcctaactaatattaaaagctaagatatactttatctgctaaaataagaattgcaaagacaaatagttaaatgatactgcaagatgtttcataaaaacctcctccaaaatcctcaactgcgatgcttcagcagcaaaaggtacccagggtctcttgaaagtaatgcagagtgactgtaagtgtattttatggaagaattggacatgactctatttctgatcaacttgcttttgccttctttcctaggaagtgtgtagagagctctggtgtctcagcaaaagcaaccgctgtgtcaccaacagtattccagcagctgaggggacactgtgtcaaactgggaatattgaaaaaggggtaagctcaatgatttactacctgtttgacatgtatacaaaagtgataaattgctggtactgatattcaaccaccaggaagtcttatatattcatttaaaatctacttgaaaataattaattcctagaacaataggttaattgtcataccttggtagctgcaaatatgcattatttaggaaattacagttggtaagtctattttaggtcagtttcacctttattttggtatatgtatgttatatttgtaccaaaagtaatgcaacaacaatctttttgttatgtaatgtagtctgtttactcatataacatagtctagtttttctggtaaataattccccggaaaattatgcaacccagaagtagactttataactatagtattactaaagtcacttttttttttttttttgagacagggtctcatggtctcattttgttgctcaggctgtagtgcaggggtacgatcttggctcactgcaacctccacctctggggctcaagcaatcctcccacctcagcctcctaagtagctgggactacaggtacacaccaccacgcccagctaatttttgtatttttcggtagagacggggtttcaccatgttgcccgggctggtctcgaactcctgagctcaagtgatctgcccacctcagcctcccaaagtgctgggactataggcatgagctaccacaccccatctaaagtcacttttagattgcagtatgagagaagggactagtagaaaaataataattaaataatttattgaacatagaaattagagcaaataattttagattcatcaatctagctttcaaaaatataattattaagacttatttaaacatgcttggcacagtggcccgcccctgtagtcccagctaagtgggaagctcgagtgggaggatcactcaagcctagaaattcgagtccatcctatgcaacaaagtgagagactctgtctctaaaaaaaggaaaaacaacaacaattgttgaaacagatagtagcagtttgtgtactactcttaaaattttataggaattgctatttatgtaaatttaaattctagaatttatttctatagactgaatttgcaataactattactgtcatctgttctcagttctgacttcttccatgttagctgggctagtttcaacaaggattatgctgagtttcagcttgcaatctgatgtttaagtaaaaaagaatgaaagcttttgggcagctgtcacagtttattaatccttgctgacggcttcattcaggacccatgacctagtgccatgttgatggcttttccatgctaagtttggaaatgttggtaaattatgctaaatatatgaactgatagggtaattgaaaaaggatttagaatctttttttttaagatattgtaagtagccaataaaaatacaaagaaattcatgcactaccaaaaattccttctattttttttcactaaagtaatagaaaatattaggaattgcattcttgaaacaacaatccatatttactttggaaccaataattcttgtcaatttacctcagtctctacttagaagaaatacacaaccataaagagggagagtcacagggagaatctgtttctttatttgccattgatttattattattctcatgatcaagttcatggtccacagtaaaccactagtagtggctatctgagaacacatagctcagctccaccagtaaattatattgtaaatacgtatttaatactgatcatttgtgcttaaagcagggccatcaaatgtcatatcttatagcatatatgtgcgtatatatgatagagatgataaatttcttggaaattacaatttgagggataactagaaatactctcagacaattttaaagctaatggtattgaatttaaatttcaataagcaaatagagaggaaatgtaatttgtgttttttttttttttttttttttagacggagtatagctctgtcaccaggctggagtgcagtggcactatctcggctcactgcaaccttcacctcctggatttaagcaattctgctgcctgagtagctgggattacaggcacataccaccatgcccagctaatttttgtatttttagtagagatggggtttcaccactttggccaggctggtctccatctcctgaccttgtgatccgcccacctcggcctcccaaagtgctgggattataggtgtgagccaccgtgcccagccaaatataattacttctaagcacaaataagaatgatcacagacaagagaaagtgataaaatggggcaaaatatatttgatttctaaagattcaccttcttaatctaggttaatcatcaactttttgatccataaaccctttctttaaatgaagtctatagaattctaatatatatacatttgaaaaaaatggaaatgctctggtttaaaaagcctcttgcctgccctttaccctgtctttggacctttgccagcttctgacatacctccaaaggcctccatgaaaaactatttaaaaaccttgtaaatatggcaaagtttatatgtcaaggggtcatttatattcacaacataagagtgtactatcataaggccaatatagcggatatcactgtctaaaacttatctacaaaacaaatctttgttgtttttccagagacctggaagatagataaagttttaggaatgacactaataagtcttaaaaagaatgaataaatgaatgaaaaaaatacaaatgcagattcctagaaaggaaaaggatagagcagtagatggtcctcagaataaccttattaactttgaacttatgaagaagctttcagaaaactaaatcagcctgcatttttaagaaaaaacaaacaaaaagaactagacacgtgagcaaaacacttctttattttttatcttttactaactgtattgaccatgttacctcttgtatgaatttttgttgttaatttttgttatttttttctccttaagaaggaagaatatttactgttgccaaatggagattttgcccttagggctataatatttggaaagtaaaccagacctcagaattttgacccagagcaaaacagccctgcaaagagctattgacaaaattaaagtggaattttcaattaatctggtcaactttctgtggttagtttgtatacttgccatctaaaaataattgacatcccagtaacaataatgacaaagatgatgaatatttaagaagtacttacggccgggcctggtggcttatgcctacaatcccagcactttgggaagcctaggtgggctgatcaccttaggtcaggagttcaagactagcctggccaacatggtgaaaccctgtctctactaaaaatacaaaaattagccgggcatggtggcaggcacctgtagtcccagctactcaggagcctgagacaggaggatcacttgaacccaggaggcggaggttgcagtgagacaagattgcacgccattgccctccagcctgggcaacagagcaagactccatctcaaaaaaaaaaaaaaaaaaagtacttacactatgcccatcacatgttgctaagtactttacaatcattcttatgtttaatattaagagaaatcatatgaggtaggtacagttttaactccattttacagaagagaaaaataagacttactagccctaaattgaacagtaatttaatggcatagctgacatttcagcccaggtctttctaatttcagagttgaaatctttgcctctctatgctgactctaattttactttatcttcacatgagaaattttgcaaagtaaaaaagcaatttttcattgtcacgggaatcaagtgggtcactaagcctaatctaggtggtgacagtgtatttcgccctttagtactaaacagatttttcatttttctacctgtaaacagtgtttccttttaggaatcacaataagaaagcaatgtgagtagaacattgagctaagcatatatgattgtgtgacaattggtaaaataatgaatctctaaaatgggagacaaccaatttctatatatttcgtagagataatataaggatagaattagataatatttcagtgagctttttgcgggcctcctcagagggaaagtgctaacatattactagagtatcatcaatacttttcattgttatttgccaaccttaaatgatggtgggcagaaaattctttggcagactgccttagctggcagtagagagtataagcatgagtttgtgtgtctccgagaaatggatgaaatattcacaacctctggtcttaactctgagtttcaaaactactctcaccagaaggaacaggaaagaacctatacactgtctagccagcagaataaaaccaaagctgctcatagttttctgaataaatctttttttaaaagggagggggtagaaatactgctcgagtgatagcatagacatatccagaggattgaatccatgatgatctcgtcaaactctggctgcaaaagatatgggatccctgcccaggggcgcagttccacaaatgttccatgtaagtatgggaactgttccatgcacatttaacagatggagtaagaaatatggccaaaaaattaaaaactgatctttgcgtgagtcctggggggtctgacatcgctattacagccattggatgttcgcctgaataagccattcaaggattgaataagaaccatatggtctgaatggatgtgctcagggacagtagcattaaccaaaggaggaaatttgatgagcccagacggtgcgctggtactgtgtgtctatgggtcagtctcctacaaatcaattaatataactttcagccagagagctttccttggatacagcatcagcaatagccctttggacaggaatcagagcaatgccataattgacgaaatagtaaataaggatttagattgtaaaaactttgatagtagtgttggcattgttactgaacaggatattaaggataatcaaaacccaatccttgtaatccctgttggtgaccacaaagaaggcttcaaatactggcttatagccaatagattgatttaatgactctacaagacccaattagagatatagcccagtatttgggtttacatgtaagtgacattgattcctaatatctttccataggaaacacagggctggattagaatagtattattaaatgcccttctaaagcactggatatataataggacgtttgcagccttagttcttaatttacttagggtagaatacagtatgttttgactggttcccaaactataaacacaggaagtgaagaaagaatagttcttccaattgctgtagaaatctaaatagtatgggatgacaacttctgatttagaatttgggctgaaatgtagctttagcattcctgcacctgcacagtggaaagataaggcttttaatagtgctgtgctccaacactcagctcttctgacttgggaagaatgttctgtattgaatcactaatattacttcctgcaaaatcttagaatttccttagaggtctcttattccaaatgctgcctggacccagtactggatattaaaaggtataccataatcacatctagaaaaaaattttttttaaatactgcatatactcatcttgaagttttccttcatggaaatgtgacaaattttcaaagttaaattatttgatttataatgtatctttcttaaagtcccttgatgtagatcataatatttagtagtataatagcaagagatgttgtttaataataagtagtgtttctaaagaaggctcttaaagcctgactggaatataccatctttctagattgtgttgaaaacatttatttaatttagaagaaatgtgaaaagcaataatgaacaatataagattttattcttggaaaaaaatatgatggcttcacttctttaacctttatgaatgtggttaaacataccccaattagcaagaagaaggccaaatttatccaatttatccggataatttagactaaagtaacatgactgttatttagaatagtccaaaatcactagattggataacctttgaaaataaagattagaaacttgtttgcatctacatatttaacttttctagtttaaaacgtaaagtaaaattctatctctctgtaaatagagcttttacaggtttggtaacttcaggtaaaagaaagagtaaaaacagatggcacaacactcagaatctcattattatgtggttataagatttatatattccaagttgctttatttggtgtaatctaattattctactcattatttacacacattaaactcttaatttatattgattaatgcaatcagctagaagagtcattcaaatcacttgatccacatgaagtccccatgggcttcttaaagcccttttgttaattaaataagtttcttctcttaaaatcatatactacattgatgtttactactaccaaaggagaaaagtagccataattataaagagatccatttttataaataacaaaggaggaaaacaaaacacgaacacttctgcagagatcaaaatcaaacaagttgttccgtaggtttttaacttttttgaaggtatgtatgcgttgaactattttaaaagtttccctaatctaaaccatattggaatcaagaactaaaattagtttccattttatagttaaggaaacaaaagagaagaaagaaaagtgacttgctttggatcaaagatattgctagaactgaagtttgtaacataaagtcctacacagaccaaagttgttaacttgttagctagttaactaagttgttaactagtattaaattagagactacactcttgtcaactgctaggtgactgatacttatattacaaattatttacccattaatgtttgttacttaactttctgataaaattacctattatgatatagctccatggaatagatataaccaaagcatgaatttatgcagtataaggccttttagcaaaccatttatgaaatactactgttgtgtagactttagtgatgaacactgagcagcattttacgaagtgaatattgtatttatcatttacctaaagaatgactttagttcatgtgacttttctcactgccctacattttgtgagcattctagaaatgtgtaataatattaataaatactttggaacctacatctttaagtattcttgtagctctcacaattcttttgtcacctgacaaatgaaaaaacctgactattttttctctacaaatcataggtatatacaaagaggtctgaaataacgtgtatctacagctgtgtttaaaaaaaaaactctagtattattttgtattttatgtagttataaaaatccagtaaagcatgttattctttaatgtcttcaaatacataatcatacacctccaatggatttttttttaccactaatttttttacgtattttagacagataatcccttttctactagtatgtgatcttgggcaagtcaattcctttaggttctggtgtcctcatctgaaaaactgaagtgcttaggccttatgaattctgaagttcctttgagctttagattcaactctgtgattatataaaataaatgtaaaatcaagctttaatgttatttgaaatcaataatgctaagtttccaatttgaaaaaataggcatgttttaagatttgaagtttctgaaagtgtcagttctcattaattgcagacagggaaaaaaaaaagcagttaattgctggccaggactatactgctcagttatttgcataggaaaactgggtgcaaacataaatatttttacacacagttacttgtagtaagaaaaccacaaaactggagattatttggccagatgttgtgacttttgtataggtgcagatctgatgcaattaacatatcactataaaaattgttcttcaagaccaactagctaagtcgtaagttttcaagtggaacattttctccttctcaagtatacattatcagtaaccctgatcacagggttgatactatattattggtttagccagctgcctcttcttcatcattctgaacagatgatctttttttcttcatgataatttttattgctcaaaactcaataatctttcttaatatcctgttttaatatatatcagacttagggtcagatattcttccctacagccaaggaaatgttaacttcctcttgcctaattttttatagacaaataattgctcagcactgctctaaaaagtccgttatgctgttacaactagcacagctcattgattgtcaatttggtaccatctactaggaaacaaatatgaatttggtttctttaccctccagtatctccagttccttcctgccatgtgataaccaaaataggacacaattccttaatttaactacttattaattaatctaattaatttttgttgcatacatactatgtgccaattaattaatctaataaatttttgttacatacacactacatgccaagtgctattctaggcattcattgtttccaataaaacgttttgtggtgatgcaaatgttctgcatctgctctgtccaacatagtagccactagctacctgtggctagtgggtctgaggaactgaattcttcaattaatttaaatttaaatagccacaagtgactcttgaggcttttacattacaaagaagtaatttgataagtaaacagggcaatttaaagtagtggtaagtggtaagagggaactaaagcagtaggacagaatcactgttacatggtctgggagcaggaaagggtattgaggtatcattttagaatgaggatggtcaaggaaagatctctctgttgaaatgacacttgacctgagactgaaagatgagaagacagcagtagaaggaattgggaacaaagcattactagaaggaccagtaaattcagatgctctaaggaggaacaagattagtgtatgaaggtggaaatccaatgtgtctggagtaatctgtgtaagagagagaatggggctgaggaaggaggcaggggctagatcactaaatctactgttgatcagtgttatggaaataggaaaccactgagtttttttaagcaaaaaggtggcataatgtgatagcatgtttttaaaagatctttctaaatgctctctggaaaatagattctaggagaaaaaagtagaagcacaatgatcaggtaagaagctactccatttgccagtttgatctagagtatagcgatgaagaaggtgaaaagtaaaagaattccagggatattctggagataaaaccaacaaagcttggtgatagaattagtataataaactgatcactttctaagtaccacatcatgatcccttttcattttaatataaggttgaatttttattaaacaacctaacattgatgacatttgttcaactttgctgataaccatgttccttattgttattcatataaacaaatgactttcatagtagcattattttggtgtgtcaaagtttgataatttgaaaaatgcatcaacaaaagtctacaaatgcttggtttaaaaaagactttcattttgccatattctgcaaataagatttatcatgctagagttatgagttgattttgtgatgtctgtgtctcaataaattattcctggctttctacttaggtgcagtatgtgtggtttattacggagagtagagctgagcagaattccagtacatatgttcatgtgggggccatacacatggctagtcagtgtatacaagggtttttttgtacccagtccctaatgtcttggcattacttttattatgtctgcagtgctcatgtagatgaaatgccacaacacattcttttactattgtagcctcaaccggcttttttttttttttttttaagaaagagcaattaccatcataaaaattccttactggggaaccttccatattgcgttatcattccatgagtctaataatagtgaaatataaagaaaaattttaaataaaatactaaaatatctaaaaaagactttgaggtctatagctagctctataatgagaaacactaaaagtcaagaggaatagaaacaagggaaaagaagcaatgtgacttttttttagaactcccaatacaggttagaggcttataaatcatggtctagctaagataattcgcaagtcacatgcacattcaccagtgtctaaacacagttagagaactatctgtctgttatcaattgggagaatgctaatgcctatagttggtcagtacctgacccttatgtatttctatcctgatagctctatctgcctaaaagctaattctgtgttttctgtgaaatcttgcagtggtgttatcagggagattgtgttccttttggcacttggccccagagcatagatgggggctggggtccctggtcactatggggagagtgcagcaggacctgcgggggaggcgtctcctcatccctaagacactgtgacagtccagcgtaagtagctaaagtaagccggagccaacaaaaagacacagttggaaatgattcaaagctgtggtttcacatgttatctgtaaaaacgtttcgctagtgagccaagtacttgtcttcagaacaagccataggcacaggaaagtggaggagctttgttagacagactttcttcttcttcctttccccttattgtgtaaccaaaaataaaatgtaaaaaatagaaagtattgtgtatctgtcccagataagccagacttttaatctaataataatcagatttcctcctccaaaaactactgaattatggatgaatccagatctggtcttagctacattactattattcccaggaaacctaaggtcttttcacatgtcacataaaattattactgctacatcagtattaaaaggaccaatgagagcacttcaagggttgaaatgccttgattcgcatcacaaatcacaatgaaaagaatactgcccatgtgttaaaatagtttccattcatatgcccccattaatcatcttccggagctgccaccacttttctccccatgactgttttatgcaggtcagactgcacctcttccaccactgttttctccagccagagtccccctggcacaaggccagcaccatcagtattctttgctagctctgttgcttctccctcctaccagtgctccatgcccattacaggtgaacggttcctctagttgtactttcttgtcctccctgagactaaactgttctttggctgccgcatgtcaagtgcccatttttgtctagaacgctggttgaggaccttctttcccagctagtatttgatggagaatgatgttatgataacggcttttccttttttttttctcattctgaaataaaagatggtctatttttattttttagtttttctccatttttaactcaggatccctctctttggttcctgtctccaactgtcttttttcttttcttttactctttttagcttgttttgctttatgttagttctgtgtttccattctcccacttcctatcaattattcctctcttgctaaacagagcttcctgttacccattcataaaccagtcatgctaccaccatccccactatcttgtttttgtctgaccaacccatttctctcaagctggttcaagctgagccatttcccttccttacttagagtcagcattcactggcattcaaaatatattcaaaatgtagctttaatgatcccattgataccagtgagccaaaattataatttagacttgatctttttaaaaaaattacagaataactaacgtaagttcaactgaaagctgctataaattaatcaaagtataaaaaaccctgtgataaataatatacccagatacttaagggaaaaaactggacctcttttaaaagaagaaattagttgtttttatcactcaatggtagtatgcccaaataatagcaatggttttccctaatgttaaatcctttaaagattaacttatattagtcaaatatttgacgtcttactgtttcattaattttggtgaaatataaaatatttagtatttatataatgcaaagccatctgatttttagatttaaatttttaaacttcatggactattttgaaataagatggaaatttgtttttgcattattcactttgaatgaaagctatttccaaggagttatttcatgtctccttgcttcctgtctggagtaaaaacaaactttccatttcctagttggtgaacatatagcatcagattatggattttgttgaatatgatttaaatggcttttcattataaataagtgatttttactatgataattagaaaatatattgattcaattgattttcttgagaatgtaaatcatgacaattaagaatcttataaattactagtaaattaatacaaaattaatagtactattaataaaattaataataaactgccttaatttttatgttcaacaaccataattattgctaacaatcaccagcatgattactttaataattaaaacatgtcaaatgatatattttttgaaagtaaactttagtatgttttcatcaagtaatatatatactctttgtatggacagatgtattagtattcacattttaaacacaatgttttttcagaccttcaggaggtggaaaatattgccttggggaaaggaaacggtatcgctcctgtaacacagatgtaagtaaaaccaaactctgttatgaaaaattagcttactctttccctagagtagggaaatttttttaattttaaactatttgataagaaatacatgtgtgtgaaggtcacattaattttctaaattgttaataatgaatggagctggcctcagctccatcaattccattaataagggtcaagggggagctccagtactgggaacaagtatattcttccccaacagatatcaagagaggcacacacaccctgaactgccctgccccacacactcacaacttcaacaccactatctttcttgactccacagaattaatcttattatgccctttattccattttatgtttgccactgcaagaagccccagactcctacattatccctcatccaatagataagatgctgtatatttcctcctctgttctgttttgtatccctgcccaactactgaaacttcttctgtactttcaggaattcaaaacccctaatactcacttctctgaattttccttcctttcaccttcttactttaatggaaactagctcttcctctgaagatattgcttctcctatagtcttcaaactgggtaggcttttgttttctctcttagcccttgaatgactgagcctcaaagtggattgacaatgtttatatctcattactcctccagatcactcttcctccccctatctaaaaaccacagcttttaattaatgtcattagactgttaacattttcatgctttccacctctactactgtcttaattcttggtgattttataaatatgcagatgattgttcacttctgaatttttttcataaacatacaaacattctcctatctgtaaacaaacaaaccaaaaaaccatgctagttattttcccattgccttgtttcccattgaaacaaaatttctcaaaagacttgtctgtacttactgaatccatttcctctcttcacattattttttctagaattgctcctatcaggtttttgccttgatcattctatggaaatactcttgttaagtcacaggtgatttccatgctgttaaatctaatagtcaattctaagtcttcagcttactacttcactttcaataggcttccgggaaactacaacattttagttgttcttttacattaatgcttactcctcttcctccttcattggctcctactctttttgtttgtttgtttgtttgtttgtttgtttgtttgagacagagccttgttctgttggccaggccaggctggagtgcagtggcgccatcttggctcactgtaacctctgtctcctggattcaagcaattctcctgccttggcctcccgagtagctgtattacaggtgtgtgccaccacacctggctaattttatatatatatatatatacactttttagtagagactggggtttcaccacattggccagactggtctcgaactcctgacctcaggtgatccacccgcctcggcctcccaaagtgctgggattacaggtgtgagccatcatgcccggccagctcctactactctttactctgacctcaatgttagagtacccaagagttagtcagtggcctgtgtctctgctctaccaatactcctttctttggtgatcttatctggttccattgcttttgtaccatttatttgccatttgacccaaaatttatatcttcagcctgtacttctttcatgaattccaggttcatatcttatatttaaatagacttttaatggacatctaatgtttaacatgtccaactgttatccccaaaacattttctctactcgttcttccagcagtttttcccatctcagatgtaactccatttggcttacaccaaaaatcctggagtctttcttgacacctttttctgtctcatagcttatatccaattcctcaggaaatcccattagttttgccttcaaagtatatggtaggtgctgcctaacttcactactgctgctctggtctaagttaccattatctttcacaggattactctaatagccttttatgaggattcccctttgctatccagtcctcgatataggaggcagagtgaatcagattatcttttactcaaaacccctcaatggctccccattttacttaaatccaaagtcgttacaatggcctgcaaggtctacacaatctggctttcattacttctctgaactcatctcttactattttctttctcgttatctctgctccagcaacataggtccccttccttaaacatgcctgacatgctcctaccttcgggcttttgcagtgactattccctttgccttgtgtactcttctcccaaaatatctgtgtggttaactctctcgcctcacctttactcaactgtcaccttttcaatgagaccattctgagtactgaacttaaaattgcaaccctctccactccctacaactctaggactcctaatcttccttaccctactctattttctgcccttctatcacctatatagttgatttgtcatatttaattctattaaaattgtattttggagtattttggaataattacatgtagcttcaattatgatgatcttttagagttaccagtattatttattcatttgtttaaaaaataattgaatgcctattgtatattagaccatgcttgggtgagaaagacaatctctgccctcaaagagcttataaatttattgggaaatcacttaggtacagacaattataatacagagtggtaagtgatatgatgggattcagtatgggatgctatagaagtgcatagaatggcacctaacctaattagggacttaaggactttgtcccacaggaagctagagacatgaagggcaaatctaaggagaccagaaaaaagtgaaaatgagagcatcttagaaggaaaattaagtgcaaggcctagaggctaagaagtgtgatctttatcttgggacatttgaaaccattgaaagagcctcagattgatgctttagatgagaatggattggtgaaagacaagattacaacagaacaataaatcaagaaaaacgtaaggatattggtaagaatgattgaagtgctgagccatgggctctgcgctaggaataacagtggagtccaaagagggctaacagggaataaattaaggacctaacttaaaaagccataaaaatcaaagaaccagaatagtaggaaatacagggtgagagagatagaaggtgaggagatcagagaatgaaatgtatttgaattaaagatatgacaagtgagaatattctcaatgatgacaaatctggagtgtggccatgggagtgtgtgcctaacttgactggaggtaaaggagttcaaagaacttaagtcttgagagggggacctttaacatatggatattaaagtcactcaggatgctactggaacttaaaatatagggtaatactgtgaacaggctatcaaactccttaataaatgagaaagcaaggcacagtggctcaggcctgtaatccctgcactttgggaggctgaggcaggcagatctcttgagtccaggagttcaagaccatcctgggcaacatggtgaaaacttgtcttaagcaaaaaaaaaaaaaaaaaaaaaaaagagagagagagagagagagagagaaaaagtgacccttatttattaaaccagataggggtgaagccagatagtgatttggatgaacggtgtgaatctcagaagaatggaagttttatataagggtagaagaactgaatacctatctacaatatatcacacttttaggtagaagtgagaaaaaatcaaacccacctctcaattcccaactcattccattattatataattgcagggttgggcgtacatttagaccctaatgatatatgtattatatactgtaatgtgaataatggtaacaggaaaaaaatgccaaacatctcagcttgttgcattttattcatgagttatatgttagatgttcagattgtagaacttactattggtgggttgagatttctattactgtctttgtcttctgtttcatctttcagcagattataaggagatacagttaacataactatattatggatacatatatatttatgttttcttcattaatattgactctactagctcagaacttgaggcaattctgctgtcatactaaaatgtattttcatgctatccaagttaataaagttgtctgaatgtaattttgtttaagctggggcttgctttaatgtaatctaatatataaaaatttaccaaatacctaatctacactagcactgtctaatagaactttcttcagtgatgaaaatattgtatgtgtgcactgtccagcccgatagccactagccaaattagctattaaggacttgaaatgttgctagtgcagctgaagaacagaaattctaagtttaattagttttaatttgaacagccccatgtggctggtggcaaccatataggacggtacagagctcgacagtctagctatgcaacagaaaaattctcgttataaagaagattgtaaattttatgtgtaaaattctcaaaacaaatcactgttagctcataaagggttcacacctgtaataccaattactcaggaggttgaggtgggagtatcacttgaacccaggagtctgaggctgcagtgagctatgatcacaccaccacactacagcctgggtgacagtgagaccctgactcaaaataaataaatttttaaaattaaattaaaaaatgaataaatacataaataaatgtagagagacttccatttttggtcatgatagactaggttattctgacaaaattttttttaattgctcagtaagattttttttttaatcatttaaaaattagcaaagaactgacaaaataatgaaggggatgccaggaggtcaaattctatgagagaggggaacataaaaagataagtagagcatccaagcacctaaggtacttctgccctgatgatattgagaggaagagaaaagataaactgttccagtgttgtttctgaagtattacgaaagttgtccccggatctcctcccctgctcctcagcaaatttttttcaggttttcaaacatcacatgctctcagccataagtgggagctaagctatgaggatgcaaaggcataagaatgatgcaatggactttgagggcttgggggaaagggtggaaggggagtgagggataaaatactacacactgggtgcagtgtccgctgcagaatctcagaaatcatcactaaagaacttaggcatgtaaccaaacagcacctgttcaccaaaaacctattgaaataaaaaaattaaaattaaaaaaaaatttcttcaagttttatttgccaggaggtcactgtggccacccttaaagcagccattgacaaaaggaatgagattaccagaattggtttagattaatagtgatttgccctaaaatggggttagggtcacccctcctgagaggtagattcgtaagcaaaatatcgaacttctattagcaagaaagcagagagtaatggatagtgggtacgccacaggtgtctacctcagagctattttaatttctatctttactagtagaagtagtagccacagatgtagtggtagtagtaggagcaactgctgctgacatttactgagcactactatgtaccaaacatattattgtaatcatattctcttcccatactgagagaagttctcctccttcttgtcagtagtgagttggtttggtggagtattttatatttccattctttcaacataaatctagaaaaactatgataatataaagttttggtatagtttgctctgttacaaacttgcttctgcaacacaaattatcttctatttgattgttattttgtgatattaaataatatagcagtgggagtcaaacaacatcagcatagctgaggagcaaaggaaaattggactgcacatgatgaccgttcaccccacattctattttttgctcagtttggccacgtgcagcatcataggagcccttattatgtgtttctgcctgttcttcctacactggcctcctgtttctctaactcaacagtctcaactgataagctttccttattttttcaagtttttaaaaagataaaatcttacatttactccagtatttctttgctaggaatttgccatgtgtttaaaatattgtgctagcattttattagaattttttctttttgttttaatgccctgtctttgaatcgtctgcctctaacccaatttttcccatatgcctgctatttttagtgtgcaattttgcggaaagagatttttcatgaatgcgtgtgtcatattagagcagaagcgtctacattttaaaaatctattctaacagcttctattatataacctatggaatttaataataaatcataaaaggtgaggtgattggagttaagactgagtaatgtggccgggcgtggtggctcgctcctgtaatcccagcactttgggagtccaaggtgagcagatcacttgaggtcaggagttcgagaccagcctgggcaacatggtgaaaccccttctctacaaaaaatacaaaaattagctgggcatggtggtgcgtgcctgtagtcctagctacttgggaggctgaggtgggaggattgcttgagtgggaggatcacttgagcccaggaagcggaggttgcagtgagccgagatcgcatcactgcaccccaggctggatgacagagtgagatcctgtctcaaaaaaaaaaaaaaaaaaaaaaaaaaaaaaaaagattgaatattgtaagcaagactttagtattttccagttaacaaagaataggtgttactattggaacagtatggtattatgtctgtgttctttaaattaactttgatgctttttctaaatgtgtaatagtttaaatgttcttttttccagtgatgcccaggtgtctgttatgtgtgagccaccccaatttaaaggatttaaaagaatatacctttcttttatcaaaccagcttcctgccttagtatatattttacataatttaatactatgcatatcatgcatattgaatggtcttataaataagatttgaaagaaaactttccaactagttaaaattaatttgacagtcaaggactagataacaatccataagcgtttttggcttggtcatttgcgatcccaaaacttttcttgaaacttaattagaagtaatacagtgaataagttcaaatgatcctggaagaattttctaatcagtgctcaaaaaaataagataatgtcagatagccaaacaagctggagaacgagagttctttatttattgccatgaatctttgagacttgctgtgtgttttctaatgtatgctcaaagtgtaagttacaatagaaaatagaaaattggctgggtaccatggctcacagctgtaatcaatcccagcactttgggaggcggaggcgggtggatcgcttgagcccgggagtttgagacaagcctgggcaacatggcaagagaccatctctacaaaaaatacagaaagtagctgggcatgatggtgcatgcctgtagtcccagctacttgggaggctgaaatgggaggatcacctgagcccgggaggttgaggctacagtaagctgagaggctcactaccctccagcctgggtgacagagaccctgtctcaacaaataaaaaatagaaaaaaagaaacagaaaagaaaatagaaaatccagaatattaggctgattcaactgtgtttaatagattttacccgaattcctttaggaccttgcaacccagtctacatagcccatgtaatatagtagtcttgatcctctcatttctgtggttgagaagttggtgctatggattactgcatggttctcatggttttacatataataataataattgttattagttataactctctggttagagttgttagcttatagcactatattaaaatcaaaactaaaaaatataataaattagaagatcagaggaaaaggaaaataatataaatatatataatttaaaatatatataaaattgccaggcacaatggctcatgcctgtaatcccagcactttgggaggccaaggcaggtggatcatgaggtcaggagttcaagaccagcctggccaagatggtgggacaccgtctctactaaaaatacaaaaaattagccgggcgtggttgcgggcgcctgtgatcccagctactcgggaggctgaggcaacagagcgcgactccatctcaaaaaaagaaaaaaaaaagattggtcacaaattttgctccgagcggaattcctagtaacccaagtaaagagacaaatgttatcagttctaagattcataatgtcttgtggtcatgagaaaaggagatacatccgcaaccaaaaaggaatactttattattttgaagctttgatattcctcctatgtggatccctacactggtgaatcagattgaaacatacaaggcttataggactcttttttgcttaggttaatggagaaattaggacctagagtcaacataggccaagtagtcttaaaaagtagcaagcacaaaaacagtatatctgcagtttctttctaatgctgatttaatttctaccccaaacacttaagaggtatagaaatggtaggaagagaagagagctctttggtggaaagggaacagggttgccattaactcctatccctcttaacccgatttcaaagaaaagatccacagagatagaagaagcaacttatgaagacaaaactttcattctaagaatttaagaatagatcagaaaaggatgtcaagctgtaaaattgtcctgcccactctcaacagcaacataattagcctagatgccgaaggtattcagttactagactctgaggctgattagttgcatcaggatgtgttggatgggcagttggtttcctgcatcactgtttttcaccctagaaagtcttcaaaagcagctacacaaggaccctttctttgatatacacattatggtctccaggctggaataacaggtaaagacaatagctgcagtaggaacaaattaatacacttttcatcttgaagctactgagaaaccaggagcatttattaaagatatataggagaactggataaaatttggtccttctattaagccaggaactacaatagagtttttggcatcatgagctaatctaatagacatggccttctggaacctgggtttggagggcagaattttatggaactcataatgcttgagagttcattgactgacacagttctcgtttttgcacatagagataaatggttgattaggtcctgacagtttttataaatatgcaaaggtagaaactaacatgattttctggcagagccattatgaaaagtgaagaccccagatctgtgctcaatcttctgaaaaatgtttgcttaggagctgctcaaaaatatacttttaattattatgtatatggaatcttctttttactggcctaaagaacactgactactaatcaggcatttctgtttttctgaacaatttttcattcaaatgacctaaaactatcatgcagaatgttctaagaggatacaaattgatgtacatattgtaactattttaagtagcagaagttaaaggttagtgttgtgaatactagaaaacttactttttgtaaagagtaaaaatatggctatataaaggttataaaccaaatttcatatcaaagcctaaagaagaaatattagctactatgaaaaggacttttccatatttctaaaaggagtttcctggtgcttagttgttttccaaaaacaaaatgatctttgtatttttcttattccatattacttgtgatttggtgtttacttgataatatgattatgatagaacttctggtgaaacatataagctccactttggctgggatggaaaggcacattattcttgcatattaaacatttgatttcccttctttatgcataaaagctataaaaatatatggaggaaaagggttttccaggtcatctgtggtctgttctaagatttaagtataggttatgtagtacttgggtgtgttctcagtcagctctgctagaggagtatattattcagcaatttttttccttttcaatgcattgcctaagatcattaaacagtgtttttgctttggttgtggcagacaggaaaattatatatttggaagtaggattgtggtgaaaataaaagcatgcagttggaagttaaattaacttgagtgtgaatcctgactgtgacacatgttgctatttgaccttggcaaatcacctaacctctctaaatttctgttgactcttatataaataggctgtatgaaacttgcagagttgtttgacaattaaaagaagtaacatacataaaacatctagtgctattcctagtacctaactggtattcaatacctcatcaaatcttcaaatcacttttctgaagaggaaagacaagtatttttaaaaagaggaaactaaagcttagcaacaggctaatgctgtgaaagagatccagtaaagcatggaatttctatctagtgctcttaaaagagatgaagcccttgggaggtgggtgtggcaaggtaagcttttctgaaagaattgggtcaccttagacattgtcttacttccagtctaacctcaccagatagctagctgagaaccagatagctgagaacattctgaaactacacatcttgccctcagggagagttgcagggtaagtgaagacaaggtacagagttgatccattgatgaacagtgttataatcatgtcttaaattataattagaaaacaaatatgtgtcaaccactttattcttataaacatactttatatatgttactggtagaaggtatgcgagttaccagtggtgaattcctatgggtctgcagcaacctcaattcttgcctcctcagaagaaagaatacaactgaggggcataaggcagaaaaagagactgaggcaagtttcagagctggagcagaagtttatttagtttatttaaaaggctttagaacaggaaagaaaggaaacgatgcttggaagagactgcaccaaggtcaagtgcagtgtttaaccttcatcctagaacttaataggctggcccctttctcatgattcttcccttagggtgggctgcccacatatgcagtacactcctgcccttgggaggtgagcattcccaatgtgtttaggaagttgtacgcattttcatctgaagcttttcttcctttttctggtggagtgaccctggaaggtcatactccaccattttgtctcttaatgtgcatgcccaggaagttgcttctccccagcacgtgcattcagttaacactttagtgcaacaggtgtggaccatcaggaaatggcctctccctggcaccagctgccagtttatcacttttagagaggcaatataataattgccaaactgtcacctgacattcctagtgggtggaggagagccctttcctaccctgctcatgcctatctaactacctgtaacatacacacagacagacatgcgcgcacacacacacacacggcaaaaaacaggaacaatatcttggtaatctttcttaatatgaattttatggtgtatttatatatttatgatgtattgtatatatatttatggtatattgtatttattatgttttgagaaataaggactaggtttttagcacaaaatagagcttgtttgtttattttgtgctttaaaaatacttttaaaaattacaaagtaaaactttgtttcttaacctttttttggagacagtcaggctctgttgcccaggctggagtgcagtggtatgatctggactcactgcaacctctgccacccaggctcaagcaatcctctcacctcaacctcccaagtagctggaactacaggcatgcaccaccataatttttgtattttttgtagggttttgccatgttgtccaggctggtctcaaactcctgaactcgagcgatccaccctgccttggcttctcaaagtgctgggattacaggagtgagccattatgcctgacctgttttttaatgtgtttataagctcagggaaagagttttgctgtaggtagatggcattttaattaaattcagactatttaaggcatatacaagtaactttaatttttaaaacctgcatagaagattatagtatcaagcatgacactacattcaagtttgtctggacaatgtgggttatctgcccttgttttcttttgctttaaaagtaaatatatagtgaaaaaaaatcagaaactatttgggagaaaaaagagaagaaagttgaataaaaactgaggttgagatgcttcactacaggcattgaccactaaatttaactgtatttgaatgccctagtatgaattactttatcagtactatctgataactagggagtcaggaaatttgtttgcaacttttaaaagagggtatagaagcaaggcttttgttagcgcatatggtacctttgtgtaatttataaaaagatgcccatctgggtgaacacataaaaatgtatcctttcacagtgccttgtcaagtgcatgacttgctaagcatggcaggggttggatttcaaactccctcaacaaacagggggcaatctactaagaatatgttgttttcctgtagaggaagaagaaaatgaaattttggaagtgttgaaggttgatctagtgtaacagggatgacgcaagagtgaatttggtatgaaagcaaaaggaagaagcagaaggtgcaaaaggagtagagaaaggaagcagatgaacagaagaccagttttgctcagtttgcaattttccctgaggccataggagtcattctatccttccagcctgcatatcttcctttagaggaggagaggaaaggaaagggaaagggacaaaggcgttttcattcttggctgtcttatcatattaccaataagaaatgatacatcattttcagaattttcctcattttcaagacattttgatgtgtatttctcttgaaggtaagagttttgggggtatattttgcaaatgaaaaaaaggcacaaaaaggattggggacttgccaacgtcaccctattctttgggacaaaaccaggattagaaccccagtaatagaaatgccactaaaaagtttgtaagcagaagctagatttctttctgtagcaacttttaggcctcaatgaattattcctttttttagatttgtctaccagtacaaagtattgagtttagtcagaaggagatacttctaaacaagatagttggaagactattgttaacttatacagatctctgggaaagagagtggtgataaagatgctattattaatttatttctttgaaaatactaagatctaaagatgctgagacctgcagctttgctctccagatttatgtggggccctgctagtttgttttttaaaggagaagacgcttggtgagtgttagcactagaaggctgaaaatctgtcaggcttttactttaaatatctgttgcttatgcccactgctttctgttatggtttctgcatagtgtcagcatttattatccttaagtaatttaaaaagcattattctttaaaccctctactattcctaaacaaaacaaaaatgtgttttacgtaatttttccttaaggaattcctctttcactctcattttttcaaaccagcatatataattccaactgagtctatttttaatcaacgcaaattcagagcattccctgatggaatgaaatcaggaaagcagaatattggctgatgtattctagaaacaatggcgtggaatcaagtccccaagtctacttcaattccctgaagcctttccattctctatactattctgtgaacaccctgaatacactcctgcctcagggcctttggatttactgtgttctggaagattcttttcacagatatgtacataaatcattccttcagttccttttcactctccacttgaatgccaccttatcagagaggatttctttgatcatactgtttaaaaaaacttccctcccacctcactgtcaatctccttatcttgctttatttttcttctttctcatctccaactagagtaaactccacgaaagcagaactctaatctatttgggttttgtttttctgtaaccctgcagcctagattatatctgccagctattaagcattgtattaatacttgctaaaatgagaagatacttaaggcctgtccttgctgccttgttttaagaggactaacagtaagttatgatgtgcccgtaggaaagccatcaaggtccagatacctttcagtttagggtaagatttgttcagtgtggatccagaagaaaggagaaggataattgggttataggacagcaggttttgactgaaagtaaggaagaacctgcgaataattgcagctgtttgaaaagtgtttgatctttttttctgtagatgtttatatagattgtatgaccgctttggagataattatagaggaaatccaagcatcttatgcaaattagattatgtcacttctaacctgaattcttaaaaggtatgattctatattgactgagaaattaataattgagtttggttctgtgaaatgctgccaaacaaatatatctatattatgttaacaccctataccggggttgacaaattgtacctctcaggccaaatcttattggttaactctttttgtaagtatttttattggaacacaaccatggccatttatttacatattgtctgtggcttctctcacactataatgcacagttgagtagttgcaacagagacacatggcctgcaaagcctaaaatatttactatgtggacctttagaggtaaagtttgacaacttctgccctaaagcgaaaaaatattatgtggaaacctatctttattcagttttccaagtagttcatgatgatgatgatgatgataactgttgtatcaattaaaatttagctataatataatagaccactctgactattaaaatagagggaatttaatgcaggaaattgattacatggatgatgagagtctgactagttccttccaggaagatacataagaggtagttttgtcagagcccagaggctagaatcacacagcagaagctggaatcatagggtagaagggtagggaggatggaactgttacctgaagatggagctacaaaaaagattcttcttctgcctgagttgctgcccaaggcacagaggaaaggagaaaaataccctggcttctccaactagtgcctcccattacctgaacccaaccataagtcagctgacaaaaaagcctgggaagtggagctttcagggtttgttcccctaaaatatagagcagagtagaagagtaaggaatgagtgtaaggacacctgcgtagctgctaataattattaagtgctaccttaggccaggtacagagctaaacagtttgtgtgaatatgttgcctaggaagtaaatacgagtattacccccagtttatagatgaggcttagacaagtaaatttctcaaggccgtgaattaaattaatgaccaaattagacataatccaggtctgccttactccgaaactcttgcttttatccctctcattttacaagtgagaaaaaacgtaatttggaaagataagaaagttgcatctggttaatgacagggccaagtctagaacccaaattgttcctattaggtttttgtacattttaaggaagctaaaacctgtaatgctattattgtagcatttggagagtgtccagaggagactcccacacttatcgtgaaagtatccttgtacgctgaaactattactaagcaacctttctgtaccccagtttacttcattgtaaaatgagattattaattatatctacctcaaaagagtgttgagaaggagtatatagataatatatctaaagatcccggaacagtgtgccacataataagtacttagtaaatactagctcgctattgttattgttaatctttttattatgctcaccctgagagtggttatcacaggaaaaaagtggatcaaaaatgtcatgaaatgttatcaagtgcttcattaaatagtaatatccccatattggacattttatttttcttccatttaggagaattgttagaagatactgaaaaattgcatttttgtttcgtttgcctttaagcgaacggccttcatgatgtcttagttttttaattcaaggtctttttaatgtaccagtgcttatgcatgtgaaatatcatttcctcttatgcttctatatagttcatctctttcatctagcttggcctttttccaaccattcccaatatgtgaacttttccttcctattcccatggcttttcttggcttcattcttaatagtctcccactccctgacgagtcctttttctttcttaactagaacaatttctataatactttggtacctgctgaagatgtttttcttaactgatatatccctagctaatcataggacacatttatatttcacttgtatccagcacatatagacaatctgtaacatgctgtcatatgctatatatattgcttgagatggttcttttttcatggtcgtttttccatttgtgtcttgtttttccaacaaagttgaaagccatgcttggatgaactttaggtgactggtgctttataaatacttaagtgctgtgtgaaaacttatagctagagttcaaattatttgtttgttttttttgtttgtttttgaaatcgttatttgcttttaaaagtagtctgctgcatgacaaaagtcactaacaactttagtccttgtgtgggattcactaaaaatagcttgaaaagtcaaggattcctttaacctagagcactctgaagatccaaagattagcagaccaggaaaaaaaagaccctgaaaacatatccttccagcctgatacacctactagcctatggtaaatatttttcattttttttaaaggcaagcaagaaggtaatttaacaagattaatcactagatttggcattggaatgtcatattttaatgtgctaaaaacattttaaaatgcagggctcataacagagtgtgaacctgctgccactattttcagaatctgaggctttggacttgatgtggtgaaaattgaaccgtattatatacgaagtaatgatgaccatgcaaatatttgcacattgtggtctattgttactgcatattcttcaaagtgaccatttacaatgtactgtcctcagaaaactatataaagcaaacacagagatctaagggagggtagtaaaaagcctcaaaacaatctctgagtgtgcctgtaacatacttgttatttattcccaattcagaattttctctagtgacatattctttttttccatattttaggagaatattttctgtcagtctttcaaaatcaatatttttagtttttaagtactacagctgttgaacttcacaagataagtcaaattaagtcacatcactcaaacactatgagctttataattctttgtgaacttaaaggttgagtttaggatgaccctgtggtatatagaatctagagctagctggattggcaggatttttctctttaaaaaacttcagaagcatttctgaatagaaggaacatttccaacttttaaaaacagataatccttttttcaccctcttaacatccctctccacacctcaaacaaatgtacatgttttgggccattttgtattttattttctgtgatgttaataaattaaatgtaaatcataataagtccaaatccctttaatttcaagatgtttatacttgaggtctagcattttgcctactttattcctcatttaaagtatggtttttgtcaaggctaaacagtaaatagctatagtagtaggagtccaaaccacaattaatagtgctgaatgttgttacaaacctgcttcttgattttttaaaataaagatcagggagtagctatggcaactggacctcaaaaactgttaacacaaaggattttgtgttttaatttcttcatctaggttttatgtgtctttataaggagatacctgatggactacaaagaggattatgacatgtatccaactgtaaatttatagggaaattgtgtaacgctttgtttaaattacttcagttatatcttctatagttaagattataattcacacacttcaatctgaatacggattgtaaaacagtaaagcaaatgccagaattatagccacagaataaggtagtgagttaatttgatggagttcattttagggacattgtcccttgcttttggtattttccaacaatggtaccatttatgattttattttattttagccatgccctttgggttcccgagattttcgagagaaacagtgtgcagactttgacaatatgcctttccgaggaaagtattataactggaaaccctatactggaggtaatgtataacctgacagagcattcatgcttgagcactttgcaaatatcaaagaatatacaaatatatacaaacacatgcatacattcatgtacatactagttaaaattagtgtttgccaacaaaagcagggaaatgcttatagtactataaaggcttcatggtttatttgccctgtaataaggtttatatattagtacaaatgatcagaaatcatttcttaaaacctaattatgtttaacaaggtataaaattccttgaaaggatatctagacatcaaaaccatgtagtattttttgagttctgcttgaggcttccttagggtatatgtaagttacattataatctttaaatgtttgcaattatcaccctaaaacaagttataagaatataaatcaggaaactctgtgtcgttgcttagtcaaaggccaagattattgttattctttttcagagttagaaaacatttttgctctttaatttgggcatgtatcaggcactgattgttcaataagtagaagtattttacactcccaaaatataaattacattttgctgaaaatttctcttggaggccaggcatagtggcttattcctgtaatcccagcactttgggaggccgaggcaggtggatcacctgaggtcaggagttcgagactagcctggccagcatggcaaaacaccgtctctactaaaaatacaaaaattagccgggcatggtggcatgtgcctgtagtcccagctacttgggagactaaggcaggagaatcacttgaacccaggaggcggaggttgcagagagccaagatcacgccactgcactccaacctaggcgacagagtgagactccatctcaaaaaaaaaaaaaaaaaaaaaggaaatatactcttaagataagtttactgtttgcttgcttttccagtatcttatattaacagaattttatagtgacaactttatatttaccaccaagattctaccattaacgttttactatactttcttcatacatgtctgttcttctccctatccatttattaatccatcgtactttttgatgtatttcaaagtaaattgcagtcattaatgtactttcctctaagtacttcagcatggtaacattatccacagttcaattatttgtttacttttttctgttaaggcaagattatgtacagtgacatgcaaaattttaactatgctttctctggtttttgaccaatgcacatacttaaaaaatcctattgagatacagaacattggctttacctccaaaattcctctaatctttgccttagtcagtttggactgtaattacaagttaccatagactggagatcttaaaatagaaatttatttctcggtactgggggctggaaatccaagatcaaagtgtcagcatggttagagtctggtgagggccctcttctgggttgtgaactgttgttttctcattgtatcctcatgtggcagaaagcgtggggaaaagagctctctgggatccttcttataaggctactattcccattcggagggctccactgtcatgacctagttaccttccaaaggcctcatcttcaaattggggattaagatttcaacatacgggttttggggggacacaaacattcagtccataaaagtcattatagtcctttgcagtcaatagttgcctctccctactcctcctaagagacaaccatcattctgactttttttctcaccatagtttagttttgcctgttccagaacttcatattctattgtaaatcttctttaagcctaatgtttttgagatctatctacattgctgtatatagaagtggttcactctagccaagcgcagtagcagacacctgtaagcccagctacttgggaggctgaggcgggagaatcacttgggtctaggagttctcttaaaaaaaaaaaagtttattcttttttattgctgagcagtattccatcataataaccagtttttccattctgctgtgatggacacctgggttgtttctagtttttagctgttatgagtaaactgctatgaacatttgtgtactatcattttgtgagcatatgttttcattttccttgagtaaatacttaggagtagaattgctgggcaatagattacatgtgaatttagtttagttttaaaagaaactgccagatgtttttccaaagtgattgtagcgtatttcactctcaccgacaatgtctgagggttctatttgttgtgcatccttgtcaatatttggtcttttcagtcttcttctggtgggagtagagtggtatttcagtgaaatttccgtttccattttctcatgataatgttaagcacgttttcatatatttattggccattatatatctccttttgtactgtctattcaaatcttttgcctatttttaattgggttgttttaccttctcaagtggtagtcatttataagttttacaaatgttttgtcacattctgtggctttcccattgctttttaaatggtgtttttatccatataagcttttaatttttctgtttttaattccaatttttaaataatttttctttctggtcattgtgttttgtgtcctaaggaatctttgcctacctcaacttaagaaaatattttcatatgttttcttccaaaagtcttattgtttagtccttacatttacatctatgatctatctcaaaataatttttggtatgatttgtatctgtagtatatttatggattttctgttttgttttgttgatctgtcagtcctgtgccagtactacactgacttgattactataactagagtatagtcatgaacacagttttttttttttttatacattaagttctagggtgcatgtgcacaatgtacaggtttgttacatatgtatacgtgtgccatgttggtgtgctgcacccattgactcgccatttacattaggtatatctcctaatgctatctctcccccctccccctaccccacaacagtctccggtgtgtgatgttcccctccctgtgtccaagtgttctcattgttcaattcccacctatgagtgagaatatgcgggaacacaggtagtttaagttccattaactttgatgttttttataagagttcttccaatatgctaactgatttgcattttcatgtaaatttttgcatcagttgttaatgtccgcagaaaaacctgctggacttatgaatggtgttatgttgaatctatagatcaattgagggaaaaactgagtattaaaccctattgaattttacaatttttgaacatggtatatccctcaatttatttatgtctttaatttctcccagctatgtttttcctttaagtgtaaggtcctgcatgtactttactaaatcgattcctgagtgatttatggttttgacactattgttaataaaacttttgaaaattccattgacatttgtatattaactttgtattctgtgacctttctaaattcccatattcctttttttttttttgagacagggtctggttctgttgtccaggctggagagcagtggcgcaatctcggctcactgaaacctccacctcctgggctcaagcgatccttccacctcagcctcctgagtagctgagactacaggcgcacactgtcatgtccagctagttgtattttttgtagacacagggtttcaccatgttgcccaggttggtctccaactcctggactcaagtgatccacatgactcgacctcccaaagtgttggaattacacatccagcctaaattcccatattctaattgttttacagatgctcagaatttttttgttaaacagtcatgttgtcctgaaatagagacaatctatttgaatctttatgccttttattacattttcttgccttaatgcactggattgggcctagagtataatttgtacatgtattgattgtattttttattctttatcctattaatatgctgagtgacctgatagatttgacaatctcaaaccaagatttttttttttttgagagagagtcttgctctgttgccaaggctggagtgcagtggtgtgatcacagcacactgcagcctcaacctcctgggctcaagcatcctcccacctcagcctcctgagtagctgggactgcaggtgtgtgccaccatgcctggctaatttttgtattttttgtagagatggggttttgtcatgttgcccaggctggtctccaatgcctggggtcaagcaatccacccatctcagcctcccaaagtgctgggattacaggcgtgagccaacaggcccaacctcaaaccaagcttatatttctaggataaaccccatgtgatcatgatgtatttttttatgtgttattgtatttaacttaattgataatgttttattgtggatatttgcatctgtgtttaaatttgtaaatatttttcttgtaatttgtaaatattcttcttatgatgtctttgctaagttttggtatcagatgcattctggtttcccaaaatagaatctttatttatttttaaaagaattttaggattggtgttatctcttccttagaatagatttcactagtaaaaccagccaggcttgatattttctttgtgaaaacctgttattaaaaatttaactcccttaagagaaaagggctatatggttgttttattttattttattttcttgtggagttttcttttttttttttttttttgagacaaggtctccctctgtcgcccaggctgcactgcagtggcccaatcatatctcactgcaggctcaatctcctgagctcaagagatcctccctcctcagcctcctgagtagctaggcaccacgctgggcaaattaatttttaatttttatttttattagagactacatcttcctatgttgtctaggctgttctcaaactcctaagctcaagggattcttcaatctcagcctgccaaagtactgggattataggtgtgagccaccatgcctggccttatttcagttttttattttgtgtctttaagaaatttatgttatatccatgtggtccagtttattgacataaaattgatcataacattctcttgttatgccgtttaatattaatatttataaaatatgtagtgatgtatgctttcatttctggtattgataatttgtgttttcactgtttttcttggtcagtcttgtttgggatttatcaattttattaatattttcaaagaaccaaattttggctttggtactcttttctgtaatttgtcttttttctagcttattaatttttgctcttatagttattattttcttatctattttcagtttctttcgctcttttacatttccaaaatttgatgttatattttatagcttttagttcaaactattttatttacattgtgagttctttgacctctgggttacttagaactgttttgttttaatttccaaatatttgaaattttctagaatttcttgttgttcatatataatttaattgcattaagattagagaatgggccaggtgtggtggctcatgcctgtaatctcagcactttgggaggccaagttgggaggatttcctgagcccaggagttggagaccaccctgggcaacatagtgagaccttgtctatacgaaaaataaaaaattagctgggtgtggtaccacatgcctgtagtctcagctactcaggaggttgaggtgggaggatcacttgagctcgagaagtggaggctacagtgagctatgatcacaccactgtagagtgagatcctgtcttagaaaaaaagaaagaaaaagattagagaatactcttttcttggtgaatgttctgtgtatacttggaaagtaatgttttctgcagttattggctacatagtgttctatagatatctatgagatcaacttggttgagaatgttgttttcaatcttttatattctttctgatttttttctactctcattctatcaattattgagagtgctgtgttaaaatctccaactattatatggctttgctttcatttttaaaaagattttgcttcatgtatttgaatcttttttattaggtgcatatacctttgggattgttttgccatagtataggagaagaagaagtgtctgaaataatttacagacttaataattgccatctacataatttcatgcaaagtgaattaatcctaaattcatactaagcattaacttaaggtaattggttaatatgacctttcatttagaaaatcattttaaattctttctggaattaacaactgtattagtcagggttctctagagggacagaactgatggaatatatataaagggaagtttattaagtattagttcacacgatcacaaggtcccacaataggccatctacaggctgaggagcaaggagagccagtctgagtttcaaaattgaagaatttggagtcaaatgttcgagggcaggaagcatccagcatgggagaaagatagtctgggaggctaggccagtctctcttttcacatttttctgcctgcttatattctagcctagctagcagctgattagattgtgcccaaccagattaagggtgggtctgcctttcccaggccactgactcaaatgttaatctcctttagcaataccctcacagacacgcccaggatctacactttgtatccttcaatccaatcaagttgacactctgtattaaccatcacaacagccttacctttctttccccagtttcactgagatataattgacaaataaaaattgtatatagttaaggtgtacaatgtaatgttttgatatacatatatgctgtgaaatgattaccataatcaagctaattaatgtatccgtcacctcacatatttaccttttttgtgtgtatgatgtgaatacctaagatctactctcttaacaaatttaaagtatactatacattattcttaactatactatattagatctctagaactgatccctcttataactgaaagcttgtaccctttgagcaacatctccctatttccacccaatccctgataagctctctctgtttctatgagtttgacttttttagattccacatataagtgagatcatacagtatttgtatctggcttatttcacttagcattatgtgccccaggatttctttatttctttcttatttaagatggaatgatatttcattacatatgtctatataaaacaattttcttatccattcatctgttgacagacacttgggttgtttccatatcttgactaatgtgaataatgcttcaatgaacatgggagtgtaggtatctcttcaagatagtgatttcatgtcctttggatatatacccagaagtgggattgctggatcatatggttattctatttttaatttttggagaaggctgcatactgttttccataatggcactgccagtttacattcccaccaataatgtatataagagttttcttttctccacatccttacctacacttgtgatcttgtgacttttttgtaatagccatcctaacatgtgtgaggtaatatctcatggtggtttttatttgcatttccctgatgattagtgattttgcacaccttttcatgtacctgttgccatttgtatctcttctttgggaaaaaaaaaagtctattcacattatttgcctattttttaattagattttttttttttttactattgagttgtatgagttccttatatgttttgggtattttctcctattctgtggattgccttttcattttgttgattgtttcctttgctgtccagaaactttttagtttgacatagtctcgcttgtttattttggcattttttgtctgtgcttttggtgtcatatccaaaaaatcgttgccaagaccattgtgctggagctttgcccttatgttttcttctagtagtcttacgtttaattctttaatcccatttcagttgatttttgtgtatggtataagtatccaatttctttttctttctttattctttttttttttttttgcacgtgaccatctattttccccagcatcacttattgaagagactgccctctcctcactctattttcttggtacctttgtcaaagattagttgactatatatgcatgggcttattttcaggcttaatatttgtcccattgctctacttatctgttttaataaagtactatactgttctgattgctacaggttagtaatatagttcaaaatcaggaagtgtgatgcctctagttttgttgttcttgctcaagattgctgtggctatctggagtcctttttagtttcatatgaattttaggattgctttttctatttttgtgaaaaacgtcattggaattttcatagagattgcatcaaatccatggatcactttgggaagtatggacattttgacaatattgatctttccaatccatgaacacgtgacatctttccattatttgtgtcttcttcaatttttttcatcagtgttatacctaagtatttttaggctattgtaaataagattgttttcttaatttctatcttatgtaattaattgttagtgtatagaaatggactgatttttgtatgttgatttttgtatccgtatttactgaatttttgtattagttttaacagttttttggtggagcctttagggttttctatgtataagaatatgttgtcagcaaacagagacaatttttcttcttccattccatcttgcatgccttttatttctttttcttgcttacttcctgtgactaggacttcagtactatgttgaatagaagtagtgagaatgggcatcgttaccttgttcctgatcttagaggaaaaaatgtcagcctttcatcactgagtatgatgttagctgtgggcttgttgtatgggacatttattgtgttgaggtatattctttctgtacttaatttttataatgaaaacatgttgaattttgtcagatgctgtttttgcatctattgcaatgatcatttggattttgtccttcattttgttaatatggtgtattacagtgcctgatttgtgtatgttgaaccatccttgcatcctcaggataaaccctacttgatcatgatgaatgatccttttaatttttgccatttaattaatttgctagtattttgttgaaaacttttgcatccatgttcatcagggatattggcttataattttcttttctgttagtatctttgtctggcttgttattagggtaatgctgccctcataaaatgtatttggagtattcccttctctgcaatgtttttgaaaaagtgtgagaaaaattggtattaattcttctttaaatgtttggtataattcactggtgaagtataaggtatcgcacttttatttgatgagaggttttttttttttttactgtttcaacctctcttcttattattgttctgttcagattttctatttgttcatgattcagtctttgttttatgtctctagaactttattcatttcttctagtttatctaacttgttgacatataagtgttcatagcagtctcatggtcctttgcatttctgtggtgtctgttgtaatgtctcctcttccatttctgatttttatttgaggcttttctctttctctcctagtatagctaaaggtatgtcaattttgtttatcttaaaaaaaatcaactcaattttgtttatcttttcaatttattttattttctctatctatttctgccctgagctttgttatttccttccttcttctaactttggggttaggttgttcttccttttctagttccttgagatgtaaagttaagttgtttgaaatctttctccttttttcatgttagacatttattgctataatcctttttccttgaagtgcatctccagcatctcataagttttggaatgctgtgtttctatttttatttgtcataaggtttcttgttggtttgttttgttgttgttgtttgtttgtttgtttttcagacagaatctcatttagtcatccaggctggagggcagtggtgcaatcttggctgactgcaacctccacttcccagggtcaagtgattctcctgcctcagcctcccgagtagctgggattacagacatgtaccaccatgaccagctaactttttgtagttttagtagagactaggtttcaacatgttggcctggctggtctcgaactcctgacctcaagtgatccacctacctcagcctcccaaagtggtgagattacaggtgtgagccactgcacctggccacaggtcataagatacttttagatttaattttttatttcttctttggcccattgatggttcaggagcatgttctttaatttccacatatttgtgaattttccagttttctttttgtaactgatttgtagttttataccattgtggtcagaaaaatacttgatatgatttcaatcttaaatgtgttaagacttgttttgtggcctaacatgtatgtatcttggaaaattttctgtgtgggcttgaaaagacagtatgttttgatgcttctggatggaattttttgtatgtctatttattctatttgctctaaagtataattcaagtgcatctttttcttattggtaccctgtctggatgatctatccattgttgaaagtagactactgaagtatcttcctattgaattgctttctatttctctcattgtattttaatattgctttatatatttaggtattccaatgttgggtgcatatttacaatggtaaattgtactgaattcatgaattgactcctttatcattatataatgactttctttgtctcttattacagtttttgactaatagcctattttgtctgatataagtatagctctcccagctctcttttggtttctgtttccatggaatatattttcccatcacttaacttttagactatgtgtgttattaaatctgaagtgagtcacttgtaggcaatatagagttgtcttgtttttttttaaaaaaaattcattttgtttttcattgtagaatttaatccatttacatttaaagtaattatttttcaataattacttactagttatatcttgtcaattgtttttggcagttttgtagactttttttgttcctttatttttctttgctgtcttcctttgtaatttgatgattttctgtagtagtatgctttgatttcatatatatatgtattttatatatatttcatatatatgtattatatatatttcatatatatgtattatatatatatttatacatatgtattatatatatatttcatacatatgtgttatatatatatttcatacatatgtgttatatatatatttcatacatatgtgttatatatatatttcatacatatgtgttatatatatttcatacatatgtgttatatatatttcatacatatgtgttatatatatttcatacatatgtgttatatatatttcatacatatgtgttatatatatttcatatatatcatgtattatatatttcatatatatcatgtattatatatatttcatatatatcatgtattatatatatttcatatatatcatgtattatatatatttcatatatatcatgtattatatatatttcatatatatcatgtattatatatatttcatatatatcatgtattatatatatttcatatatatcatgtattatatatatttcatatatatcatgtattatatatatttcatatataatgtattatatatatttcatatatataatgtattatatatatttcatatatatatatatatatatatatgctttaggtattttgctttgtgattaccatgaggcttatataaaaatctatagttataatagtctgttttaagctattagcaacttaccttcaatcatatacaaaaatttgacacttttactcttctattttatatttttcatgttacagtctacatctttttatatcgtagtccattcacaaattagtgtagctatcagcctcttctggccagcagggattctgctgagaaatctgctgatagacctatggagttcccttgtatgttatgaatcttttttctcttgccttcaaaattctttgtccttgatttttgacagtttaattataatgtgtgtgtgaagtcttcattgggttcagccttattagagatctttgagcttcatgtatttgaatgtccatattgctctctagatttgggaatttttcagccattatttctttaaataagcctattccactttcttttccacctaagattcctataatgtgaaaatgtagttatcttggtgatgtcccataaatcctttttgttcttttttgcctgactggagatttttaaatgacccctcttcaagttcataaattctttcttctgctggatcaagtctactgttgatgctattacatttttcattttattcattgttttctttacctccagaatctgtttttattaatgatttctatctattgaacttctcactttgttcatgtattgtttttctgatttcattaagttgtctgtgttctcttatagctccctcaccttccttaaaacaattattttggattctttttcatgccattcatagagctccatgtctttggggttggttattggaatattaccatgtttctttggtggtatcatgttttcttgatttttcttctggtttcttgaagtactgtgttgctgtctttgcatgtggagaacgcagtctttactaactggcttccagagaaaaatgtctttaccaaacagcccagttaaagattctgaggctctctcagaccttttctatggatgtccctactccacacctcttattctctcttggggaggaattcttaagaatgtatccctctctgaattccacaaagctggaccaggtgctgagagctgcctgtttgttttttctagggtggttccctaaatgctcaagttgtatgacttctcccaatcctgcaaagttgtgttggctgtctgcataaaatgcttactttcagtccataggagcatgcttgggctgctggcctacagcagttgggggagaatggggcatgcagagtttttgaggcaactgttgactagttatgaggtggcccataggcaaaacatctcaaatggctcatgagttggcttcccaacagagtccatggagtggttacttgggcctatggcctctcttctctgctcccagcctcttccaaccactcagccatgctgatcacctcagtattctggatgaggcaagaaaacagtaggactcttgggcagcgtcccacacagctagggaagcttggtgcttactctctatactctcactttcccctgtgggagaatcaaaggctggggagggtggcagggagtctctcttttcactgagctgtgctgccttgagggaggtgtgatacaggtgaaattaaactggtcttaaacctcttcgatttgtctgtttggggaatttttttttttctccaatggcatgctggaacttttctgctggagtcccataaaggtacacttgtctataagtagctgtcaaaattgatccttctgcagggagatgatagtagaaagctcctcttccaccatcttgctgatgtcactctagtggtaccttttctgaaagctcattgtatcagaagaagctgaacacatcttcagcagtaaacaagaaacttattcccattttcatcacttagtatagtgggctaaggaatataaccatagtatttatatgtcctgcctatcaaatattacgttacataattaatgttaaaattgaataaacagaagactcagcttctctttttaaagcctaatgcacaaaatgctatattaaattccaaagcattatgataaaaaaatgagagaagaactgtattgggtaataatgaaaaaatttccagtaagattcatggacattttgggtaatttaattcatgagaatcatataaaaataaatacaagtagttttattatcagtttgggaagaaattattttatttattacttgttatttctatgctcagtatggcaaaattaatcattaacctaacgctaaaaatcacattataagttagatagaagttctatagcctagaaacattgaaaatggaagaaaacatagactcaggccagaggtcgtaagttggcaatttagggaccaatttttatctacatacatattttagcctcccacagtattttttgtaacaaaactttgaatcaattgttacatttaaaaacaagaagagtttagatggaaaaaaaaattaagttttcatcttctcttgaaaaaacagactgacaatattggactatcttcttgcataacaacattcaactgtagcagtcatctcctatactggaatgtgctgtctctaatttatcattgactctaccacccagtcgattttctttttctttgcttaccgtcaacctgcagaaacatgatttctaagaacttcactgagatgtagccatgtcatttcatctttctgctttatttcctttattagaagtagtcttctttatttcaaatagaagttttagcagcataattagatatggtcaaagtgatgaagtagaattacaaaagaaaatattttaagtcatgatttcagtcaataattacatacttacaaatagtagctttatcttgtgctgcttttaatacaacaagtccacatttattgctatttttccaatatactgtagttatgatatgtactctgttttttaaaattgcagttacctaagcctatttttaacttcagccttaaaaaacacaaatttcaatgacaaaatgaaaatgctcaaattgctgtgtgtatttattcacaaacaaaattagtgttttaattattcaaatataatactatattttatatttatccttggctaatttcataagaattaatcaaatttaaagctataattaattttagttttgatttgctaatctcataaaaatttatatccatgctaaagccaagttcacagactatgatatgcttaaggcaggtacaaatttagttttattttataactaccatatccttgcttgatgtggcagagtttttgtatcagcttcagtaacatatgtagcagaaacttctgtttgttagacaaggttattttattttcttaggtttttttaaaaaattgtttttcttggccaggcacggtggctcacgcctgtaatcccagcactttgggaggccaaagcaggtggatcacctgaggtcaggagttcaaggccagcctgactaacatggtgaaaccctgtctctactaaaaatacaaaaattagatgggcatagtggcaggtgcctgtaatcccagctactcaggaggctgaggcaggagaatctctactcaggaggcagaggttgcagtgagctgacatggcaccattgcactccaggctgggtgacagagcaagactccatctcaaaaaaaaaattgtttttctttcatttatttttttaaaaaacattcaattaccttcactatgatccctttttaccaaaattgtaaatatataatggaatatagaaatataaaatacattataaatatataattatgttataaataaataatggaaatacctgaaatttttaaacctgaaaactgctgagcaagtccccctttaagttgcaccaccaattaaaataaaggtgaaattttagaaaagggggaaagaaacctacacaatcaggcatataagcagggaatgatgtctacgtgaattataaatttgccatagataatactgaatcactgttcattaggacaaccactccacttatttctcttctactgtatttgtccaggtggggtaaaaccttgtgcattaaactgcttggctgaaggttataatttctacactgaacgtgctcctgcggtgatcgatgggacccagtgcaatgcggattcactggatatctgcatcaatggagaatgcaaggttgctcagattttactcctttctgttggggtttttgagacttttatctttttctcattaactcctatttaatactatgtttaattttttaaaaaaaggggaccacattttagagaaattcaatttccattaagagtaataaaatatgtaaaggtaaaatgacccattcatattcaagcaccatacaaatgtactttattctggtattctagttatttttacagtgattgccagaagtatgaaaatattttggattttaatttccgttattcttctgttctgtttacaaacaagatgatagaaaaagagagagaatgaggattcagctcttattcatatttctaccatatgttctttttggaagattatttgatacatttcatagcataaattttcctcaaagtgtgaaacagccatgctcctcctactttatctccttttgaagcatttacaatggttttcattgtggaattagtctttatcttattaaagcatttactttagggaattagtcagactagttgggaattgtaggagcaaatccatgctattttcctagacctgtgtatgattgtaacataataagaaaagccacaaaaaccactattttcataaatttttttacttgtctggttttgttttactttaaagagaaggacaaattaagtgcttcaaactgagaaagacaagataaaaagcaccattttacttagtctcataatttcttggaaaagtttctatccttctggctacttgtctgcaaatatatctgatgattcagtttgtgtatgatatttgtgtgtgtttatgtatctgtgggcaaggggtagtttattttcttgaagaaaaagttatttttgtagtagtattcaagtttttcaaataacaaagacccaagtatggtttttattcacggattaccttatttttcttttctttactggaaaaacaagcaaataaataagttatatgtatttcattagttatgattccaagaatttctctcttgacacactgaatattcctctctgttttcagcacgtaggctgtgataatattttgggatctgatgctagggaagatagatgtcgagtctgtggaggggacggaagcacatgtgatgccattgaagggttcttcaatgattcactgcccaggggaggtgagtatgtagagagaactcttcctcacacctctggtgtacttggaggagccaaaaccctcgcttcgcctccccctgtttttcagatttctttatttaggcagacaatgttttcttccccaaattgctttcagtcattttagtgttaaatgtggcttcaagtaaaatattttaaggaaatattctctctctctacttaacttcatttagccatgtttcttaaaggtgtacattctcacagaggattgatatgaggggcatgtgctgaggaagaaaaggaaccattattcgtgttgaggcttttaaaatatcttgagataattttagagaaaaagactgttaaatactgtttctctaaaatgtattcatgaacccaaagggtaatttgcccatatttcataattcataaaatgcaaagtcaaagagagaatggaataataaggaaactattactattgaatggttaccaaatactcatttcctgaccaaggctgcttaatactggctatcttctgtgttccaggctacatggaagtggtgcagataccaagaggctctgttcacattgaagttagagaagttgccatgtcaaagaactatattggtatgttagactggtatgctagtttgctggattttaaaagtaaatgaggaaaagtagcacagtatcatgaaggaaaaggcatgcttctttgaggtagatcactttcatgctaaaatgaagtaagctctaagttttatagaacacatatacaatgctaaagagaaaaattagagtttatagcttactcttcaccgggttattttatatatttaaaaaatcaggccaggcgctgtggctcacacctgtaatcccagcactttgggaggccgaggcgggtggatcacaaggtcaggagatcgagaccatcttggctaacacagtgaaaccccatctctaataaaaatacagaaaaattagctgggtgtggtggtgggcgcctgtagtcccagctactcgggaggctgaggcaggaaaatgacgtgaacccaggaggcagagcttgcagtgagtggagatcctgccactgcactccagcctgggggactgagcgagactccgtctcaaaaaaaaaaaaaaaatcactatctcaaagagatatctacactcacatgatcattgcagcattattcacaatagctaagatatagaaacaacataaacgtctgtcaacagatgaatggattaaaaaacttattttatctgtatgcaatagaatattattcagccttaaaaaaacaaggaaactattcatttgcaacaatatggatgaacctggagaacgtcatgctaagctaaataagccagacacagaaaggcaaatactgcatgatctcatttatacgtggattctaaaaaagtcaaacagagagtgtaagagtatttaccagggggcagggaggaggtggaatgggaagatgttggtcaaatagtacaaactttcagttataagaggaataagttctgcacatctaatatactttagttaataaaatgtatcgtatacttgaaatttgttaagagaatagatcttattgtcaccacatacaaaaaaggcaactgtaggaagttatggatatgtaaattagcttgattgtggtattcatttcacaatgtttatgtatgttgaatcatcagattgtacaccttaaacttaatattttatttgtgagttatacctcaacaaagctggaaaaaaaagaaagtatgaaaatatttcccaaaatggatgtattattttatatttctatcagtaatatagaagagttccagctgctctacatccttgtcaatacttggtattgtcagtctttttaattttatccatatggatttttttgtagtgaagtgtctacacaaatattttacccatttaaaatttttttttcctttttttgagttatgagttctttatatattctggatataagtctttgtcagatatattttatggatattttctcctagtttctgcttgcgtcttcattttttgaagtgccttttaattttgatgaaattcaatttattaattttttaatggtttgtgctttcatgtcctatcttagaaattttacctgctccaatattgcaaagatagttttcagtatgtaagaagttatagtctttatttttatgtttaaatatatggtctacaaaatataaaatatatttattaaatgtaaaatacaaatgcaaaatatagtcattaaagacgtgtattgtgcatactacgactgatacctatgagggggagagacaaccaggcaaatctatttggggaagaacaattatttatttacttgaataacaccctatcctttgatttaacacttagagtaatgacttaagacttaaaactatgataagaaatgtaagatacatgaaattcaaaaataaaattgaaaaacacatacagtcaattttaagttaatttttatataaggtataaagtaagggttgatgttccattttttcatatgaatattcaattgctctaacactacttgttgaaaagactatcacttcttccattgaattaccctgacacatttgtgagagatcaattaagcatacatggatgagtctatttctgttctcacccattgatctaggtttctgtccttaaaccaacaccacactgtgttgagtaatcgagcttcccagcgggtcttgaaatccagaagcattagtccctgaatgtgttctttttcaacattatttttgcttttctaggtcctttatatttctatatacatattagcatgaacttgtcaattgagacaaatctttttatacagaaagagagtatatggaatctataggttaatttgtggagaattgacatcttaaaaatactgaattttctaatacatgaaaagatttacctctacatttatttaggtctttttaaaattttttcaccaatgtttcattttcagtatataggtcttgcacacatgttctgttaaatctaatcatgctttttggtgctattgtaaatattattgtattttaatttaatttccagttttttgttgttagggaataatatagtttatttctttttatattgccctcatgtcctgagacctggttcactcacatattacttctaacagttgttttgtaaattcatttggattttctctatagattatcatgtcatcctcgaacaaaggcacttttacttctatctttccaatctttatgccctttatttcttttttcttgccttataacagagttcatgacctttagtacaatgctgaataaatgaggagactaggcagccttttgttttcaaccaatcataagggcaaatcattccttgttgttattgtttttaaccattaaatataatgttagctagaagatttatgtaatgacctttgtcagtttgaggatgttcccttctatttctagtttttattagagttttagtcatgaatgggtattgaagatgtctgaatctattgacatgattaggtggggtttgccctccctttccctgttaatatagtaaataaattgattgattttcaaatgtaaaatccatgtagtattcttgggatataaaccactttttcatgatctattattactcttatatattgctggaattgatttgctaatattttattaagaatatttggacctatgttcatgagagatatttttctagagtctttcttgtgatttctttgctggtttttgtatcaggttaagcctggcttcatgaaatggctttagaagtgttcctttctcctctgttttctggaagtctggagagaattgtttcttaatgcttgatagaattcaactgtgaagctatctagaatggagttgtctttgtggaaagtttttaatgaaaaattcaatttttataacaaagttttcaaatttattggcataaaattatgcataatattttcttattatctttttaatatctgtaggatctgtaacaatggctcttcttttcattttccgtactgaaaatttgtctctttaccttgataatcctaatgagggctttattgtattgatctttttaaagaacaagcttacagtttaaatgattttctctattgtttgtctattttgcattacattgattcccactcttcttttttttttgagacggagtctcgctctgttgcccaggctggagtgcagtggcgcaatctcggctcactgcaagcaccgcctcccaggttcatgccattctcctgcctcagcctcccgagtagctgggactacaggcacccacgttgacgcccggctaatttttttgtaattttagtagaaacggggtttcaccgtgttagccaggattacctcgatctcctgacctcatgatgcacccgcccttcggcctcccaaagtgctgggattacaggcgtgagccactgcgcccggctaattcccactcttctgtttgtttctttttttctattcactttgttttaatttgttcttattttttctagcttctcaagatacaaacttaaattactgattaaaaatcttttttctgctataaaacaagcattttttttaccataaattttgtcagacatatgatacattttattttccttatgaagttttaaatatttccttatttatcttgtgactcatgacttagaaggtattatttaatttccaaatattttggtgtttcacaaatacttttctgatactgatttctagtttaattgtattttggacagaaaacacaccttatatgattttagttttttgttaaggtttttttatagtctagcacatgtgcacttgagaagaatgcatattctgctattttggggttagtattccattaatgttcatgaaattaaaggacacaactatcctttggttggatagttttttcacattttttatattcttatttgctgccttcttgttgaagaattactgaaagaattacgtcgatatctcccattagaattgtggatttgtttactgttcttattaatggcaaaagctgcgattacttttgcaccaacccaatagtttgtaagatttttgcttcatttattttgaaactatgttttaggtgtatagacatttatgattgttacatcttcttgatatattgagcattttatgattttcaaatgttcctctgtattcctgataatattctatgaccagtctggcatggtggcacatgcctgtaattccaaccactcaggaggcagaggcaggagaatcattgagcttaggagtttgagatcagcctgggcaacatagtgagatacccatctcttaaaaatattctttgatgcaaagtctgttttatctgatactaatctagctaccccagctgtcttctgatcagtgtttgcatggtaaatctttttctatctattcacttttcatatgtaggtacgtctgtctttaaaatctgtttcttgtagaacacatgtagtttaatcttgatttcttataatgtctaacaatcattgcatttttaaattctaatctttagtttggtgggggggttgggggtcggcaactatcgctgttaagggtcagacagtaaatcttacagtctgtgttacaactattcacttctaccattgtagtgtgaaagcagacataggtaataaataaatgggtgtgactgtgttccaatagaactttatctactaacacaggaggtgggtcataagtttggtgacttcttgtttagatcatttatatttaatgtaattatcaatatcgttgggtttaagcctaccatcttgctgtttttctgtttgtcctgtgtgttttttttccgtttaatcctcctttcatgccttcttttagaataaccatgggttttattgtattccacttaatctctaataaatagcttattagctatacttctttgctctgtttaattagtggttgctttatgatttacaaaatgcgtttttaatttatcataatacattgccaaataatattgcaccattttatgtataatgtaagacccttacaacagtttacctccattgtcccattccattctttgtgctgttttttttaatactttctacttctttatatgttataaatcccacaatatatggttattatttttgtttcaaagagccaattatctttttaaaaaattttaaaacaagcaaaattattttgtatttacccacatatttaccattatctggcatacttcctttctttgtatagatctcagtttccatctattataaatatgtgtgtatatacatgtaatgtcatcatgtttcttctcattatgttttcctttaaagttcttgcatatatttataatagctacttgaaaattattttctgctaattccataatttttgttatttctgggtctgtttctttggctttgccttcctcctgtttgaatcacattctcctccttttccacattggtagtaatttctcattggatgttgtacactgtgaatgtttctttgttgagagcctggattttgatttatttttttaaagggtgtcaagtaacttgtagatctgcttgatccttttgatgtttgcttttgagctttgtttgggtaaatccagaatattctttattctagagcttgctcagccctcctgcaaaagcatgattcttcttgggtctctactgaatggcctggtgattgaaatgcagtagttctgcttacagctccacagtagattttttgcctggctttatgtaattttatcctatacatatgcagatcaatattcagcaacagatttcctccttcctctcttgttctctggtcctgcatattccagctatgtcagccttcccagtttctgatctctcttcttcacttggtgagaccactgtgttctgcttgggttctccacctaaagaaagtgtctccaagcagaaagttgtggagatcatggtctctgcacagttctggtcaatgcatgagaaaagctgattcatatattttatgagttttctgattatttacaatgggagggcaattctaataccagttatttcagcatgaaagtgaggagaagttctatttatttgatgtttaatcctttgagatagttttagtctctccagaaacccttagtgagacctaaatgagtttttattttagttaaaatatcattccatttctcttaaagcttttaaaaataagggtacatccagagtgtgtcttcaggcagaatatcagtatcatcaggctcttcttttatttaagaagactcctttatttttacaccataattttgaattattttctccatcaataatactcaaaacaaaaagatttctagcctcagctttttccccctttggtaattctcttttcataatgcacttcatcttcctttagtcattcttccttaatgcctcttaaatggttggtgtttttctgagctacattatggcaccattagttatatattcctagcagccaagaggtgttagaattccttcatttagtagttgtaaaaaaaaaaaaaggaagtgagagctcaaactgaaggagaatttaaagccacatagttgtttttatctttatttttactatttcatatatgacagtctcagatgtccttataaaaccaaatgttttaaactagacagaaaaccactgcaagtgagagttgaaaataaaaaattttaagtacacaaaaagttcaaggccaggtatttcttctatttgcttgttcctatctcaaaaggttaattagatttattttgaagattaaatgaatcttcaaaacatgtctgaagttaagaaactacaaatatttttgccaggcaaatgggggtcgggagatgacaatggtctgtagtatgaaggacaagagctggaggtctagggagtcagagactctgcaccatgaccctttagtccttttgggctacttgtttatcaggtctgacgaatcaaagtttttgcagtcagctagcatactaacaaaatattaagctgacatgtttatttgtttcctgtttgtttataggagtttttgtacggtagtactaaaaatactttttcagctacatgtgcttttaaactgtgtgtgtgtgtgtgtgtgtgtgtgtgtatttcttgtaagagatttttttaaagtatgcatgtttatctatcaatattttttctgagttttttgtcatgcttagaaatttttcacaacacaatattatgagaaaaaaagttcttttatattttctcctgacattttaagatttaactatttttatatttaaatatttacccatctggcatttatcctttctctttttttaactttgtttttattgaggtgaaattaacattacataaaattaaccatttgaagtgaacaattaagtggcgtttgaaacattccaaacatttacatcaccccagaaaaaaacccatatccattaagcaggtgaatccccattctccccattccccatcccctggcaactacccatctgctttctgtctctgtggctttttacctactctggacattttatatagatggaagcatactatatgtgatctttcctgtctggtctcttccatttaatgtttttgagtttcatcacattatagcttgttatcaatacttcattacttgttatggctgcataacattctgttacattataataccacaatttgtttatttattcatccactgatgaacatttgtgttgttttgatttggtgctactggaaatagtgctactatgaatatgtgtgtccaagtatttgtttgagtacctgttttcaattcttttggatatgtgcctaggagttgaattgtggcatttattcttatataaagaaagaaatataaattcagcatttttttgccaaaagaatagtcttttgccttagccccatttcttgttctttcctttactaatttaagatacttcctttatcataaacagaattcccatatgaacttgggtctatttcttaaatctctttgattcgtgttctgtcgatcagtctgtgtccaagtgcaacaggttgtccccaccccatatccatttaattactatttcagtatttggaaaggaaagcctgctccccaccctcatgttaagtctcatccctagttattccttttctcataattttccttgttacttccacatgtttattcctccaggttaacctttcgttgctttctattagtgacattataaatacttaagtaatatcttcttaccattcacatgaaaaataccattttaatttgtacttaagaatatggtcaagagtcacatctctaaatggaaatcggtattcattgtatactttattgcagtaattaatcagtgacactttggtaaatgaaatttcacatttttaggtgaattgtgatttgttttctagctttaaaatctgaaggagatgattactatattaatggtgcctggactattgactggcctaggaaatttgatgttgctgggacagcttttcattacaagagaccaactgatgaaccagaatccttggaagctctaggtcctacctcagaaaatctcatcgtcatggtaaatgcgtctttgccattgtatttcttctgtttttaattcccccttgtgaggtaggaaggggcaggttttattatctctgctttacaggtgatgaaattaaggtaaataaagataaaatgatttacccaagggtgttagagctgtgcagagttaaggccatagtgctcttgcttgaatagtatttttataaccaaacaagacagatgaaagcaatggctccaaaatacccatgaaaatgggaggagaaaatttgatataaatgcatgtgttttatattaagtttcctgtaagacttgttttgacattttcttcttcaaaaggaataataaatatctgaatgaaggctcattgtattttaattgtcttcaccagttgttttcaatggcaggttctgcttcaagaacagaatttgggaattaggtataagttcaatgttcccatcactcgaactggcagtggagataatgaagttggctttacatggaatcatcagccttggtcagaatgctcagctacttgtgctggaggtaagatgcccactaggcagcccacccagagggcaagatggagaacaaaacacattctgagctatgctttgtgtttgttaaaaaagctaattggaaacatttcttgcaggtttgcttcaagctgtaatttagcaaaagaaactttgctttaattatattatattccatttgttttcaacctcatgtaatttgtgcagatttgttggtaaaatacatcttggcacaatgagtgtctctgctggtgcttctcccaagactatcttgaaggtgggctgtttgcctttcgtgaacacattcttggtaaagaacatcaaaagttttaaaaaagaaaatgagcaagaatcagacatcacagatgcaacttcttgtaatgggagatgagaatgtacggctgtgtgcttgttgtgtgtgtttgtgtgcctgtgtgtttgccacaatcctattcaaactcccttctcctgccatcaaagttaaggggctgtatactgggatgctacaataattactggtatctgggttctgggttaatggtgtatactgaccccattacagtccctcagaggtagctgctaggcggtggttggtgatgtgttggttgtcccatgtgcgtttttcatgggtgccttttccctacaatttactctattcctaatcctcctccctctagtggccaccaatgcaattctttacctctggctgggagagcaggacagttggcttccttcaaagccaacacccttgctgctgcatggactggtgagtagaagtgctgtgcaagcagcatcttccttctctctggagactaaatgcatcgcctccaccgtacaccttgatcctaacaggcaaggaaacaaacctgtccttcaggcctaggctggactagatcacctcaccattccagaagcaaagattaaattttaaatagtgatatttattttgggaaaaattaaaataaagtaaatcatccaatacattacctatactccttttttaaactatgcagaaatatatgatttttatatagacttcatcctgtcttgtatttgcatcttctgattttcaagtcttaaatcagagaggttatttttagagaaataattaacatataatctattcagtatttttattttattttattacttattacttttttttttttgagacaggtttttgctctgttgcccaagctggagtgcagtgacacgatcatggctcactgcagcctcaacctcctgggctcaagtgatcctcccacctcaaccttctgagtagctagggagcacgccaccacacctggctaattttaaaaatttttgtaaagacaggatctcactgtgttgcctaggcttgtctggaactcctggcctcaagcattcctcctgcctcagtctcccaaaatgctgggattatgggcatgggccatcacgcccagcctaattcagtatttttagtctcatacagaattaaagcaatgattaactacaactccaatttcaatataaagtctatacaacatgaaaaaaacaaaaaagatgaataataatatattaatgtactctactgtgtaaagtatcatgaaacatggttatgtataattcgtgacatattttaaaagatctctagttcccatccattttatgtgtaaaatggctggtgatttgtaatgtaaagtttttaaagccataggacattaccatttttaaataaagaaatatttgcaactaattgatcaagtatatgccattgcattatttttagtggcatttatacatatatctatcttttatccaattcaattctttttattctataaattaacttttccctttgcatattccaacaaaaagtcttctagaacaatacatacataattcaggccctgaggcaaggtgggataaacttattaaagaataatttaaataatttgaagtttaggaaatctaataaggatagtctaaagttaaagtggattagcttggagaaaagaaagctaaggggatgcatattagcatacgacagaaggttgaatgggaaattcttagagccgcttcatctttgtactgaaattgctatatttggggatggtttagatacagtcttgtctgagaccaagaaaggattaaatgaattcttaatgttccttcaatcctatgattctatttgttcagaaaggagataatccaacaaaaaagcaaagaagaagaagaggaaaaaggccatgagaactgaatttggaagaaaaaaatataattttgttgaagtcagaaagtaaaaagtctaaatgagtgttatttttttccataacacttgcattgagaaatagaagtgatttcttgtggtagggggtaaaaaaaaaaaaaaaaaaaaaaagagagagaaaagcctctggaagggagagctttctcttccttgttatttattcttctttctgtgatctggagctactggtcttagatactggaggtggttctgggaactcacattagggttggttgtgggtgattatgagcattcttgaggctattgccttcttcaaatgagggatatagagggcatggtgtaaagagctgccatttgtttcggtaagtggttcttaaagtctggtcccgccagcagcatcaacatcatttagaaacttgttagaaatgctaatttgagcaccccattacagacctactgaacagaaactcttcgagtggggcgcattaatctgcgtttcaacaagccctgcaggtgattttgttgctcgctcaagtttgtgtaccactggtcttggctgacagagaaaccaaacccagcactctagacacgtggaatccgtgtcttcatcactgaagtctgtgcatctttgtaaactcattttgcccctagaacaatatccgaaacatagtaggggcccaataagtgcaccttattgagcaccttaatgaggccaatggtggcctcccaaaatgctagatgagtgaatgagtaaaaggaattaattttggcaattatatatttgtgcttgtcctttctaatgtgggagatgaaagtttagagttgctacttttcttatagagtggggcaaagctttgccaaggaaaaacagtatcattttaattagcataggtaggtaaaaccaagctcctctcttttttactttgttttttttgtttattttttgttttgttttgggtttttttgtgttttgagacagagtctcaccctgtcacccaggctggagcacagtggtgtgatctcggctcactgcaacctctgcctcccgggtttaagtgactattccacctcagcctcccaagtagctcagactacaggcgcccaccaacacgcctggctaatttttgtatttttagtagagacggagtttcaccatgttggccaggctggtcttgaactcctgacctcaagtgacccacctgcgtcagcctcccagagtgctaggattacaggcgtgagccactgcacccagccatcttgcttactttgaataggtggaaaatatttcctaggatatagagtgcaggaatcaattgttgaagttgctcttcttacacttttaaccccaggttcttaagaagcttacttttaaccctcacttttaaccccaggttcttaagaagcttatgattgagggaagtaaagtccctttagagtttaggaactttgacccaagaaaaagccagagtcatcttctccttaatgaaacttcattttatcgttaagaaacccttcaagaagtcatttctacttacctttcactcagaaactaaggatgaattctaaagtcagttctttttttgttggttttttgtttttgtttttgtttttgctgtcattaagtctattgtctttataagggacattttgggatggttccacctcatcattttaacttctttcttgggcttctcatagactggattctctcctgtggcagcaagagctttcttatacatcttccccatcatgtctggagttacactgttctttatgtgttgagagaactgtttcttgtaagcatcttcatcttcctccattaagtagcacatgtaatctgaaacattctggcccatgatgtgcttctggtgtacttccacattaaattatttgctttcagaatcataaccagggaattgtttggtactgtgagggatagacaagcctccatccatagcttcctttggggtgccaaaaactttattgccagtggtagttctggcaaggcctgcatccagatagcagataaagacacctggttgaacatcaatgctttccacattatattcatctccaatcaactccgcttggccttcatagatcttttttttttttttttttttgagacggagtttcgctctgtcgcccaggctggagtgcagtggcgcgatctcgactcactgcaagctccgcctcccgggttcacgccattctcctgcctcagcctcccgtgtagctgggactacaggcgcgcgccaccatgcccggctaatttttgtatttttagtagagacggggtttcaccgtgttagccaggatggtctcgatctcctgacctcgtgatccgcccgtctcggccttccaaagtgctgggattacaggcgtgagccaccgcgcccggccggccttcatagatcttatccatgccaaacctattgaaaagcctgtgggccagcagcaggccaatatagtacgctgcagcatcatttgtcaggccaatcttcacaccatattttggcagttcatgtgcgtatgctgtgcaaactatcatatccccttacatatgggcataagcaatctgacaaatggtatctctgtttgttatgtgagctatcaacctgtatttgggtgtgtgttttttatttatttattgtctgccacttgacagagacctgcaggcccagcagtgctaggtgggaaaaagggataaagtcagttcttaactgagatactccatgttcatctctccaaggaggtgctgggtgtcttgaggctgtcaaaattcttttaagtggcaaagagaaaacaagaaagatctcaaagaactttcggtggcagtctcacaagatccttcagtgttctcacttgttattttcctgcatatgttttattaatatccagacctttgggctttaattgagtttgggagcaataatgatagctttctcttatgagatcttttaagataagaagcttgagactttttctgttgcttagcagatccagtgacaaatctaatgctacaggaaacattggtgattcagtccaagtaatggtcttttctctgagtcagtaatgaaacacttcctttgcctcataaggaacattgagatgctatggggtgttgtcttcagtatatgtgtgatttttgagatactgctgtaactcttcctcagagagaaatccaagcccaaaaacatggctatttccagaaccattgctactagaatttgtttctgtattccttacccaaacatatttatactttataatttactgactcccgaatttatatgctaccattggattagtgattataatcagttgctaattaatgaatcttgtctgggtagggaaagttgtattgttttaaaatacaaagctgtaggagatttttaaaagtggtaatttatgccagtatacctatgcactgtgacttctaaagtttcaaataacaaatactgtatattcatcctttgattttattcatacatattctctttttacgatgtttggctagatatgtggttctcaaatttaagcacacatcagagttacctgaagggcttgttaagacacagattgcaatgttctaccaacaatttctgattcagtagtctaggggaggctttaagaatttacatttctaagtttccaggtgttgctggtgccactggctcaggaactgtacttcggggctctggggtagacacttagatttcctaaagtaaatgcccactaaacagagtgacaagtcttttaggtaataatctatattatagttgtaaccatagtatcactaatctttttggtgacaggtggttctactgctcagctatgcaataataaaattgtaaagtttaaaacattttctggtactatatttcatttgatcatcttcagtagctccataagataggcaatgaaattactagtcataatttataggtagaattcaagtaatttgctgaaatcaagacctagcaacttagtctctagtgacctttttaatttagtaatgaggtgttcttttgtaataaaaagagctttttcaccagttggctgcctcagtagggaaacatgatatatccccacccataaagatctccttcactagcttgaaatttcattttttcaaatgccttccatagagcaatggttcttaactttggctgcacaatagaatacccaaggagaactttaaacaatgatgatactttgtccccacccccagagagtcttctttaattggctgggggtgtggcctggacatcaggctttgaaaagttccataggtaattctaacatacagccccggttgagaagtactgcttttgaaactgattaaaagttttagtcttcaaaaaattaacattcagatgcaagtacctctgggagcattactaacacagatctctgtttttaagtggctactagttgaattctaaggttatgagacttaggaatgagtatctgggatgggaaagtagagaggagcatcagagaagggaatgaaagaaggaatagcatgccacttaatttcataattttgtttaatatggccattggccttgggcatgcctatatatttacagttttccttcacttggtggatcatttataaacatccaattaatgtaataaatgcttttaaaactgactgaaattgtgctaaacagatttcccaaagctctttattctgatttcaagtttatctgatacagagctaaaatgagtagatggtcgggtattcaaccaactttaatttagatgcacaagtcagaacagaagaggcatatggcccctgtttgaactcagttattatgaacactgatacaatttgttttcttttaaattacagttctaatcagagaagaccttcattttttaggaagttactttctttaagagaatgaatctttgcagaatgcagcaatattcatgataattttctaccctacttttctgggtgtgttctcatttccctctgttcataccattctcatttcactcccatcccctcctcttatttaatattatacaatgcttaggctttaaagtgaaaccttccaaagcccattaactgataattgatgctatagtgttgtatttaactttgtacctgttctgttagaaaataaaccttaagaatagtttatttgcagtacaaagaaatgtcagaaatacatacgatattttatatttattataattttatatttatgctctaaatatacagtctgtcctgccattggctctattgacactcctgataactttctccaattttttttcctagatttttctttcttcttctttgaatagaagtgcaaaattgtgtaccaaagtttctgctaatacacaaaagcatctctctgccaaacattgctttgcagttctttgggggaagagataaagctatgcttagattactgaggagttaggaaggagacagtttactgttagagatattttttgttttgtttgaagatcaaagagcacagattttattttacatatactaaatgattatacaggaatgtttctgatcaatcatcattgactatttaaaatgctatcattacttttacatttacatttacatagtctaattttatttgtatgtttgatgcttcttttattatactttttcttccctgaatgtcattttaagcctaatgtatgagtctgtgtgtgtgtgtatttgtgtgtgtgtgtgtgtgtgtgtgtgtgtgagagagagagagagagagaaaaaaaacagcatataaacatagaagatatttatgtctttcttttttttgagctaggacaaattctttttattttactttttgagtctttacctgattctttttttttttttttttttttgagatggagtctggctctgttgcccaggctggagtgcagtggcacgatcatggctcactgcaacttccaccttcctggttcaagcaattcccctgcctcagactcccgagtagctggaattacaggcgcatgccaccatgcccggctgatttttttgtatttttagtagagacggggtttcacatgttggccagactggtctcgaactcctgacccaggcaatccacctgcctcagcctcccaaaatcatctggattcttatacatgttgtggctggtttctactctttgagatttttaagaccatttatatgatttccaactactattttgaattttcctgatgtgggaccacgtttttcaaactgtacaaaggtgcccaagggcactgcagaacattgtacattttcaggggaaacatagcgatattgatcttacagcatacaaatcattacaaagaagttatttggaactaactacaagtaaaattcttagtctttttttttctgtcttggggatgttatttttaaaattagagatactaaggatactgtgaactgaaaaagtttgagaacccctgatttgtaaaatgagtatcattaaagttggattaaaaatgtcacctaacttccttttactagatgttgaatttcatttcagaagagaaaataaatgcatataagctgctcattattcagggccctggtgatgttcagaatttaaaactggagactcttctgtacttctagctaagagactagaggttttgaataatatgtaaatttctcatatctatattccttccgatgcatcctcctgaatatgtttccttcctctgtctctgttagtttggggtaagaatagtgggtgattaaagcaaaggaaaaaaagaaatgaaggaaagaaggaactatatatttaaaggagaaattgctagcaacttctttcctgacagctaacaagtttatgtgataacctatactattgcatttattaataacacaattttcagattacttttaacgaatctgtcatgccttggcccctttaaaaagttgggtatttctacattgtttctatggaaatgttgtttgttcatgttatatatttcaggaatgatacaacaaagcataatgttgacttaaaagtatagtaagtccattctaaaatgacagtttttaaattatttaaaaaagtaattattagaaaatatgtagtacagtctttaggccagtactaatagctgactaaaagagaacagttctcaaagtaccagataaaacagagacaaatgctttacattttcagagatgtccttttaattttttgtcaattctaagatgtctaacacatttaatatcactaagaggttaattcacattattagtgaactaacagaatgtgcttcaaacaaacaagggttctgagacttatgttttacggacgtaataacaaaaataatgactaacacttgtattgcagcttataaaggacacattcactgtaactttcacagaaactcaaagcagaggagccccaaatggagcataggaaaacaaagtccagttgttgtttttttttttcaagattcaaaatagacttgattgaaattaagtgcgaaagacataaaaaaggttgaatcttataactaaatgtgcttatctttcacttaggagttaccaatccagaagttattttcagagttaaataaaagattacagagggaaactttagtttgaatagttaaaagcactttattcaatgccattcatttccctctgaagaaacataattatatagttagttttaaagaaaaattccctgtgaaagatagtttctgtgtggggttgtacaatgtactattattttttgaaatcatgaaggtccttttacatttgagtcctgtatatatcaaacgtagatataaaacctatcactgagatttttaaaataatacaaatcccctataaaaaaatgacttgagtttaggaagaacaaaggtttgcattcagctttgttgatcattattccctagttttcactttggtctttgaaaaataatatatttatcggactagacaatggtctgtcactgcattaaccatgacatccccctattcactctctcccacaattccctcctctcaggtcactttcaatgttgtgaaggaagagtgtcctttaacctgggattagctgtacccagcatcataacagggcacctgtgaacatcacagcccccaagatcctaggctctgtaatcattaaccttactgggttagttcttatataacttgactcttgagattgcagagtatctcttctatataaactcatgttcgtggttggttcacacttctggaagctaatatgtgtgttcatttatttatctataataattttcatttatcttttttccttaagcatatggcttctcctatataactacttttacaaaaattctttgaattatcctgcatattttcaatataacttaagcttaaagtcttacatatgaagagttattttgataatcttgacatgttttgctgtttacttctgcatgttgtggattgcattttctctaatgtgaagatttataactgaaggcaagaaatctctgctaagccaaaatattctcctagtactgtttcatcatttcatcagtcctctttcatcatttgtgttgctttagtgattatattcttccctaacacgagcagggtttggatacatattcagtcactgaaaaacttgggtgaatctgaaaccacagtttgagtgcattcctattgtattaatgatctatatatcacaggtcatgtttcacttcacaaaaattctttccaaaatagtatttttaacagtcataacattattcatctttacatgtttgaatgcataaaatacttttggaaaaaacaaagccttttaaaaataaagccttttattatggtaagcatgatcatcctgattttgtgggaacttatgatattactatttccatctttagttgaagaaaatgaagatttttagtttaaaagctatacagtttgtatatgattatatccttattttaactcaaatttgaaatatttcaagatttggttcctagaaagggattttatatatgtttaaaagaaaagcctgtctattgatgataaatacattacactgtgtggaagaagctcaaggcctttgtactctcaacaatattcctctaaaatttaaataaaataccaaaaacaagctcttacttaaggtcatggagatgactttctagtataatataactaatcctttcttttttctagagacaggtctttctatgttgcccaggctggagtgcagttgcacagtaatagcccactgcagcctagaactcctggcctcaagtgatcctcctgcctcagcctcccgagttgctgagattacaggtgtgagcatgtacacccatgctgggtataccagcatgatttaattctttatattaggaaacttgcctttcacaatttcctatttctagttagtattctgcctcttgacatgtgtaacccctttgacatgtacctcgcactggtacaaacttaggcacttgaaacaagactgcaaaaccaaatgaaaagaaacatgcctgttttctagacttactctgtagaatacagaggaaaagcagacacataagggagagagaattggtggaaaaaaatgttgaacaattgaaatgtggaggaagagaagagaaggcaacttttatagaagtttggatctggaagaagcattctaaattatctttatgtatttgattacctcattttacaaagaagaatgaaaacttgccttaggtcatttacctaaaccacttagaagtcaaaaagaggtaactaaacatggcagaatttgggatgagaaaaaacaaaggaacaagataaagtgaaaggtaatatcatttggctatgaaaagagtttggctatgaaatttggctatgaaaagagttcttcagatcagtgaggatcaggaaaagagaaatcagacagtaataagataaaatggggaaactataaactaaaaatattagacctgaaaatgcactattttattagatatcttccatcatgtaatataattataatggtacttgccctgttccaccccacccccattttagtgtaatctcattgaggtcaagactgtcttactcagtaactttctcccttatagtactaaaaaagtatacattagacatagtaggaactaaattagttaaaaacttagatactttatatggaaaagattactcttaatagctaaggagtaataggaattctctccagggataagctcagtatacgtatgttccaccctaccttaccattactaaacacagttgttctagaaaaatacaatatttttagagctacattttgcttttgatcatcctttgtttacttaggacatccagttttgcttaggacagaaggaaatacactgaaaaggacagaaggaaagacactgaaaagagaagggaagcctttgaaagataaaaactagcaggaggctcttcagaagaaggaaccatatgagtggagttgattggtaccctgggttccagctgttagatccaaggcagatgggctttgctctgccctgcaaatgcttgtgtctggccaacaatcacacggcacaacagccagattccagcagtgaaaggcagagcggagagacattttttttcctggcacttgtcactctttggatgctatctgcattaaagatttaaattaaattaatattgctggccatatgctctgtatactgtagttatatagtgttgtcttggttgctagctactatggatgctgtggctaagcaaattgttgccttagccaccagacacatttttagtacaagctctgactttttaatgttacctccttctcttcagaaaactgtttcttgggtagatatgatgtgctatgtcactaggttaaattatttagatgttggttagcccatcaattccaagaatacatttatatttctttctttttattgttgactcattcacaggaggttgtagaatgcccatttatccattacatggtctatcactgaaatgatgggactgatgagtagagttgagaagacttagaaagtctttctcctgcccttaaccacccccgacccatccttcttggtttaacacatgtcaccctttcaagttaaattcaagttgtaatttctgtaccttgagtgccttctttctacttttaagatggtaaattgccctgagaaaagcaatatattgccaaatactatgttacaaatgagtttacaaaattatttaattctctgaaagaagagaaagataggaacacatgagaacattgggcagctaataagaggagtagagggactggaatggagggaagaaatgaagaagagcgatggtctctgaactctttgctcagactgggactcacttgaaccatcaccaccccctagagtaagaacagcagatggtttccatccaggactcatttgccatttgatgggcttcttgcaccttttcctttggtacatactgtataaaaatgccattaaagccatttcttgatatgtagctagagcagtgattcaagtggaatatgccttcttcccattgtataaaagaacctttgatgggaaaatagatctttaactttgaactattggcagaaaattaaatataggatctgacatttaaacttatggacaaaaagtgagggttacatttctgtggtaaggaccatcatatttgaatctttagtatcaaagaataaaaagataagcaaattaaaagtctctaaacagaatataccttttgtagagggtttaaagtaaatatatattggcaatatcatctcttataattaactttcgtaatatgaagccattactttttttaagcatggaggaaggattgcattaaaaaaacatatacatacagtttgcatgccagtaactttaggtgtttaagaataaaatacaattagtgtatttttattaaattctgcagaacatctgcttatttccaggggatctggacactaagccactagaattttgtttttgattaggtacacactgactggtcatgtggacattttatgttttggttataaactataagtctttagatttgaaagcatcgtggtttcgtgtaactggatgtaattattcccaaccgggtttaaaatcaacatcttagcaatgttttacagactactttaaaagaagttatgtacaagaggcttgatcatataaaaagaatctaaactcaatcatttctcttgtggacttagtttagattatttccagttgatctgtattttctactttctaaagttaaaagctgcattttccttaattcaaaagtatgtgtttaaaaatccattcatttagatgccttggtttatagagttatcctgttgctactgacttaaaaagaaaaaaaaatctgtaaacctgccaagtgtgggagtaatagttggaaggagctttgtatgctgttggaggaagatagtacagtgttgtaggaagatttggaatagattactgatatagtcaattcttgagtgtgaaataccacactgtctaatataacattctagaagaaaattaataaaagacaaatgtaaggaaaacatgcatcttcataaaatatagagcaatttcagctgtctattcaaggactttaatttttacttcataaaaaatagcattctgaaatcatgaagctaaaatgaacacctaagtactcttgattcccagtttttaagaagtatggaaggaaggcatgatcaaaattaagtcaattcataattcttagcacttagcccaatatctcccaagagatactgtgtttatatctcataaacacaatgctttggtttagtaactatctctgttgaatgaatgaatgaatgagtaaatgaatgaatgacctgccaactacatttagctgacagttttagtttgggtatacatgtaatttttaaactaattactggatcccactaaagagcaaaatagccctgaaattaaaggggtctgaaacaaaatattggactatgggtcagttttatttcttccttgtggttttgtgtaattttccaaatttttgataacaaatattatgtaccaaatttttttcaagatacatacattgttagaatttatcataaaatgaaatataaatcacagctctactaactcatatctcatctatgattcaaattgcagaggccctgcttttgcaataaaggctacttttgaaaacaaatgtaattatagccaaacaacatttctagggttaagttagagaaagaagaattttatcttgacttaattcagtttctacaagtcaaggaaactgaattaatgtttctgccactgaaacaaaaccagatcagttgtattttgtagtgttgagaatgtttattccttcctgagaaataaccaagatatgttttggatgccagtgttcttgtttcaagtatagtcatgtttgaatgacttaaaaaaaaataatcacactaaccaataaaaaaaaatcccctgctgtccctgatagaggcaaaatattgaaccaggatggatggataatctgagccactgttggagttggtagttgactcctatgactaatggtagaggtatctgtctaggtggaccacatggacctagttatctgcccactggaatgacacaatggggagatatccgatgaatatcatggaacatctgtgaatggatcacaactatgcctgatgtgaatcattcttccctcaaaaattctaaagtttaatagttaaaaaattccaaactgttgtcgtcacataaacttcattgtttggcttattttaggggttgggagggaaggaatacaatacatactctaggacattttgccagtaagttgtttgactatgtttaagacccctaagtttaggaaaacataaaaaatggttgcagaaggtgatcagcaagagccctgggtcagtgcaagcaataaaaaagactaactgctcaccactgtcatggaagctacaggatttaagtgtcatgagcttggtggatttaatagtttgccctgtcagtctttaaatttaaagggcttagttaaaggtaggtgtgcataacatgataacggaggcactcccacctgcagaatttctatgatttaggggaacttgggggaagcatttggtgtgtagctctttaggtgacagtttctttcactgaatgatcctgtttcacatatatttccctaatttgtgatcacactgtttttttagggcattattacttgaaacaactgggaaaaaaaaaagaaaaacaactgaaggattgtgtgggattagctaggtgtgaagctgtggtttcctggatactgctaatgctgcttttacaactctttctgggtaatttagcctacctgtttatagagatggggtgggtgagtgggggaatagcttagtgtgtgcttttatttctattgccaggagtaacctgttaccgctatatgatctgaaacatttagcattgtcttgtagtttgacgtgtttctctttgatatcttgatatacctgtctgcttcttttgtttccttgacactaaagagaaaatgagtatacataaaatctgttcatcaggaacatttacaaatacgagtgtgtgtttgtgtgtgtctttatattttgtgaaatgtgagcaagttatggtgaatatctttgccaataattgacatatatttaatattttataaactgtatgagaatatttttagctgtggtaaacatatcacatagactaattttttaaaatgagataaattaatatttgaatgaactgtgtatgtatgtatttgacagtggtataatcaacaggggtcaactctgttcgaataaacagactagttggttacagtccaaaagaggcccactgcaatctctaatttctaaacaatgaatgggcttttagagagataaatatataaacggaagaaaaaatgaaatgtgtggatgtgatgtattcctaacaaaaactaaatagatgggatttgttctacaaaatatcaaaaagtaaatttgtccctattgttctatttttaaataaatatacaatcattgttttgcattgaaatgcatatttgtacattttatttgataatattattttgggaaattgtaatctgttgttttgtttgtttgttaagggaagcacgaagaagaatttacaaatgtgaataaaattgtttaagattaccaatagtttcttttctggacttgaaatagttacgtttctaaatatgagaaaaataactttgcctaaaatttcagtataatgaccaggtcttctctccattttagagaagcagtccaatgtggaacagataagacggcagcgatccagtgaggtcaattccccacagaggaaagctatgcatacctaacttaatggaaggtaaacttctcttcaattaatgatgtcctccttttctcaaggtgtccaaagacaggaggtggtctgtaaaaggttggatgacaactccattgtccagaacaattactgtgatcctgacagtaagccacctgaaaatcaaagagcctgcaacactgagccctgcccacctgagtaagtaagggaaagaaatgagaattattttcttcaggtgcaaagagaaaaacattatgtattcatgtttggaaatatatttatatgatgagaataaattaggctgaaaaaaggtagaaaacatcctgagagggaggaattttgatgtctcttttagtgagcaaagattcctatttatccatagatttcagtcattaacttctttaaagcaggaacttcaatgaattttgttctgacacaatgctggaaatgatcatatttcatcaattctaaagcacacatcttttcacattttagcatctctgaaattaggattcaacttgcagctaatggtgtcttactataataattgacatttttcccctctcttaatggcacataaaaaaaaagtcttagatgtaataaaatatagtgatttatttacactcctgtcttttctacatatttgtcctaaagatctaaagacctcttttttttttttttttttttttttttttttgagacggagtctcgctctgtcgcccaggctggagtgcagtggcgcgatctcggcttactgcaagctctgcctccagggttcatgccattctcctgcctcagcctcccaagtacctgggactacaggcgcccaccaccacacccggctaaattttttgtatttttagtagagacggggtttcactgtgttagccaggatcacctcgtgatccgcccgcctcggcctcccaaagtgctgggattacaggcatgagccaccgtgcccagccaagacctaaagacttttaaaatggtttagaaatactctggaatagaatatcagggctttaatttgctgacccagtttaaagttctgttgttgtaaggcatcctatattctgagtgttgggtacaggcatagaggtatacttcagtctctttctgttgattaatgcagcaatacaactcactgtaaagggattaacaaggagagagcccattcattttaatgatggttttaaatgagacctgctctcaatgagccacacattataatctgtaagaacagaaatgtttcttgattgagcaaaaggctcaagatgattatgtgatgttgagttgatcacgacaaaagtaatctttgtagagattttgcctgattgaaaactgcaagagaaaacatgtgtgattggcatttcattcttgtttgagaaattggatgaactgttatcttcctggttaattaatcatcccaacatgaaactgataaggcaaaagagaataagcaaatgaatttgtatgttccaaactctctacaactggagagaaaaactttataatgaagcttctctaaaaatgactagagtggagctacataaacatggaagttaaaatacataaataatccatgtcccaaataacgtttaaaccaaggtgcatttcttgttcaaggtgcatttcttgttccaaagcaataatgccttttgaacttccattatttaaagtcagtgtctgcctgaacatttgaatcttaaaggtgatactcactactagtcccttgaagaggtgtagggtattggcaaccaaataagaagcacaaggaatctagagtgatagtttttgttctaagacttttgcaattttacattgagttcttttcaaaatgttatcaccatataactaatctcttaaaatccagacatgggaaagtatcaaaatgtgacctatcatatgtgttacaaagacaagttattaaatttttttcacattcctcttttctgccaattatttttataaatttatctcaagagaaactgagaaactgtagagcaatgcgatgctcaaaatccatgggccaattttgtccctttctatgtttccagtaacttcagcatattttcatgtcattgtgagtctcagtctattacgttaattctctgacattcaggatcttaagtagtatatttggcatttgatcagcctgtgaaggcatctgagtgagcctggtcacaccctattccattttggcctaagctttttcatttgtttaagcttaaaagtttaaatgtccagtgtccttaaagatttcagttgttggtcatttcatcccataagttgtgtgtttgagtattacattggaggtttgtttttgttttttaacagtttaaggataattgacatattgatgtacactattaaaattaagctttctatctccttatgtagttctgaagtgaagttacttacttaagtttggagatggggaatggaattcaaaagaaaagatacagagaatatgggaaaaatagaaagtttagtctgatgggttttttttaaagacctaaatgtagatacttaaaatattactcattattagcctacttctcttagttgctttttaatttcttctttagtcttttgaattcagactatggaaaaggaaattttaattcttcaaaatggttatatatgcttgacttgtggtgggattacatcctgataaacctatacaaagttgaaaacattgcaagttgaaatgcatttacttcacctaacctactgaacatcatagcatagcccagtgcaccgtaaatgtgctcagaacactaccattgggcaaaatcatctggcaacacagtacactgtagagtattggtcatttacgctcatgatagcgtagctgactgggagctgcagattgctgttgctgcccaacatctagagatactattgtacctcatattgctagggtaggaaaaggttaaaattcaaaaattcaagtagtttctactaaatgtgtattgctttcttatcatgtaaagttgaaaaatcattaggtcaaaccgtcaaacatcagggaccatctgagattcccagttgacattggtattatagagatagaaatcatagaaaggctactgaattcagtaaaactttacgagtgtgaagaaagcagataggttttttttagatgatcatgtgataggcagataagcaaaaagaaggaaacaaaaaaacctataaaccactgttaatactttgatgtatatatttccagtattttttctatgtatacagaggcatgtgtatataaaaaaaattgtattacactacttatgacactttatagtcagttctcaacatttggaacatttgaagtctttgacaacgtttagtagatatgtgattgtttatttaaattggtattccactcttgaacgattttggctgtactttttattttgatcccctgcaataatgcagcattaaccacttttgcttctgaaactgttctttataattatatatgctaaataaagaagaaaataatttatagttcaaatggaagcacatgttagtctttgagatcacattgtccaattactttccagaaagattgtgtgaatctatattccgattaacagtctatgagaatgccattttcctggaagtgaacaacagtcgttattattattttaaaaataatctttcattattttataggggaaaagccctgatatctaattgctgtcttattttgcatatatgggactgctgatgggactgaacatttaaaaattatgtttagtggctgtttgtactacttctcttttgccttttatcatcatggcctgtcctattgaactacttatcaatacttctattgaagtatttattattttgttattgatttgaatgaactcttaatgtattaaggatatgaactcttttatctgtgttctgaatattttttcctagtttgtcgtctattttccatgttatttatggtgttttgatctatttttactgataaaatttagaaaatcttatttaagaaagctgtcaaacctttatttcttcattggtacactgtttagaaaggtcttccccactcttatactttcaaagtttctttttttatttttaatgtaaacattgatctatctgaaatgttttgcctgatttgaggaagggatctatacttattttcaatcacgattgttttccctataccattagtttaaaattctaaatcgtattttttatcagaaagtattttttcaaataatgaaatatttcaaatgtctttagttatattgagagaatttataagtacagtatacaaaaagggagaacagtaagatttgtccttatagagaaaatgacggaggactaggaaaaatagacaaaacaggcattgatagagaaataatattatgtttatttggaagactttgaagacccagaggagtccttgctggggaaagttatcatgttcatagcagcaactctttttataagaaagagtatagtagtcaaggtagtaaagtgactatgaatgaaagtagtgggatccatgacatagccttaaataactggaaaaaaaaaaaaggaaaggaattaatattaaaggatatgattggtaagaagctaatccccaaccataagaaaaaaaaataagttggaatccaaagagaaaggctgagttaagtttttaccatgccgtgttttaatagcaagagtatttctgcatatgacctcatgtgaagaatccttgagtgataaatattattcctgtatgatactgtggtttttaaaattgtgaaaaccagagaggtgaaaacaagagaactattcattttaataatattgtgaccaagaatttaaaaacatttattaatcaacttcaagttggaagacactgtactttgggagaaatggttctctttcctgagggtaatctaattgggcaaatatatacaaaaataactacagtacaagacaaaatctgttaagtacaataagagagttataagcaaaagtgctgaaggaaacttagggtgggaagagattaatttttatccagtggctaggttttatttaattggtatattttaaggtataatgtttaataaccattattctgagtcattggacctcacccatggacaactgtcatctcttattttaagcttagaaaaaaattcattagagtcatctataaaactccaaaatttaagacctaggaagaatcatagaaattatttaggtccactcccatcatttcacagactgaggtatgctaatatccagtgatgttttttccattacatcagacatcaccagcttggtaaggtacaaatcaaatgtctggtggcactttgatacatctaattttgcttgcttcattgacacattctcagttgctacaacttcagagatgtttattatgttgatttttaaaaatttagaaaaaccttgactgtataatgtttagggcatacagtgttctgcttaatattagtttcactttccaattagctgagaaatgaaaaaaaattctttttatttttttaacaactttttgttttgaaatttttttaagttaatttaaaatgtaggaaagttttttatctttgtaagtagacaataatttatataaatgaatttctctttgagtaaagatattattgtcaaattctgaagatttttacaattttgctatgttgtgtttgtaaaaagagttgatgattagacccttgactctgggacaaagcctaggaaatctctctcttaatcctaatatttaatatcagtttattttcatatgctctgccattttcctttaaattaaaaagcaaaaacaatattctggttttatgatgattatttcttcaaaaatattctggtttaccaaggttggggcaaattttttatactgtctctcttattcccttctccaaattatactattttttgtaataataagagatcgggactgtaggtcagattacagaggctgcagcaagccactcttatttcagacactcgaacatgaatcccactaattgttaatgtctaatagctatgaaggacttgtgaagataaagacaatttgtgtattgggaaaagctcagaaagaaacagccccagaattgttccagctataacgattcggcaatttatattcccagagagaatttctgtattcatgtttttgccaccaagtctagaggagggaaagaagacagagaaagaatgccatcagagggtcaaatacgtggagaaggaagacaagggaaagcagtatgtcttaaactagatgggagagtggagaaactgagacaagcagatgcagtggtagaattgcaaaactgtttaaataactagggtgtgatttaatccttcagagagacatgggaagggatgatacgatgagcaataaagatgcaacagggactgagtgtgaagcctgaaatgagagttaaagtcagaaaggaaattgggagggtgattaatacttctgatttcatatattccaagttaaaggctagagtgatacatctaggttaagtttctgaggagagatggaatggaagaggggacaaagaataaaaagacagaggtgtccctgaccctttgcaacacttctgaatcattgtggttactcgggacacctgtgtttaatttgaaggcctccatccctcttacattatgagaactaatgagatcatggctggaggttgtgtgactgaactttttgtgactgtaatacacatttctgttttatcccctaatcttggtgatgaaatcactgttgcaaagttgaatcagagtttcactatggctggcatgcaagtattattttcagtacacattttcctccttaccaaaaatggtactaacaactggggatcatgttcatctgtggaaaacagaaaggaaagaatatgaaaattactttaaatctcccttggaaaatgacttagaaaaaatgtttgtgtcagattttttaaattcaaaattaaatcatcattctttaaatgaattttaggctgaaaatttgtagatgttgataaaatataatttaaatttgaaaaactggctaactatatttctaaatgctggttttctttataagtaaagacaatacgaataataatgaacaaaggccagtgttggcttaatgcagtctcaaatttaggatactagtactctgacttcactaaagtattatcttccgtatacaaaactggcacaatggagctatgctcacagaaacagtgagaaatttgctcttaagctttccatattcttctctcttgggagtctcccacctaaaagcatgagcatgttcattgagaataactgcatgatttataattatggattgaagaaaatgtcttgtgatcccgtgcttgtaacctatattttactattcagcaatgttaaaatgaatttcgattgaaatagcaatcaatggggaatccagtcctgattccatcattgctcttttcacgattttggagaactgttttcctaacactggatcttactttcttctataaaacaaagcacaatgccttgaacgtagtagacattcagcaaatatttaataaatgaaatacaatatgtcagtcaagacccttgtttcagataacaaaacttcaacttgagctggcttcagcacataagatttacgtaacacagctgagggaagtgtaagggggaacctagcttgagaaatggctggaatcaaggactcacacaccacccaggctttctagctcctgtgcattctttgaaatcagctaatttcacttgacagggaacccagccactgcagctctgaactcatcatcttatgcacctttgtgaccagaaaggaaagggtcccttttgctccagttgagatataaaaattctaaaccagaattctcattgatctgatttagatcatgagttacatcccttagactaattaatgtgtccagaagagtgaatcctgcagaagtgttgcaaaaaaaacaaaacaaaccacaaaccccctgaaattatgtatgtgaaagtttatgactttagggtaaaggtgtagtatacctacaaatgtgagacatgttatttttttctaagacatttgcatttctttccacattagctgtgtagaagctgtttttaggagccaaaaggttgaaacaagagatctgcctgttttcatagagctagctcagagctctgctcttgccgaaggtgttttaagactcccatgttctcaggatggatacctggtcttctctgtccttgtaaggacattcacatcctatcttcatagaggtttatttctagaaattgaaaaacaaatcctcagcttccttagagtggttttagcataaaatttttaattatgggagaacctgcctcaatgtgataataataaaaatacctactatttcttgtttgttatatgacagacactatgttagaagcattcagtggtgtgctggagccagctagtattggttcataggaccctattattagcatatcttctcctgttcacctttagtatatcaagctggtagcttgaaattggccatagtgaggtttttacactacaaaaattggcaaatgccacaaatcagaactcccccaccccctgccatagggagccagtggttaaacatttattagcgcatcactgggagctttatatatatgaccttatttaaccctcgtgacaattttttatgagattgatcattgttatcctcattttagaatgtaattaaaaaggagaaaaataaaagaggtttaaagacatagtgcacttgtttgaacctgggttctgtccacacactacactttagaaagcaaatgacagtaaaggtcttttccttagcagctctttcatttgccatttgtcttattaaccaacattgaaatgtcagctcgtagtccatcagtgaaagtgccttcacttagctaaaaatctctggatgcactgaggaaatgcttttctgtgtttcttccatgtcttgctgcaggtggttcattggggattggttggaatgcagcaagacttgtgatggtgggatgcgcacaagggcagtgctctgcatcaggaagatcggaccttctgaggaggagacgctggactacagtggttgtttaacacaccggcctgtcgaaaaagagccctgcaacaaccagtcatgtccaccacagtgggtggctttggactggtctgaggtaaggaaatctgaggctatatgtatatgttttgaaatgtcctaactatctatcctaaagcagttaatattaaggacacctgaacatcttagaactcaacaagtaagggctgtgtaacagtgaccatgttatattttattgctgcttgtcaggaaataaggggtgtttttgggtgggtaagggaaatcagcgagaaacttgtcatcaatttgattaaaaataagtctaaagtaaatttgaaataacattatagtgggtactcttataagtggtttttctccttcttactgttgagcacatcacaagtttagaatttgcgatacatgattaaaaattgaagttcaaaaggagagtcaagaacctttcttaccccaaaagttattgaagacctagaatgaccttttctaggatctcatttggaaagcacaatttttaaaatatcttttttcaagtaatgtagcagcctaattacgtaactcttaggtatgaattgttatcaattcattatcacttacgacctatctatatattttatgtcttctatttcaactgtgaaagaaacatggagctgaaggttataacataggaaaacatcaaatttgacttgatcattcccttcacttacatgaggaagacctgaccaagataatgttttcttggcatagatgtgtacaaaatacctaataaaatccagagccactcagaaaaattatcttatgaaaaattaggtaagaggtagttaatttttgactcctcagtatccatgagacagatacgtatgcatactatataattttccacatctcccaaagaagggctgaagccttctgtagtgtgtgttaagtgttaagaatgagtaccttgctatataaccagagatatttctttcaagttagcaaaacaggatgcatctcagactctgttctaatatatcctgccagaaacattgtggtacttgctttgggtatttcctgtagacctcatacatttgtcaaaatacaaacaaaaatattaaacgttgttctttaggaacctttggatgttactattcccctgtgaatcttactgcttgagtggccttattttgctggagcacaggactgaaagaagcactgtgtttaagatggtacatggaagtggagattctgaccagttgtggttatccatggaatctttggcaggaattgggagtgttcttccaagtttcctagccatagtccagcttcagtaattacattctgcctacctaagttagattttttagttatatatttcaatcatatgtagagatatccttggtattattctgtcagtggtcatggaaaacagtatggactctcctgttccctaacgggatacattaactcctaattgatttgaaagataaaatccattgataaagaatagacattctgcagagttgtacacatgttagtgcccaggacccttatagaaatccataaatattcattggtatgagaaatttgttatgggaaaatcataataggagacctaatgattggctgccacagtttgagggcttcaggtcaagtcagtaagtttgagtgattactaaacatactgggataggcaccatgggtaacatgaaagaatcccataagcttgggcaaatgaaaaatacccatgaaacaactagagaataatacatataaggcagtgtgtaataaaacagtggattgtgaggtataaatgtataattaatatggaaattcagagctgagaagggcagaatagcctggagtaggatcagaaggctttttagttgatgggatttaagctgaatatggaggggtatagagttgggagtagggaagagaatagggaagctagagaaaggatgcctgaaaagagaaatggctaaacagaaacacaaagagtggataatgaaagcagtgtgagagaaaagggtttgtttttaagaataaatgaaagactgatagtgataggtactaggaaggttagaatacagaactctatactatatcacccttcataagcagaaggaatgccttctgagaaatttctagaagaagttgctgccaaccactaaaatatcaaaacttcatgtaagcctcatttcacactgatcttctgacctacactattctgtatcattatatgtttttaaataaaacaaccacatatagtcaccttgagagatagcttgtgtatattaactgatatgcttccattccaaattctattttaaagtttccttcagaattcaacttcacataggttgatcttacccctctattagaattttgattcttatctatccagtctttgaagtgactcactcaaatggctctaagaggctctaaggcatttttggaggctgcctgaagatgtacatctaagctgaggacacttttaatcgcatttctgcaatactctttaacatggctgagtcaaagcttaggggcaagaaatggtgctgaggggctggagtacacatgtggggaccactgcctcagataaagcattgtccaagggagctgctgttgtctttccacagacaggaaacaattctgggataagcacaggtcgaaaactgctgctgttactgtctcaaaatttctagttgagcaccatctttaccactgtcatcatcccttgttcaagaggaaaaatggtttttgccccatactgttactcctgtttatttccccaagggggtatgtggggtgtgtttactctcacgcttccattaccttagtttaccaggcagcccatctctttccttccctagatgggttaacaataagtaagaataaataacgttaaatagatgtctgagtagctattgtgaacaaaatgagaacaaggagcctgttcttcccaaaggaatggaacacctcccactaatgaaaagagaaggtcccagcggaagagcaggcggtattcagtctctttcagttaacctttggcaaatatttcacacaatttttttgacacacccatgaaaacctcccctttctgccccctccccacttccaactctcagctgtctgagctctgctaatcacaagggtgaggttcaactggtgaaaacatattgcagcaagaggaatttgccctttgaccctttccttttctctgccggctactgtagtgtaaaatttccattgttgtaaagccagcgtcagtgaaacccacccagtacttatggcaaaaggaaaaaaaaaaaagttaaattaccttggcggaaaatggctcatcagcagccttttctggaactaatgaagccacagctttcgcatatcctataatctatacttgggatcacccaggctatttggactttacatagttttctgtttttgccctcactgggcaagtagctcttgaaagcattgctgcatactgtggatggggtccagcagccctaacccatgcttttgatgtatcaaaatggtttatttgactcctatagaataatgcccattgaaaaagatacatttcttatacttactcttggacaagtgggtaactggcatcttactcaactgactttatagtacgtatgtttagatagcattacttacggaagatggggaaaatctacctacaagggactgtgttttgtttgataagacaattgtgtcagcaccttgcatactcctaggttctactctggtcctttgactaagtaatttaaacccatctctccagggagaactcagtgtaaccccgaaatgttgatgtttctgtcctttacaagtgagggccaaattgttttccctggttggtttcaaatactttttctgcaaaatatatttttgcttcttcttaatcatggaacattaagctgaagcataaatgcatccctcataaaagtcacctcctgtgtcactgagatgaaaacaaaaaacagaaggtctggtcggattttaaatgatcatgagattctaattatatgaataaagaggaaaaaataggcatttacccacataaggagaaataatgagaaataattttactaaagaatagactgaccactagtcttctaaattttataatatcttctaccctgctacctaaaggtttattatgagaaagaatgagatgaattttgatgtttataactattctttgatctaaaaaaattattattgaactaaatatcccaatttctaattattactaatagattttaatgcacactcaaaagttacgcaaaaacatactctttgcatgggtataggctaatgattatctctggagactgctccgaagcattcataattaaattaatgtctatacattacataacatacatgtctatacatacgtaaccgtggctcatcttgcttttctagaaatttttatttttttatttttatttttatcttttacatagctaagtaaaacagaggacttcagatggacaaacacattgatagtagtccccccttatccacaggggacatgttccaagacccccagtcgatacctgaaactgcagatagtactgaaccttatatatactatatacttttttcctatctatacaaacctataataaagtttaatttataaattaggcacaataagagattaacaataataataataaaattaaaatattataacagcatactgtaaaaagagttccgtgaatgtaacgtctctttcaaaatatctttctatactgtactcatctattttcagacttcagttgattgttggcaactgaaactggaaaatgaaactgtggataaggaagggattctgtatttatcagtagggtaaagagggaaaaatgaaatttaggctcaagaaagcagaaggaataagtaaatataaaaacaaactgaggacttctctgcttgaacatctctgacataaggtcagaaggacttgctagagttctacttaaatgaaccaggttaaagtggcatttctgtgcctttactatttttacaagcaatttttaaacatttaattttataatcacctgtaagaagtacaatatttgcagagaacagagttgagactctggctgtagacatgtaatatttgtggctggatctgcagggttcaggtgtagtgtattcactgagtaacaaatgtgacagcaatgtagttttcagtcattcactgtcttgaaaatctggttgattttcagtcattttcttgaaaatatggttgaaaatctctgtacctctgttactataagataaaatatccttggctaaaatggtgaattttgaggtgtaatttttctaaaatgatttcttgcctaagtaaatgtcattatgtgtttagctttacacataactgcacattgttctacagagggttagtctttgtgcatgtatctttcagagctttatttttagtaggaaactgccatcaggatttgtttctacctcttagcatttcagtttccacacctgtaaaatggatatgtaacagtactcacttcatggagtttctatgaggattaggtagattattacatgccaaggatttagaacactacttgacacaataaatattgtgctgctatgtcttctcatccttctttttttttttttttttttttgagatggagtctcgctctgtcacccaggctggagtgtagtggcacggtctcgattcactgcagtctctgcctcctgggttcaagcaattctcttcctaccaaatagctaggagtacaggcacgtgccaccacacctggctaatttttttttgtatttttagtagagacagggttttgctatgttggccaggctgtggtctcaaactcctgacctcatgatccacccacctcagcctcccaaagtgctgggattcacaggcgtgagccaccgcacccaggcttatccttcttattatcagtcatatctggtttggttttggtttgggtttcctggggacttctcagatggagatgaatgaattgtctttcttcgcattcttcatctcccctaattgtaagcacgacctggcatatgattttaggaaaggcagctagatactactacattcttaaaataataacagaagcttcttgccactggaaaaagttattagaataaacaagagatgtatgtcccagactttaatatgcatacacatgattttaaaatgtgaaggaggcaggggagtggcacaagtgcatttttcaatgaatgcttccgttagaaaactaatcatagcctcgaaatacaaaaactgagttccgtatacatcctatatgtttttgcctagcatgtggatgaagtggccttgtatcctcttggacttcacctcaacttattcttacaataattcatatttactatgtattgtcatgagtttgtttctgccaatactaagagcagcctgtgaatacaataataacagagaaatggataatgagtaggccctaaagtatgggtcacaaggcctaggatttagttccagctttaccatttgctgtttatccttaatgaagtctcttaagctttcctcatctataataattcttaaaaatttgtttaataatgtttaatatttgaaaatattttctgaactgttcatctttaatgaaatgtaaagtagtatagtagtgtttttgttaccagtgataatattaagctttaagagagtggcagaaatcctcttaagtctttggtttgaacagtggaggagacttggcatgaagcgaagaggattaaaacaagtggaacaagttcaagagatagaaatggactcgacacaagtgaggcaagctcaaagacttggattaggtctttattcattctacagaaattattgcatgccttggtttcttgaaatataagtgattgttgtattaaattagacaatacatataaagtacatagtacagtgcctgacatccagaaaacacttagtaagaattagtattagaatggctccaccatttaatatatatgtgactttttaccagtcactctaagtttgttttctcattttaaaaacagaataataattgccacctcataggagagttgtaaggactatataaattatagcatttagcacacttggtatatacagtatttattaaatgacagatgctattagtggcagtagtagtagtagttactgtagctgcaacagcaacactatttgctttgtgcctgacactgggctagcactggagaatattggaaattattttatatggctgacatatagagagatgagcctcaagaggtaagtagagccttactactgtggggtactaagcatatatagagtttgaatttttatcttgaaggcaatagtaagccattaagggattttttttttaaatcaaaatgcagtataattggatttgtgctttagaaagatccctctgactaaagtttagggagtggatttgagtgaggcaagaggaggaaacaggagacctactagaaagccattacaaaatttcatatgggaaatgatgtttgtctgaagtaaggttagtggcagtagagatggagagaaatcaacaggtgtgagacagattttggagttggattaataagatctagtgatggattgtaggggtagagtgaggcagcaccaggttatgaggatattgatttggctatgaaaaggaataaaaggaatcaggaatttctctcttgatcttcactccctaactaaagcctcttctcgagctacactgaaaaaattgtgttatcccctttcaaaatgcatcttaatgaaaccttttctaagttggaggaaatgcattctgtgattatattcattgtgataaagagtttgcattgaatcattgatgttcatctgaaaaatttgttaatatttttctgtctttctatgacatactccaggctcaaagattgcccctaacaaaatccatgtgtgtacatgtgcacggtgttcacctagatagcctcatccacaactagtacatcttgatttacctaatggtaaatcaaaattgtcacctttccagataaagaagagcatatatttatcaagtgtttactcagagtcctcagctggctcctgggggatgtgtgtgtgtgtgtgtgtgtgtgcgcgtgcgtgcacatgtgtgtgtttgcatgcacacaagcatgcaaagatgaaacaaatggagtaattttaaggagcttataatctaatagagatgaaaagacatgtaaatacataattataaaacaggctgatggtgttagggacacgataatttatgtgttctacatccacttatatggtacttttaacattaatctgtgtttccatgtctgtctcctaaataagactctgagctccttgagggtagagactatttcattcattttttttttctgaaggtggacaggattctttttattttttatccaagtagcctaaatgacaaaagaccagtatccgcattcatttccacacagtcctaattcatgacaaatgtacttattttctgccatatagcctctttcctaattaagagaaccacatcctattcctaagttattactattaatgacagcacaggtatcaaacttcaaggtgacttgtttgggcacccctttttcttttgttttggctaacaccttacttgtatcatttatgagcccccaccagtcctcagtccttaatcttatttcacaaactatggtcatgggaggctcagatgggtcataacacacatcaggttggtcatttcctgggctacataccttgtatagaatagtattatacaaacaagttctttttagagtcctggtacacttataataaccataaaataataggactgtagcaactttttgtcctacctcagtgacttgatgtatacactggaaacagtcctcagtctgaggaaggtcagttgaagtccttactgtacaagtccaaattttaaggaaaatgagtcccgtgatgagttttctcatgcttcggccatgcgtggaccagtcagcttccgggtgtgactggagcagggcttgtcatccttttcagagtcactttgtaggcgttagcgaagctcccgtccacgtacagctcacagtctactgatgttcaaggatggtctcggaggttgagcctgctagaataaactgagtccaacacctctacacagttatgttcaactgggctctctgataccgggagcaaggtggtggggtttagggtgttgcaaacttcagtggttatgcggggattttcatatagcaagctttggtacttggttaatctggcatttgttaaccaatgatgtcctttgatagtcattaaagttaccacagtatggggggcctttatattcaggttttgcccaagggttagtttatctgcttcttgtgctaacaggaccattgctgccagggcccttagacatggggccaggctttggaaaccccatctagttgttttgagagataggccactggccttggccagggccccacagtttgggttaaaactccagctgccatttttttctctttctgacacatagggtgtaaagggttttgacagttcaggtagccccagggctggggccgacatgagtttttcttttaactcatgaaaagcttgttgctattggttataatagatgtagtttatccaatctacatttttattaactgtcacccaccaaaatattgactcaaatcctgcctctatttgatttcaagctttaaattgatgtggtattccccgtgggactccaattgcgtctaaatagacgtgagagttgaaagacccataaggggctttctcgcacgatgtcttatttttcctccctctgattgatgaaatgtcagggtgaaagggatagctaattggactaaaatacaagtgccactccagttattcagcagagtgcccagtaaaggtccaccacaataccatcacacatccgctcggggatgaacaagagctgactgattgataagctcttgacaattcttaagctcactgcatcccttcaggtctccaaggaagctaagtttcctccctgtcgtgagagacacgaagtgaacttagtgttggaagagggaggctggatggccctcggggactgacctgcaaggtgctggacattgggatatagcagagagagcttggcacgacttattactccaggttgtggaatcctggaagagagctaccatgcagcccacgcctggtcgactggaggaccaccttagtggaaaggggacagtctgggcctctggcctgccatgtgcacaagcataataattgcttttgtttaacgtgcagatggaatatttgatcgactccaaccaggcatttgcatcttggtatcctgttttaattgccaaagtttgttttaagtctttaacttttatgatcctcgagtaaaatgaatgtacgattttaggaaattacaaaaactggttggggcagtccatccttgctctttagtggtccacagaatgttggaccaactacagcataaaagctctacattggggggcaagaatcctggttgacactagggtctttatcaaaatttccctggattaaatggtcctaatttactaatgcccagtctgagaagagtcaggagggacagaggtacttttctgaagtagagagctgtctttgacttggcaggtccccacagggtataacaaggcaagcattaaatgcaatagtttgaggcgaaattgacttggttatgttaataactagatggtcagcaatagagcgagggaagaagaaagagtaatagaatagatgaaagagttaaatttttcttagctttagtttgataaggttttcccctgggactgtggcccacgactctggaggtgggggcgctttgactcgggtgtgatgagtccatcccttttccgctctacgaacggcagtctcagtggttaacagcacaaggtagggtccttctgaggctggcttgagtttttcttctttccaccctttgatgagaaggtgatcttcaggctggtgctggtttactggaaattctaggggtggtacctgtgctaaaagacttttagttttgagggaaaggaaagtggaagataaaccaagtatataatttctaagaaattgaccttttgttttaaatgtggggacatcagcagtggactttattgtccttggtgccttcctactgagaaatttcctttagcacctatttttattagtttttagaccaaagaagccaaacaccattttatatctgacagtgcttcctgtatgatttttataccagataagctaaatttcaccttttactgtgctattactgtgctattaatgttaaacttagttttaataaactttgtagacatttattcaatttttaatgtcagaccataaggtaagatttttatagactctttttaaccttttataatctttgttaaagagcaggttagtgctttaagaaaaacccattgtgtttttactttaatgtccagttcacagaaaaactggatgatacccctttaactttagccaatatgtttacacacagaattttctttacaattaacgttttaaaacttgcttaaatcttcaaaacaatatatactttttaaccttttaatgtaggtaaaaatttacattgttatgcctccttataatccttttaccaaaggtatattttactttccttatacaacttgcacataaactgttttgttttacattcaggaggcctagttacttttaaattatacaacatttcttgcataaattctttttttaataacatttttttctttcacgactttcgcagacaatttttcgacatgcctcaactttctgacttattacaaacatttatttctttaaataaccagttaatttatttcaggacaagaacttcccatataacactctttttacataaattctgcccccccctttttttcccttttttttccgaagatgataaccattcttttccaaagcgaacttcttttatgtctgtggactagactgtcttaaggccacaggattagaagttaccataatacatgttacactgttaacttttagcaaactttacttttgttgaaaaccttttaagtttgggatttcaattatcctttgctattaataagaccttgttcagtccaaattaacttagaattggtatagatgttttttttttttttccttcaattacctgggaggaaccatcgattgtcctgtcctgaagggagttcctcctaggtctggtcagacctttgtatggtaattaagatttagatcccctgtaaggaaacctgctgggttaagggaattttcagtggttaatgttaaatcatccttttttttttttccttaggatacttctgaactggtgagatgtgctcacaatgaggtttcctctaaaagttattttttttactttcttctgttagcaaagcagttgcctacagattgaatgcttctgggccatccacaggttactgggttaaggatttttgataggaagtcctcagtgctttcgggaatacgcccttgtttacactgacaacaaagtggtattagagtgttacagggttacggagaatacctttaattatcaattataggttttaaatttaccttggcttttaaaggaatagggtacactgtttttttttccttaacttctggtatatttctctctttctctctttctttctctctttgactttctgtctctctctttttgactttgcttttgcctctgtctctttctgcctctctgcctctctctttctctctctctctctctctccttgactccctctttgtctctctgtctcttcctctctctctctttgcccctttttctctctctttcctcctctgtctctctctgctggtctttccttgtctctgccagccacttatgctgctgttctctcaaccactggtgaggggggtgtggggtctaaaaccagctgtaaccaagggtctatgtatgggaactcatctgggtgccctggcttacaggttaccttgtgccatacctttgaaacaagggacctgtccaggcttccttctgatggccaacccacctctaatgctggccagtctatttcacacaaagttctaagttttcctggtgtcatagtaacaccataatctcccttaaatccttccttgaaatttttcaacatagttcctagtggggtgggcttactttgtgcctgacccatgcttcttcgagacaaaacaccatgctcacaccacaaaacaaagaacgagtaaaaagggcacacacacacacttttacagtttacaccaaactcagaatcaaaaccaaaatcagagtatccagaaatccaagccaggtcaaaaacaaaaccaaagtatcaagcaatccaagtcaagtcaaaaacaaaaaccaaagtgccggtacaggcagaccgtgggtgatcaggccacgcttccactcaaatggagtgggcaagttccaaagactagtcttaccaagtttcagatgtccagactccaagtgccagttccttcccggtgttcagccactgcgttgatcgtccacgggggcctgccacgtgctcctctggcgaggcgttccaccaggccaattgcctacccaggagtgctctcaggatccgcatcggccaagctggctggagtgccccatagggatgctccacagggcaggcctaagccacctaaggggctgcctcgaccgtccgactgtctgttaatcacctcgcttcccggtcagggaaccaagaaatgtagcagaacaagccacgggcaaaacccctcagacaccgagttaaagaaggaagggctttattcggccaggagcttcagcaagactcacgtctccaacagccgagctcctatttcattcatttttatatctctccagtctagtgtagttcctgtaggagatctggaaatgtttctcgtatgaaaggtatatatacagtgcttccagatgttgtgggtaaggtcctcacttgattgaggggaaggaagtatagatttttttttttttttgagacagaatcttgctctgtctctaggctggagtgcagtggtgcaatctcggctcactgcaacctccgcctcctggttcaagcacttctcctgcctcagcctcccaagtagctggggctacagacacacaccaccacacccagctaatttttgtatttttagtagagacagggtttcaccatgttggccaggatggtcttgatctcttgacctcttgatctgcccacctcggcctcccaaagtgctgggattacaggcgtaagctgccgtgcctggcctgaattacatattttaaggaagggtccagacatacaggggagaaagctggaagactcaagtcagctaccatgttaaataggtgacttctagaaacacctggagatgaggtacataagatttgtgacatagggaaaaacatccttccctcagtatgacgaacaaacagacccagttctaaagaacaacttccttagatttgtaactgatggatggggaaaagtccagagattttctgtgcaagaaaccttcacctgtgaccaagtattcttagcgacccgacataagaatagtttatctaaatcaaccctgaacttgcttcacagacacaagttcttttggtctactaataacatacaaattccttttagaagaccacacccaccaagtaggaaacgaaggtttccacattccaaaaattagcagaatcttatcacagctgacggggctaaggatagagaggaatagaggaatcaacctatccccaatagagcaagaaaatgagttagccaagaaaagcaaatgttggatttagctcttcaagaccttaagaaaaagataaaagtacctctgcttcaaaacttttaaggaacgttgtatctgagagactttgcctagaacttagtatatgtgtatattctatactaaaacacacatttacatgaagaaagactttcttcaaattttcctctgtctttaaactgtcgtgattcattactatttgttttatttccagtgtactccaaaatgtggtccaggattcaagcatcggattgttctgtgcaagagcagtgacctttctaagacattcccagctgcacaatgtccagaggaaagcaaacctcctgtccgcatccgctgcagtttgggccgctgccctcctcctcgctgggtcacaggagactggggccaggtaaggcgtttgtactgtgggctcctgctgaaatagcaccttgagacacaaacctgaggttccttgtgtgatcattgtaagggcttgagagatgagtaagaattaacacgtagaagtctaagtatgaggcatgagtgtgaaacagtgcacaaaccacagccaccacatgtggacacatacagagtgagccagtgattctcccacacccacacacttcccacttcagattctattcttcagatccattgtggttaaaattaaaagagaaatagaataaccgatagagatctgaacaagctaccaaaactttggattctagtcccagctgtcaactgaaaaggaacaaatcagttaacagcagtgtcttcattttcccacttgcaaaatagagataattactcttttttttttttcttttgagatggagtctcactctgtcgctcaggctggagtgcagtggcgcgatctcggctcactgcaagctctgcctcctgggttcaggccatcctcctgcctcagcctcccgagtagctgggactacaggtgcctgccactacgcccagctaattttttgtatttttagtagagacagggactcaccatcttagccaggatggtctcgatctcctgacctcgtgatccgcccgcctcggcctcccaaagtgctgggattacaggtgtgagccaccgcgcctggccaaaaatatatatatttttaaggctcttcatgaatatccttacaagtcctgtgggtgctttcagagtttttgcaaacaaatccaacagggcttcaatgtgttgaccctgtaaacatcaccatcccctgtgttggcaccagttacttcctcatgcctttgattccaaatttcataggctttctggtattctcgatggcaggcccatagattaacccagcttcattcttcagcctcagcagctgatcagtcccaagtgaaactaagcctctcggacagtaacttcagttctgaagtgactgaatcccagagtagatgcaaaaggagagggagacacgctcatttgagaacacagactacttctcaggtttgtgtggctggcaatcccttagaaaacctgagggacttatttaagctctttttttttttaaatgaccccatcaccaggctccacgcctgtcactgctattacactgaactaatagtttaatcacatacaggacactccaataagccatcaggttatttacctgcacacctataataaatagggagcaatagtgatttcctagccctacaatctctcattattctacttcatcacaaggattttctcatgacactcctgctagagttcaccagccttgccgggaattgttggagtgatagcaagaaatctctatgtattatcttctgggaagtatattgagtctgtttgctagggtaataacatgatctttgactttccaaaccagtttgatagtagaatgacctaatcatacacctctcaaaaatgaaccacatgtgggctttaaaagttaatattgtggccaggcgcgatggctcacacctgtaatcccaggattttgggaggctgaggcgggcagatcacgaggtcaggagattgagaccatgctggctaagatggtgaaaccccgtctctactaaaaatacaaaaaattagccggatgtggtggcgggtgcctgtagtcccagctactcgggaggctgaggcaggagaatggtgtgaacccgggaggcagagcttgcagtgggttgagattgtgccactgcactccagcctgagcgacagagcgagactctgtctcaaaaaaaaaaaaaattaatattgtggctgggcgtggtggctcatgcctgtaatcccagcactttgggaggccaaggcaggaggattgcttgaggtcaggttcgagaccagcctggccaacatagcaagacgctgtgtctcaaaagaaaaaaaaaaaagttcatattgtgttgtatttgaaatgacatagtatattttttacctcctgaaaattgttgagattaatattttgtttctttgtgtctttggatttagtgttctgctcagtgtggccttggacagcagatgagaactgtgcagtgtctctcctacaccggacaggcatctagtgactgtctagaaactgttcggcctccatcaatgcagcagtgtgaaagcaaatgtgacagtacccccatttctaatactgaaggtgagttttccatggaggaggggcctgtggtttctaatgacccacctttactgttcccagggtctgaagagcacagtaaacccactactgtagtgtagtttgagtagagcatttgtgaaagctgcttatatgcagacagcaatcaggaaacccaagttttttcctgactttttaagtaactttatgaccttgttaagtcacttaacctctctggagctaagtttatctataaaataagaaattggagtagataatctctaagatcatatccagccttgtattctaagtttgatttatagtaggactttagagctgtttcctaatgaactactcttgaagtgcaaacttctgtttctttttggatatgacagtggatctctatcattctgaagatttaaattcattcttgttatacatataatgaaagcatatgtttgaaactacttgcattttaaatgctaattttcttatcgtagaaaagtagaaaaataattatgtagctgtttataaaggtggacaaagttctttgtgctctggaatttctctttctgttttgtttttgtttttgtttttgtttttaattatactttaagttttagggtacatgtgcacattgtgcaggttagttacatatgtatacatgtgccatgctggtgcgctgcacccactaactcatcatctagcattaggtatatctcccaatgctatccctcccccctcccccctccccaccacagtccccagagtgtgatattccccttcctgtgtccatgtgatctcattgttcaattcccacctatgagtgagaatatgcagtgtttggttttttgatcttgcgatagtttactgagaatgatggtttccaatttcatccatgtccctacaaaggacatgaactcatcattttttatgtctgcatagtattccatggtgtatatgtgccacattttcttaatccagtctatcattgttggacatttgggttggttccaagtctttgctattctgaataatgccgcaataaacatacgtgtgcatgtgtctttatagcagcatgatttatagtcatttgggtatatacccagtaatgggatggctgggtcaaatggtatttctagttctagatccctgaggaatcgccacactgacttccacaatggttgaactagtttacagtcccaccaacagtgtaaaagtgttcctatttctccacatcctctccagcagctgttgtttcctgactttttaatgattgccattctaactggtgtgagatgatatctcatagtggttttgatttgcatttctctgatggccactgatgatgagcattttttcatgtgttttgtggctgcataaatgtcttcttttgagaagtgtctgttcatgtcctttgcccactttttgatggggttgtttgtttttttcttgtaaatttgtttgagttcattgtagattctggatattagccctttgtcagatgagtaggttgcgaaaattttctcccatgttgtaggttgcctgttcactctgatggtagtttcttttgctgtgcagaagctctttagtttaattagatcccatttgtcaattttggcttttgttgccattgcttttggtgttttggacatgaagtccttgcccacgcctatgtcctgaatggtaacgcctaggttttcttctagggtttttatggttttaggtctaacgtttaaatctttaatccatcttgaattgatttttgtataagatgtaaggaagggatccagtttcagctttctacatatggctagccagttttcccagcaccatttattaaatagggaatcctttccccattgcttgtttttctaaggtttgtcaaagatcagatagttgtaggtaagcggcgttatttctgagggctctgttctgttccattgatctatatctctgttttggtaccagtaccatgctgttttggttactgtagccttgtagtatagtttgaagtcaggtagtgtgatgcctccagctttgttcttttggcttaggattgacttggcgatgcgggctcttttttggttccatatgaactttaaagtagttttttccaattctgtgaagaaagtcattggtagcttgatggggatggcattgaatctgtaaattaccttgggcagtatggccattttcacgatattgattcttcctatccatgagcatggaatgttcttccatttgtttgtatcctcttttatttccttgagcagtggtttgtagttctccttgaagaggtccttcacatcccttgtgagttgcattcctaggtattttattctctttgaagcaattgtgaatgggagttcactcatgatttggctctctgtttgtctgttgttggtgtataggaatgcttgtgatttttgtacattgattttgtatcctgagactttgctgaagttgcttatcagcttaaggagattttgggctgagatgatggggttttctagataaacaatcatgtcgtctgcaaacagggacaatttgacttcctcttttcctaattgaatattctttatttccttctcctgcctgattgccctggccagaacttccaacactatgttgaataggagcggtgagagagggcatccctgtcttgtgccagttttcaaagggaatgcttccagtttttgcccattcagtatgatattggctgtgggtttgtcatagatagctcttattattttgaaatacgtcccatcaatacctaatttattgagagtttttagcatgaagggttgttgaattttgtcaaaggctttttctgcatctattgagataatcatgtggtttttgtctttggctctgtttatatgctggattacatttattgatttgcgtatattgaaccagccttgcatcccagggatgaagcccacttggtcatggtggataagctttttgatgtgctgctggattcggtttgccagtattttattgaggatttttgcatcaatgttcatcaaggatattggtctaaaattctcttttttggttgtgtctctgcccggctttggtatcagaatgatgctggcctcataaaatgagttagggaggattccctctttttctattgattggaatagtttcagaaggaatggtaccagttcctctgtgtacctctggtagaattcggctgtgaatccatctggtcctggactctttttggttggtaaactattgattattgccccaatttcagctcctgttattggtctattcagagattcaacttcttcctggtttagtcttgggagggtgtatgtgtcgaggaagttatccatttcttctagattttctagtttatttgcgtagaggtgtttgtagtattctctgatggtagtttgtatttctgtgggatcagtggtgatatcccctttatcattttttattgtgtctatttgattcttctctctttttttctttattagtcttgctagcagtctatcaattttgttgatcctttcaaaaaaccagctcctggattcattgattttttgaagggttttttgtgtctctatttccttcagttctgctctgattttagttatttcatgccttctgctagcttttgaatgtgtttgctcttgcttttctagttcttttaattgtgatgttagggtgtcaattttggatctttcctgctttctcttgtgcgcatttagtgctataaatttccctctacacactgctttgaatgcgtcccagagattctggtatgttgtgtctttgttctcgttggtttcaaagaacatctttatttctgccttcatttcgttatgtacccagtagtcattcaggagcaggttgttcagtttccatgtagttgagcggctttgagtgagattcttaatcctgagttctagtttgattgcactgtggtctgagagacagtttgttataatttctgttcttttacatttgctgaggagagctttacttccaactatgtggtcaattttggaataggtgtggtgtggtgctgaaaaaaatgtatattctgttgatttggggtggagagttctgtagatgtctattaggtccgcttggtgcagagctgagttcaattcctgggtatccttgttgactttctgtctcgttgatctgtctaatgttgacagtggggtgttaaagtctcccattattaatgcgtgggagtctaagtctctttgtaggtcactcaggacttgctttatgaatctgggtgctcctgtattgggtgcatatatatttaggatagttagctcctcttgttgaattgatccctttaccattatgtaatggccttctttgtctcttttgatctttgttggtttaaagtctgttttatcagagactaggattgcaacccctgcatttttttgttttccatttgcttggtagatcttcctccatccttttattttgagcctatgtgtgtctctgcacatgagatgggtttcctgaatacagcacactgatgggtcttgactctttatccaacttgccagtctgtgtcttttaattggagaatttagtccatttacatttaaagttaatattgttatgtgtgaatttgatcctgtcattatgatgttagctggttattttgttcattagttgatgcagtttcttcctagtctcgatggtctttacattttggcatgattttgcagcggctggtaccggttgttcctttccatgtttagcgcttccttcaggagctcttttagggcaggcctggtggtgacaaaatcggtcagcatttgcttgtctgtaaagtattttatttctccttcacttatgaagcttagtttggctggatatgaaattctgggttgaaaattcttttctttaagaatgttgaatattggcccccactctcttctggcttgtagggtttctgccgagagatcagctgttagtctgatgggcttccctttgagggtaacccgacctttctctctggctgcccttaacattttttccttcatttcaactttggtgaatctgacaattatgtgtcttggagttgctcttctcgaggagtatctttgtggcgttctctgtatttcctgaatctgaacgttggcctgccttgctagattggggaagttctcctggataatatcctgcagagtgttttccaacttggttccattctccgcatcactttcaggtacaccaatcagacgtagatttggtcttttcacatagtcccatatttcttggaggctttgctcatttctttttattcttttttctctaaacttcccttctcgcttcatttcattcatttcatcttccattgctgataccctttcttccagttgatcgcatcggctcctgaggcttctgcattcttcacttagttctcgagccttggttttcagctccatcagctcctttaagcacttctctgtattggttattctagttatacattcttctaaatttttttcaaagttttcaacttctttgcctttggtttgaatgtcctcccgtagctcagagtaatttgatcgtctgaagccttcttctctcagctcgtcaaaatcattctccatccagctttgttccattgctggtgaggaactgcgttcctttggaggaggagaggcgctctgcgttttagagtttccagtttttctgttctgttttttccccatctttgtggttttatctacttttggtctttgatgatggtgatgtacagatgggttttcagtgtggatgtcctttctgtttgttagttttccttctaacagacaggaccctcagctgcaggtctgttggaataccctgcagtgtgaggtgtcagtgtgcccctgctggggggtgcctcccagttaggctgctcgggggtcaggggtcagggacccacttgaggaggcagtctgcccgttctcagatctccagctgcgtgctgggagaaccactgctctcttcaaggctgtcagacagggacatttaagtctgcagaggttactgctgtctttttgtttgtctgtgccctgcccccagaggtggagcctacagaggcaggcaggcctccttgagctgtggtgggctccacccagttcgagcttcccggctgctttgtttacctaagcaagcctgggcaatggcgggcgcccctcccccagcctcgctgccgccttgcaatttgatctcagactgctgtgctagcaatcagcgagactccgtgggcgtaggaccctccgagccaggtgcgggatataatctcctggtgcgccgttttttaagccggtctgaaaagcgcaatattcgggtgggagtgacccgattttccagctgcgtccatcacccctttctttgactcggaaagggaactccctgaccccttgcgcttcccaggtgaggcaatgcctcgccctgcttcggctcgcgcacggtgcgcgcacccactggcctgcgcccactgtctggcactccctagtgagattaacccggtacctcagatggaaatgcagaaatcacccgtcttctgcgtcgctcacgctgggagctgttgaccagagctgttcctattcggccatcttggctcctccccctctgtctgttttttattcattgggaaatccctttattaacagcagatgccccaccccccggccacaatcgtgactttttaaaatctgttatttaaatgaaagtaatttctttattcttttaggcattcattaggaattgcttgaatgctactacgtgcgagtcactatgacagaaattatcaagaatgtgaagacaaacatggcatagtgcagaagtttagactgccttctcacatgaaaatacaggcagggtcaaatatatgcacatgaacaacacctgaagccgcaaatttaaattataaggccctgaaaaaacctatcattaatatatagtcaaataatttgttaatatttttcaagtgaaaactatatgtttataaacctcttcaagagagatctctttcttttgatcaactctgtctaattcaaaggattcttaaaaataatactcactatttaaaagtgttttcttgggaattttaagaaagtgatcttgtatgacaagatccagacaccttgcatctttgcaaatggtctgtttttttatacttaagcctcaacacaatgcacttattatacacataatttactctttcaaaatgtataaccctatgctacattaattaaaaatcacaactttaaattttgcagaatctctggctttactgctacttcttttttgtccctttagattctggaaatctagctttccctctcttgagaagggctcaaaatccataacaaacaaaagtatttttcttggaaaaaaattatcttttaaattatctttaaaaaaaaaaatctcttagctgggtgtggtggctcacatctgtaatctcagcactttcagagggttgagttgggaggatcacttgagcccaggagttcaagaccatgctgggcagcatagtgagacactgtctctacaaaaaataaaaaagttagctaggcatggtggtatgtggctgtagtcatagctccttgggaggctgaggcaggaggatcacttgaactcaggaagttgaggctgcagtgagccctgatcatgccactgcactccagccagggcaacagactgagactctgtctcagaaaaacccccccaaaacaaaacagaacaaaatctgtcttctgtaagactccagcaaatgatttcttttatccattgtaagttagcaatagatcacatgagtttggggttctctttttctttcagaattggaagatacaaggttaaggtaggagagaggatataactatcatattaaattattctgtgttgggtattatgttaggccctttatatatattatctgtcttatatatctcacatacacaaatagatctctctctgcaagtgtgtgtgtgtgtgtgtgtgtgtgtgtgtgtgtgtgtgtagtatcttatataatcctgacaacaagcttctaagagttggtattattaatgaagaaagtgaggcacaggggaagatagtgatttgcccagtttaaagattaggaagtagtagagtcaggatctgaacccacatttggtagggtccaagtacctgtccatttcaactatatttgcatgctattcttaatttagtctttaaagtagggtattttgacataaaagcaagagtttctgattttgaagtaaaacatttctggcatgactgtcagcctaattcaatagattaagcctaagtcattgctgaaagaactgccttttgacatgcctaaaacaatatatctgtggaagttatgctcataccttcatttcagacaattttaataatttctccaaaatcttctctataatgcataatcattatagataaactttgcagtttatgtataataagtttcaaaactattttcagagtaggcagaatatcatttgtacctgtgctaatgtctgccttaagggaattgtcttaaaatggatacgtgttaatttgaggtttcttgggttatttggagaaacacctcatggttatttcatctacctggctaaatcgctttttattaatattattctaaagtaagcagtaaaaacaatatatttagacttctcagtaaaggaggaaatttttaggaaattattaatcctgcaaagtatgactcatgttagaatcattattatctaaagctgtcaactcatttaaaagaaagaagataactctctttacaaaattagatttaaagtacaaatgatacatctgtcataacttgttttgtgttccctttaatttcccaatagcatatatggaatgcatttaaatatctgaaactatttgttcatttaatcagcagctaattactgaatgctttctgtggccagcctctgctatttattatggaaaatttaaatatatttataagttcatagtctttcagggcaaatacttaaatgaaaatttttttaattcaaaaaaatttaagaaaggaaggggaaatgtgttgtgtggagcagtttgcacaagtgctcaaatgaaggaccaatgaggtaacattttccatcaaggcaggcttcatagactaagtaatcagtaagccatctatataacacatagttggaaaaacccagtgtgtaccttgggaaaagtgaataaaacattatgagctgaattacaagttttaatccatagagatatggaatggacggataacatagatttcaaaagagacaaggaggccgggcacggtggctcacgcctgcaatctcaacattttgggaggccaaggggagaggattgcttgagcccaggagtttgacaccagcctgggcaacatagggagacaccttctctacaaaaaatttaaaaactagctgggtatggtggcacgcatctgtagtccagctacttgggaggcttaggtaggaggatcacttgagtttgggaggtcgaggttgcagtgagccatgatcacaccattgcactccagccagggtgacagagtgagactctgtctcaaaataaataaataaataaaaagagagagagaagaggttctagtgtgaaaataatgcaaacgtggtctgttacggtttgtaggaggcagatcaaggaagaaaagaggccgggcatggtggctcacgcctataatcccagcactttgggaggctgaggtgggtggatcacatgagatcaggagttcaagaccagcctgaccaacatggagaaaccctgtctctactaaaaatacaaaattatccgggcatggtggcacatgcctgtaatcccagctacttgggaggctgaggcaggagaattgcttgaatttgggaggcagaagttgcggtcagctgagatcacgccattgcactccagcctgggcaacaagagcaaaactctgtctcaaaaaaaaaaaaaaaatggaggaaagaaatgccttttagcaaggaaaagttaagaagaaagttggaggccgggcgcggtggctcacgcctgtaatcccagcactttgggagggcgaggcgggcagatcacgaggtcaggagattgagaccatcctgcctaacatggtgaaaccccatctctactaaaaacaaaaaattagccgggcgtggtggtgggcacctgtagtcccagctactcgggaggctgaggctggagaatggcgtgaacccgggaggcggagcttgcagtgagccgagattgcgccactgcactccagcctgggcgacagagcgagactcctctcaaaaaaaaaaaaaaaagaaagtcggagaaggagcagtttctggttaatgcaggagagtggaagaggtggaagaggatcccctttcctccagcacagtcagattcccatgactcatagtacgaggctactgaaaaaccacttcaactctaccccaagacagggcaggatttggggagacgtattgagatctaaaatagtctttcagttgaatctctatgaattaaatgggccacagatagaatgttgagaattgttttgactaccaaggtttgggtaatggtctccctcctatcagtatttcattatgaaaaaaattagaagtttcaaacatacagcaaagctgaaagaattttacagtgaacatccaccatctagattatattacttttaatggcaaaaactgaaattacttttgcaccaaaccatagcattatcatttactgaacatgctttttcatatatgtgcatatatctgcccatccattcctcaagcttatgattttttaaataacatcctacattcatccaatcattaatttatttacttagcaaacatacttaccatgtgctaggcaccaagactatgaacgcaatacaacaggttccctgttctcaaaggtttagtaggattggcaacatacaaataattttgacaatatgagcagtactgttccaggcgtggcaagaagtgaccatgagtgcacagaggagcaggtaatcagcagaagcatcacagagaaggcaagctgagctggacatggaaggtaggaaacagtttacccagaagacattgaaatgcagggcattcctgacagaggacaagtgtgtgcagtcacaggggcatggaggcagtttgctatcgctgcggtgggttgggagatgagcaggcagtgcagatgaggctacagagagagaggcagggacttggttttggagactccacatgtagtggaaggaagctaggactctatctttgggttatagggaacaagtgaaaaaaaactggggtttgatatgctcaggatgacagaagggtaacgaagcagagggagggcagccttgtgtgggagtagaatgagaaagaatttttctaagagtccaggcaagagaggatggaggcgtgaactaaggcagatattgtagggattaaaaggagagtgatgaactggggggaaaataataaaatgaaaggagaataaaaagagcctgatgaacagttagacatggagatgagagatatggaggcgttcaggatgactcccacatttcagatttaggtaactgtgtaccatcattaatcatgaaggaattcaggcatctgtagggaaattaaacacattagtcctctgaagctttaataagataatggaatttgaataagattaaaaaataaaataaattgagagagattgaagaaatggagggaggtcaagcaacaaatgataataaggaaatcagaagcagggtttcaaaaaattaaaatagcaagagggaaatgggaggaagaagaagggagatacaatttgctgtgttcaacatctgctttagttttttgtttctgaaagcctttggcaaagggttaaaacattataggcatgatcttgacagactgccactgatgagggtaacactatgttgctgctaaaagtgaattaaagccaccctgggtatcagtacatttgcaatactactcagagtaattttttgaagtacatatgtcagttgggactaacctcctcaagctcacctgaaattctatccaaaatgccattttattcatctttcatgcagtttcaagttcccttgtagtttatatagtgagtcttttcagcttctcaatagtacaaggaactctgtcacagagtatttattgctgtcaggtcgtgattcatggtgtgccatgggctggtaaccaatccaggaaaggtgtggttagtgtacaatggtttaccagcccaggatgtctaatagtggctttggtggctcttagactccctcatgtaaatagctctgggaaagcttaggcagctccagaaatctcaaaccaagaattttggtcaaactagctactgcatttgggttttaatgtggaacctgatgtattaaaatcagtaaaggaacgataaaggtcatttgaaggctttggtttcaaagaggtgaggaaggccagtttttttctttaccacttcaaagagttcgtaattcacttagcatgcaggttcacattcctggctgtctggtctggagggaaccctggatttgggttgagattataccacctccaggttgaatgtgggtggcatccagggaataagactaaataaaaagaaacttgagaaagcaaagagagaaaggaatggtctagtctatgggaaattgaaatcagtgtaaagttcgatagctgatatcatcttgcttcaaggataaaaataagctggtgtactgttctgttacaatgaataatgttaggttcccaagcaaaagttgccatttcatccttttctagtctgaatatgtaaaatgtcaaggggtcaagtacaactttattaggagaagtacactgagttcacattccccaccccaactcctgtgccacgcatgcacaacctttgctatctcacttctcatcaggttctgcatttccatgggcagtttgtcagaagcacagctgtttgtactttttaaatccaaaagatagacctttaggtgcttaagtcataactcttcacttactgttttcttcttctgaaccacataaggagtttacagaaacagagggcatgcattctccaaagagagatgctgatggtccaacctggtcatgaagggtatctcccaactccagtgagacaagtaggcaagctttgtaacattcagtgacataaatgcaaaagccctgcatttgaggacttggtcttgtatttcttggaccaaatcaagccttcaaagtcacaattaatctgaatctaattgcattctaaattcataaacctctattcagtatattttgaaagcaagtcttttaggtcagagttttgaaagattaatgtaaagcacctggggaaaaactcattggcacatcaatgttaagtagattcatgtgttgcctatgaaacaggttgtctaattttatcattcaactctaccaaaacccagattaccaatgagaaccactccagcatgcctggcaaattacttcagattctaataatggatccagttcacatttcagcgcctaggggctggctttcagcccttgatgtcttcccaagtctctctgagaagaatttgggaattctccgtaaagtcattcccaccagaagtctctagtcctgggtaaagtgtaacttttctttcaggggtggagtggggtgtaaaaagaggagagaataattaggtttacaaaatgttaactagaaaccacaagataaggacctcttacctttccaatatcctcacaggaaaagggtagaaagggtgtcttgtcattcttctcctaggagagtacttagctggtacatgatgatagtcgaagagaaaataagcctccttcatcttaaaatccttgacccactggcttagattccactacttagaaagcagtaagtagatagatataagtgtgtttgcatgaagaaagtatgacagtaaagctcaaaccttcaaaacaaattaactacagagtgattataataccaaaaaaacctgaaactaagtaattcttttgaatggacctcttagtattatttatttgctgcacattatgcactacttgggtatagaggaattttgaatttttaaacattttaagtatcagctagaaatcaatgccaactgtaaatcattcagaaattaaaacagaacatttgttattgttttaatttcaatgggatatgtgatttaacttatatacagcttttccagaatatttttggtggtggtggtggtttttttttggtgttttttgtttttgtttttttggttttttgtttgttttgttttgttttcgtttttttgtgttttttttaaacaatagtaagttgtactgctcaagggtagaagagaaaaggctttcataatttcactgggctttaaggatgaggcagattaatgaaataagttttataattaaggcctctcaacgacatcagcataattgcaatgagcacagcaaatcagtcctctctagctaagctaaaagtggtagatgggttgaatgccccaatataatttaaaactggtactaatattttgaagattactttcagttttctgtaataatggggctttaaaacttcttggtgtgtctaaaatcaccttttcacttgtgtacttttacaaaatttgaggaggaatatatagtgacaaaaagtataaagggataattcaggctattctaaataattcagatgctattctggaaacctccttttaaaaaacatagatccccttctctaaggtggaacagcaaactcttaaagaaacgaaacctgactatgatgctccaagttgatttatcagtgttgtcagccaagaatacagagtcagagacaggtagaaacttcttgcgtttagatgctaagaatattgctgaaatagaatggctctggagtcagataaacctgttcttagaccaactagctgtgtgacccagcatgagtttcataatctttttgagcttatgttttgctgtctatataaagctgacattttatatacggtcatggactgtataatgatgttttggtcaacaacagactacatatacaaaggtggtcctataagattataatactatatttttactggatcttttctatgttatatatttagatacacaaatacttaccactgtgttccaactgcctacaatattcagtatagtaatatgctgtgcaggtttgtagcccaggagcaataggctataccatgtagcccaggtgtacaataggctataccatctaggtttgtgaaagtacactctaagatgtttgcacattgacaaaatcacctaacaatgcatttctcagagaatatccccatcattgagcaacacatgactgaacttaaaaggattaacatatatatataatatatgtttatgttgtgccttacacaaatgatatgcttgataaattataatttttaatgctgtcactactaaattaagctcttgtggagttaaaagagaataaaagatgagtcgtggttggtgaatagattttcatcaaatctaaagatgtaatgaactgattcttctagtcaggccagttcctagaaggcaaaaccaagaagtaggaaccggatcttccatacagcctaggaatctccatattaatgtttgagtcctgaagtctccagatctcccacaggtctttccccactcctgccctcatcataattttcttgctttctgtttaatagctttctgatattttgcttaaatgcgtaaatgtgtaaccctttctgagactatatttattttgacagggatcccagagaaataatacatgatagttgttctcagaggcagatgttttgctgttaataatgagaactaatgaacaatgcttactctgagccaggtgccatggcacatgcattatctgtattacctcatgcaaacctcacaacatcctatgagcagaccttatcatagtctttattttggagatgaagtatctgagatttagagaggtgaagtaacttggcagaggacaatcaactcctagaagaggcagagccagaattcacccccaggcccacctgaatccagatctcctgcccctaactactgggttgtgttgccgctgcaggcaactcaggggacactcataatcccaacgtccctaagcttgatcctgttcccagaacctacggacttcctgcttccaatcaagttaagtgggaactaacttaacaagggtattgggaagttcagaaaggaacatcctgatagctggcctccagcctgcccacaggctagatactgcctctgaacaaaaggctgtgttctgggcctctgcatgtagagaagagtcttatttctagcactcatctaaggaacaaaatccctgactattcatatttgagttttttgtttgtttgtttgttttttgagacggagtctagctctgtcgcccaggctggagtgaagtagcacaatctcagctcactgcaacctccgcctcccgggttcaagtgattcttgtgtctcagcctcctgagtagctgggactacaggtgtgtgccaccacacctggctaatttttgtatttttagtataaatgcggtttcaccatgttggctaggctggtctcatgctcctgacctcaggtgatccacccacctcagcctcccaaagtgctgagattacaaacgtgagccactgtgcccggccaactatttataatagccttaatgggtgggtgggtaggcaggtgaagggagaagcaatttatgaatattctatttcattcattatgtattataatttaaactggtgaatttacttctaatttgctcaactcagagttttcttggtccagctactcttctaaaaatggagtagtaaatctaatgaagttgttccccaggaaatactccactttgttttgtctgcaaactgacttgtgtctttagggcagtattttcttagtagtagttcaaatattgcatcctcattgagatatttggagagtaactccttgcttcctttctgtcaggcaataaagatactaataactaataattgtaataataatagcaattcagtatcctacacttatcccatacttcctgtgttccaggcactgctgtagttgacgttcgtaaggatacacgtgtagtcttacatgttacacgttgagtgtgggttctctaatcatttctgttttacagatgagaaaacttaagcacaaagaggttaagtgatttgtccctcttctaccttcttccagctaaaacttaaatttactgagaatcctggtgtgaaaagttttaattcatatttctagctattaatctctttgtaagtgaaatgttgagtaagggagctgggtggtggcagagatgttttcagtggatttgggagttccagtttcaaattttaagactttcaccaaaggagcctttaaaaattgagatcaataagattgttatcttcatattcaataataagaactgggaacttttccatgtctttgtacttaattttccatgtttatcatatggctcatgtgataaactacaatgtatctgatctcttagaacttcagtgggtttttgaagccaggaaaaaacaagcaaacaacaaaaactgtctgtaacactgaacattacccactgcccagcctgattcctaattaccttcaacaatttacccaggatgcttcagtataactacctggaaaaatgagggtggaactttggttctagcaggcatgtgaaaatttcattactaagtttacagagtatcctaaagtctccaaacaaaagtgaccagaatactggaaaagaatattattgctagcagtggggttgtatggagccagggggagttctgagaatcaaaggcccatgtccctttctctacactggaccctcatcccaccttctgcaaccagcctcaaggggagatggagaaagaatcatttattcaccttctggctgcaagaactgcagactgcaactgtggcagttctagcactgaggagaaaatacacataggaaaaaagaagaccatgtctcacttccaaattaaaaaaagacatttctacatgtttccataacccacagactgctgccatttgaggccaacccctcaaagctttcttctttgtctagtgtagttgctgaatctaggccactctcagcaatccttttcattcacccaggcccatccccacgcctcacagatgcagagattctctggagacgtgtactttggtatcaaacaatgcaactcatgtttgattttggataaccttgcactgttgaataaaataacccttgagaaagaagcaataaaagtgctgtaagaaaaatgactcatgtttccaagctgtctaaagtgatcacttatcctagcaaatggtaattctttcaagacacagtgggcatacaccatacttataaaaatctggaaggaaagccttgcaaacatttttttaaattgtgttaaaatatatcaaaagaatatttctagtagactgtaccaggcagggtatgcttaaaaacaaaaacaaaaaccacatggaggtcgaagccaaggtggattggcccaaagggggtccttgctgaacatgcaggcccatcggcttgtttatgtacttgtttatgtgcctctaattgttttccattttctgcccccattcgttagagtgcaaagatgtgaataaagtggcttattgcccactggtgctgaagttcaagttctgcagtcgagcatacttcagacagatgtgttgtaagacctgccaaggacactgacccacagaaagccagagagagtgccttgtcatttcatcatggaaatgcatccatcaaagagagccacccagaggaagaggattgatgtccttgcaaatgcattaccctgtggaaaacgtaaccactggtcagccctagctgacaaaatttcaatattattttagcttctgtgaagtgggatttattgatccaaagtgctggacacggtattaggagggaatgccagattggagagatccaaacaacacagggagacttgcttactgtggagcgtttgtgttctttcgagtaaatccaatagcctgtttacctccttggaccattaagataatttttattatggacttagcaatgacactgaatccatttgtatttaaaactgtttaaaatgtagctgttatgacttggtcaactatggaagtgaagaaggttcagaattcttaagtcatagcttaaaaatatttactgtactttatctcactacaacagcaccacaatttaaattataaaacgggctttgaactataatttaaggagcaattataaatcaaaagtaatgaaagtttgtattatttttcttcattccacttaatttccttaggaataatcccctggttctgaacactgctgtgagccatatataaaactatattaaactgaacaataatgaggggcatagtttaaagcagtgcatcagttactgcagctgtgcaagtctataaactcagtgctgaaagactgtggccaacttgccattgtgcaagtaaagctgagatttccattaaaactttaagagaaaaacatttcaatttcatgcagaaaccagacctggggtatggtacagaccaaaggaccaggccctttgctgccaccacacaggatgccttagttcttatttgagtccctccaactcacttgtgtttacatcctccccagccacagcacggcttctgccctttggattgctgcacgtgtgttgagcttactgagatgataccatgcaaaagatagactggctcggtaaccaggcagacccttttgcagtttgttgacaattacgatgagttccagatgtcccttctttgatatggtagaagggcatttatttatatgagagcaaatgtgtgtgtgtgtttgcgggcgcttttaagtgtgtggatagatgagtgtgcttgcacataatgtgctatttctgtgagttttaaagtaggcaagggataataaccaaagaagaaaatttcatgaagactagacatcataaagcataattttaatagtcactcaaccaagtattttttattttttatggatactctgaatggcaattaaatgtgaaacccagtttcttgggcaagtcaaattctggaatcacatccacctaaattaaaatgactagctcgtattttccccatcttcaagtttcacatcctggtcatcaaaagactcgacagcaagacttagaatgaaaaagggtacttgtttatattaatattttttacttgaacacgtgtagcttgcagcaggttcttgatgaatgtgctttgtgtccaaaatgcctccccattgtacacaggtgtacaccatgcatgcaccaacacctaaaactcaaaactaaatggctattttgtaaggttaatactttcagttaaacagcatgtttgacttgattccatcatggtgctcttaaattacatgtcagtgcatcacatatatcatgatctaatgcagatgactaggctttttccaaaaggaagacagaccctcagacaccaaaagccaatctaaacaactcccaggtttgctgtggacaatcagcatggaatgttttctgcactctcagtcatgaccatctgtatcttgttacctgctttctctctcaacaccacagttctcaaccctgagccttccagagagagctattgatgatacaagaggaatcaccagggcccggatctaagatgcccttagaagaccagcccaagtgccgtcttagccattcagtgaagggcaaacagcccatgggtagtatggcccgagcactgaattcccttgcgccttttcaaagaacagttaacttggtgctaatgtgccctggtgaaataaataaaagatgggcagtttctgtggcattttaggcataggtttgcaatccagatctgattttctccaacataaatatcagctcatgttcttatttcaaaaagatttcttattaccgactaaaagctattttttacctcacctggaaactaccattgtgagggccatcccccaggcactgcacagcaccttggctgatgctggaagaggagggcagtcagtgtcacttctgggatgtgccccagcactgagaacaaaatgcaggcatcccccggggcagcatcagagtgcctttctagagggagccacgcacagaatgtaacaggatgaaacagtttcaagtaagccttgaattgaaacctgagtaggttaaaacaattctatttcatagcacatcacaatactgctgctactctgtagccacccccatggctacatgatgccctattcctaaataataacaatagcattgtcagtggaggctgggccaccatggcagaccttccaaaagtagtgagctacatagactacttagggaaccccagggaaactggtaccctacacctgggagcagtatctgccactgggataaagtcctactaaaaaaggaacggtaaatgtaccctaatgattaaaccccgtgagatacatatgatttccaaatagtccatttcattaggaacttttttgtttgaatgaatgtcacataggtatcctcagtaacacagaacgaaattacctttgtattattgtgattagttgttgcttattattttatactcagtaataatgtggtacactgttaatttttttgcttttgtaaattatattctaatttattgccatgtttcctaacacttgtcctacattcattctcctgcttgtaatgaaaatgaaaaaatcattgtaacacttgatggagtgaaattccacgccaggcacagaatttttttgacatagataatttagtaaaataaaaattcagcttataataatgata

SEQ ID NO: 297 - DNA, 23096 bp, Homo sapiens
  source 1..23096: mol_type = genomic DNA; note = NC_000012.12:c6689572-6666477 ZNF384 [organism=Homo sapiens] [GeneID=171017] [chromosome=12]
actcccggaagtgactcggcttctgcacgcccctctttctccattagcgccccccctacattgctatttccctccctccccccttttcgtttccggcgctcccgccttctctccgcagagctcttctctgagcctgttggggggagggaggggggcgtggaggaactggggttcgcgggagcacgagctgcagcaccacttccgggtgagtgcaaggggagggcagcaaggagggggggccacccactacctcgcgcccccgccctgcgggtgtctcgcgcgcgttccgtgcgtgtgagtgtgtgggtctgtctcgctccagaagtgcgtgcccgcgcgctgcgccttgcgctttttcccctccctcgccccttcctggtcctcccaccctcctcggctccctcctttcccagcaaacgccgcccctcccgcgccctggctcaggctctggcgccgccgcagccgtcgccgcccggtgagtctcgcgccgctacagccggcgcgcgccaagctgcttgctcctcccccctccccttttccttgggcaggcggggaagggggggtccacgatgtgactgtgtgtgtgtccgtcccggaaccggaagtggttgtggaggagcgggcgatgggaaggaatgggggggtttagggggcgggtgcctgtctggtgggtggcagagttcagctccctggaggggaaggagggacgtcccaaggaagggtctttgagaaaggggtaggggacgacatcaggagaaggctcccaggaactgtctcaggggagcgaaggttttgaggggacagctggggtctccagtagatagaccacggtgcaggctgagggaggtacttcttggcacaaggcctcgggtaggcagggggcgaagtcctcgaagaagtggggggaaggctagaggaagtggctgggcctgaactggcactgtgcctgccacaaggtcttgtgcatcccccagccctcagctttgccttctgaagccactcctcaggggcacagaccctcctcctcctccatctctaatgttctctgacccctggttacctgtggcctgggaacgaacaaggaccagtctctgagcctaggagtgaaacccaaacgctggtgatagaattcgtcttagtttctgggaattggatttatttctcttgtatccacgtagagggtagcactagactgctgttattatatccacccgtctttggattgctggctggggggtctgcctgccttccagactgactgctgacaaataattcctgaggttctccacagttctctggtggctgcaccctgcctggcccctgtaacctagacaatttgtttacagaaagttcaggagccctggaaaggagaaggaataagacggcaggaggaagagagagagagggtaagatgatttttgggttaatggcttttctggttttgggggagaaggggtcacaaccaaatggggcgtgtgtgtgtttcacaatgtgatagaatacttaaagtaatagcaattgtaatgctgagattgttgtggagagaaatcagtttttttctattatctcttgagggtcaggaagtttttgtgtaaaaagttggcgctatcccccatcactttccattcctactaatgctcatcaggaatgaaatatgaaatgctcaggtgaagccactgaatagtgttgccttgtgtccaaaggggaaatctttattctgctttgggacacaaagaccctaaatgccaatatagtccttatggaattgctttcctgtgtctggaacaagcagagctgagtttagaatggagttcctatcccaaatagtccagtggagtgttagaagtgggtctgtggagtgattagaatctgtgacacagggttatttgaatttggtatggcaagatgaaattttcaggggaaaaaaaaaactgcttcatggttagtctggagtgaagtggataaaactgtacggagtagactccagaagtaggtctggaagagtttcgggtagcctgaaaatgacagtgagtggacctaaagagtttgagttcagaacttatgatcccagaggttggtttataaaatgccctgtgggtttctgagccaagttgttgattaaatattgggtacatatctcttcttctccagtcttatttatttattttggcctcacattccccagatccatcatttatagtggaacagacagggcaaggagaaccaccgtgccgtccctcccacaggatgcagggtaaagtggtccggtggtgcccaggctagaagctgttggcccaggttgccagctgtgtggtggtagcagtcctgtttagtttgtttgtgtatggtgtgatgatgtttcccagtaacattggggtgcatttgttctgagttacttgtacttggaagagtttatggatactggcgggaaagcgtcacatcctactgggatggcccttcttgaatgtctttagaccctgagagaaagagattttgtttccttttggagaaacaaaaaaaactttctctgtgtttcttcatttcaagtcttgagctaaggtaacctttctgcagttgtgtgttttggaatggtttctcaatagcgtcttaagttctttctgtagttgaattcaagttgattgtttttttccatctttttcttgttgatgctacttgtagatgatttctaaaccggaggctatagatttgttacttttgggtagttcctttgtaattatgtagtccttatgtaattttcactaattgtcgctaatagtcctcatcttgtggaagtgtttctgtaactcttcttttcaggagcacttggggcatttcattctttctcttttttgtgctgcctttatctcatcaccatatgccttacaaacttatttatacaggcctcatcctcttccatcctccatcctgatagaaacctagtaaaatggttaattcatccacttaaatagttaagagtcatccactgatataggacctagaattagaattcacaagtcttggccgggcacggtggcttacgcctgtaatctcagcactttgggaggctgaggagagcggatcacctgaggtcagaagttcaagaccagcctggccaacatagcaaaatcccgtctctactagaaatacaaaaattatccagatgtgttggcaagcgcctgtaatcccagctacttgggaggctgaggcaggagaattgcttgaacccaggaggtggaggttgcagtgagctgagatcacgccattacacttcagcctgggcaacaaaatgagactctgtctcataaaaaaagaattcagaagtcttgattcccaaggccattctctagctactgaacttgatgagtgtatttcatggttttctaagggttggttgtgttaagggaatgctgttttcttggggaaagaaaatcatgctttatttgaaaaaacaacagtaaaaaaacaattagtgggttctgggaaagagatggtggtcttcaccatatctgccaaaaacacctgctggaggccatgtcatctttatccctggatggttggtagcattacggaaggatgtggtcagatagacaaagctctgggccaagagttcaagtcctaccgtgtttcacgactattattaatacttgatagtgtctctcttctttatctcctgagggcttctgagatttgagattggagaaggaatatgtagttccttgtgtctcttaagagaaaattactctccaacttaattagagtaaacctgccttctttttttttttttttttttttttttgagactgagtctcgctctgtcgcccaggctggagtgcagtggtctgatctcctttcactgcaacctccactccacctcccaggttcaggcaattccctgtctcagcctcctgagtagttgggattacaggcgcatgccaccatgcccagctaattttttgtattttagtagagatgggatttcaccatgttgcccaggctggtcttgaactcctaagctcaggcagtccacctgcctcggcctcccaaagtgctaggattacaggtgtgagccacctcgcccagcagtaaacctcccttcctattaacagaacagttgaggcttggtgcaatagtaaagttgatatgagaacccagattttcagcctgccagcatttttctttccaccaaattatatctttccttctcttctgttttttctttcctttctatttctttttctttttttctttttgagacagggtctcactcttttggccagactggagtgcagtggcgtgataatggctgactgcagcctcgacttcctgggctcaagcaatcctcctgcctcagcctcccaagtaactgggactacaggtgtgagccaccatgcccggctacttttttaattttttgtagatacagggtctccctattttgcccagactgttcttgaattcctgggctcaagtgattctcttactttggcctcccaaagtactttctttaaatatataggcataatcattaaaattggcactctctgtgtagacatgagttttctgtgtaacatcagtgggcttctttgggtgataagaatgttgatatgtgcctgattgaatgttgggatgatttggagaaatttcctccacgaaagatagagtaagcggtaaaacagacagtaagcagatatttgagtgatctggccccagaacgccctgttacacaactctagggggcgccatttacattgtattctagcaatagttttgattcttagctctccattgatctcatttcaggagtacaaagatgaagtcagcctcatcagtagcacagtggcatagcatttctcaggtgtcattttgctggtaaaggttgcttatagttggatgagcagttctctctgtggtctcccttttgggctgacctatttatcggaagctggtaacgcatatgtagtgtcttgtccttggaccagacacaccagtttattggatgcaataaactaggcatccaagtaagtggaggggctttttatttattttcctttgtaaagtccggcctctttattcaggctctgtcatcctaaagtaagttatcttggtagctaagtgaggtttcacagaataaggaatatgaccttgaactgcatgtcattttgctgttatcaaaaacttcaattttgaaaacattttttgagaactagctggaaaatagttcattcctggaaatattctaaattttatttcctggatcaagccataacatcagaaagtgtgtactacagttatatggttttggttccttgtagaacccctttccttaacttgccctttggtgcctggattcacattcctgctttgctatttactgttggactctgtgcctccagtttcctcatttcaaatgggaattacagtacctacctcattgttgcagggactaaatgatgtagtagttgtaaagtgcttagaacactaccttgaacacaataagtgcttaataagttttaatgataatgatagtggtgatattgtccaccagtttttttttttgagacggattctcactctgttgcccaggctcgagtgcagtggtgcgatcttggcacactgcaacctccacctcccaggttcaggtgattctcctttctcagcctcctgaatagctgggactacaggcgtgcgccaccatgcctggctaatatttgtactttcagtagagacaaggtttcaccatcttggccagactggtcttgaacttctgaccttgtgatccacctgccttggcctcccaaagtgctgggattgcaggcatgagccaccgtgctcagcctcctccttcctacgttttcacatccatagtgcatttactttacttccttgattctttttttttttttttttttttgagacagggtcttgctctgtcacccaggctggactgtggtggtgcaatctcgacttactgcactcaggtgattctcctgcctcagcctcccaagtagctgggactacaggtgtgtgccaccacaccttgctaatttttgtatttttattagagatggggttttgccgtgttggccagggtgatcttgaactcctgagctcaagtgacccacctacctcgccctcccaaagtgttaggattacaggcatgagccaccacacccagccaacttccttgattcttttgggaaaattatacattggccctttctttcgtttattctccctcctaattattatttttaatcttttttattttattttattttttttttgagacagtcttgctctgttgcccaggctgcagtgcagtggttagatctcggctcgctgcaacctccacctcctgggttcaagcaattctcctgccgcagcctcctgagtagctgggattacaggcgtgtgccaccatgcctggctaatttttgtatttttagtagagatggggtttcaccatgttgaccaggctggtctcaaagtcctgacctcaagtgatccacctgcctcagcctcccaaagtgcaggaattacaggcatgagccaccacacccattctctccatcttaattctctacttaattcccaccatttatcaccactcttatctcttgtctgtcatttctttccactagaaggttagacagggattatgcattgagacttgaacccctagcattgtctgcaaaatctatatgtaggtagtctaccgttgttcaattcattaaatatgtaattgtgtcttaggtgataaagtcgtatgttggggatatttgtaagatacagatgtaaaagatgtgattgctccttcccaaaaagtttggcaagattgaattctcttaaactgtgatctgattgtatcttgattctgttgcctgaaaacgtgagactcccatctttgctttgttttgttttttgtttgtttttgagacagggtttctctctgttacccagactggactgcaatctctactgacttcagcctctgcctctcgggcttaaatgattctcctgccttagcctcccaagtagctgggattacatgcacctgccaccatgcctggcaaatgtttgtattttttgtagagatagggtttcaccatgttgcctatgctggtggactcaagcaatctgtccacctcagcctctcaaagcgctgggattacacacatgagccaccgcaacttgcatgttttgttttgttttgttttgttttgttttgttttgttttgttttgttttgttttggagttggggtcttgctctgttacccaggttagagtacagtagtgtgttcatagctcactgcagtcttgaactcctgggctcaagcagttttcccacctcagccttccaaatacctaggattatgggtatgcacgaccgcactcacctctttttttttctttttcttttttttttttcaatttttttttttttagagacacggtctcaaatatattgcttagcctggtctcaaactccagacctcaagtgatcctcctgcgtaggcctgccaaagtgttgagattacaagcatgagccaccacactcagccgtaagacccctttgtaaagctatggctggaaggaccaagttagtacctgtatcagatactgattagttttattgtgttttataactcagaaaacagaattgatgtatacttgatctttggtcatttaatagcgagcctgtttatgtgaagctgttgtagtcacagatttggtacattgcaccctcgctactttttaaaaaggctgaaatacagtttttccctttatagattttatgaaaattgggggtgctgtttaatagaacaaaaaaagtgatgttttctataaaaggataaggaacagagttatgttagagtaattttcagcttcggcgcctttgttgaagatccttccctgtttccttagtacttaaaactgagtttctgtgcccagcctaccctttagctctcagtatcttagtgtttgcctccagtgtatcctcagtgggtcaacttgcctgtcacgggtcttccccacctgaaccttggttgtgctttgctcagagtagcagcctggtaatactgtgtatttatgtactttttttgttactcgtttccccatttcaccagtctcacactctcttatttgccttttgtggggctctatctttgctggtccaggattttgggaagctactcttgaccaacatactgccaattaaaccttgccaggagaagtgatcagaatgtgaaactgggtggtgggatgcctgtgttctgtacccatctgttatttgttggcatgattcggaggggttacttttcttcttgtttctcagaaagttttttttttttttttttgagatggcgtttcactcttgttgcccaggcaatggcgcaatcttggctcactgcaacctccgcctcctgggttcaagcaattctcttgcctcagcctcccaagtagctgggattacaggcatgcgccaccatgccccggctaatttcttgtacttttagtagagatggggtttcaccatgttggccaggctggtctcgagctcctgacctcaggggatccgcctgtcttggcctcccaaagtgctaggattacaggcgtgagctaccatgcccagccggaagcacagtttttgagaaataggaagcaggagtctggcactgtgtgtgtattctggcctactatcatgcctattctgcatccctttggaaacctgggttactactagtgccaggacactttctaaaactagaagtgctttgattctcactgctcagcgcggcatgtgtggtgcccagtgtagcaccgtgggtgttcttagaccttggtgggattggtggggtgtggtcttcagatagtagttggtactcaaaatatgttttgattctgattttttttttttttttgagacggaattttgctcttgttccgcaggctagagtgcagtggcgcgatctcagcttactgaaacctccgcctcccggttcaagcagttctcctgcctcagcctcccaaatagctgggatcacaggcatgtgccaccacgcccagctaattttgtatttttagtagagatggggtttcaccatgttggtcagcctggtctcgaacttctgaggtcaaatgatccacctgcctcagcctcccaaagtgctgggattacaggtgtgagccaccatgcccagtcttcattttttaattttcttagtcgtattgtgttctggcctggaaccttctcaaactacacagaactgtagacatattggttggaactcttgaaatttttattggctgggcacagtggttcacgcctgtaatcccagcactttgggagactaaggtgggctgatcccttgagcctaggagttcaagaccagcctgggcaacatggaaaaaccgtgtctctactttaaagaaaaaagaaattagtctggcatagtgtcacacggcctgtaggcctagctccctgggaggctgagcctggaagattgaggctgcagtgagctatgattgtgccactgcagtgtagcctgggtgacagagtaagaccctgtctcaaaaacagaaaaactaaaatttctatttcaaggaatatagttttgaagaataagagaaagaggagtcatgctaggtactggcacctggccgttttcaagtcagtcagtgatttgttttttgtgaccttagctacatcatctcccctctcgtgagctcagtttctttttgccagcaaaggaaagtaataccagtttttctttagggggcatgaataacattgtgtgagtaaatgtgatacgtataagttctttcacagtcatgaagtaggatagcctctgttggatggggatacagtgacaaggggctctgaccaagggactaatgtgctagacactaagtcttgactgccagtccccagccatgtgatcaggtgccagaggagaccaggaactcttcagttccccttctccattgcttagctttttctgagtaattcctgagtgtgacatgttctctcattttttcttcaggtagaatggaagaatctcacttcaattctaacccgtacttctggccttctatccccacagtctcaggtcaggtaagtggtgttgctttcttgctctctccaagtctcagtagtaagttctgttactatggagactgaaggtacaccacatgctgttttactgggtcccccacccctgagaattatctagtgtttctgcctgggcttctctctagaaggccagaggtatgaagtgctcatccttgatccctaaggaggacagacactgaagtgtgctcacgagcaagcagaatcagcctctcaggctgaagagggtgctcccgtccccttccttttctcttagatcgagaacacaatgttcatcaacaagatgaaggatcagctgttgccagagaagggctgtggtctggccccacctcactaccccaccttgctgacagtgcctgcctcagtgtccctgccctcaggcatcagtatggacacagagtccaagtcagaccagctgaccccacacagccaagcgtccgttacccagaatatcacggtggtccctgtgccgtctacaggactgatgactgctggtgagcaactctgctcttctccaatctgaggtgttgatcttccatgatcagtaccccaggctggagggctccaaggacatggggagtgggatatgtgtttgattattcaatcaaatttttattaagtgcctactgtgtgcctagcaatgtgctaggcattgtgggggatacaaagaagtagaagatgcggtccctgcctttgaggaggtgacattctttccttctctgaatcaaggagtctcctgttctcagaggtggagaagagaagggagtcaatcaaggggtaaatctcactgttaccaggggggtggggacaagggttaggagaccattatttttctacagggtttgggatttcctgtgtactctgggttgggtcggcgggggggtgaggggttaattagacaatgatctgggggaaatgaaataggattaggatcaggactgaacaacatgacgccatctcctttttctcccaatcctaggtccgggtttggtaatcacgtccccctcaggctctcttgtgaccacagcatcatcagctcagaccttccccatttcggctcccatgattgtctcagctcttccccctggctcacaagccctgcaggttgtccctgacctctccaagaaggtagcatcgaccctaaccgaggaaggaggcggaggtggtggtggaggtggcagtgtggctcctaagccaccccggggccggaagaagaagcggatgctggaatcagggctgcccgagatgaatgacccttatgtcctctcccctgaggatgatgatgaccatcagaaagacggcaagacctacaggtaagactcagagccaggggcaggatggggcgaggatccctggcttggtgattctccctgtaccctcattgtgttctgccccggtcaggcgctacactctgacagcttcccagctctgagccacttgcatgtcaggtgtcccatcataggataggaggcagagctgctagcatcgtgttaggatgcaaagacccatttcaccctttcctttttttaacccttgttttgggggtcgttaacactgactaattttttagtaacagagtagaatttctctcttgtaataaggctttatgctgggtttgagactcttggctgcagctcctttttgctttctacatattccattcctatttttctaagaaacctttctagtaagcacctaacctatgtgccatccaccagttcctgggtcgcatttgaacactgagcctgccttaccctgcatggttgggatgatgggaggggccttcataagaaggtaggaggaataggatgcctccccctttggaatatgtacttaaagaatgactttgctcactttctaatttatgaaagtcattttgattctccacttcctctaagttcccctttaccaaaaagcattatatgcgtatttgcatgtgatactctacaaaaataattacataagtaaactccctgccctttgaaagttgaacatcttttaatccctttgagaactgtcacgtgccctagtgggtttggggagtttggtagcactgtatagagtgggataactactgtcacagctttgatatagacaggggcagatgtgcatggctgggagtctgggtctgtccttagttccttagtgtacccagatgggcaatgttgttcccattttaggagcgaagggaactgcggcacaggaaatggacagagccttgggctcatggattcagttcccggctccaccacgaatttgctgtgtgaccctgggcaagtccttttcccctctctgggcctcagtttcctcatctgtaaaatggggataattctgtttatgcctcccgtttgttgggagtatatatcagataagatttgaaatgttgggaacttcaaaagaaagttaagaaattagttatttagcatttatttttatttgtgttgtatagttctactatggagagtagcctacagagtgtttaaaccgctctttataaatgaaaatgagaggagtgttgctatgcagaattgagcactgcagaattccagctcataatccaaaagttcattgcagctttattattacaggtgtaccccactttatacaataaaagtgttcctggaaaatgtttccatcatatcatattataaaggtacctgacaagtttgattcatttaaaggcattctcttatatatcagttcataaaattaaaatcccttttaagttatcgtatagaaatctagatttttatgtgtttgtttaaaatgaggccattgtgagatggagatacatctatatacaatttgtggaagtagtagaaggatcctttaacactctatagagcccttctaatggatcagggtcctctcattctgccctttcttcactgtgacccacattaaagctatctctggactttccaaactgtatatattaaaagaaatgcacatatacagttggaagaaagcctcatggggcttttcacacattcagtatttttggaattcctgaatgaccatccacccaggagactacaaagaactttgaaattgaagggagacttattgtatcctaggtaaacagaatttcttcagaaactcagaactcttgacattccaaagaaatttttttttttttgagacggagtctcgctctgtcgcccaggctggtgtgcagtggcacaatctcaactcactcttaacttctgccacccaggttcaagcgattctcgtgcctcagcctcccgagtagctgggactataggtgcgccaccacgcccagctaattcttttgtatttttagtagagacagggtttcaccacgttggccaggctggtctcgaactcctgacctcaggtgatctgcctgcctcggcctcccagagtgctgggattacaggtgtgagccactgtgcctggcaaaagaaatctttttatcacagtgaatttctgttttgatgcatgtgtgggtcagccataccctcttcagtggtcagtagcatttgactggctattggggcagttgggttctgttactctggtcaagtcaacgtatctcccactctttgttcccatatataaaatgggaagatcagccatgccttcatctgtcttgtagaaatgttttgaggcaaagtcagaatatttgaaattgttttgagcattttaggaaaaatggataataattcaaagtggccatacttgtaattattataatcaaggccattgcattgcatgcttccaaggggtcccgttctcattgtgttggatgtgaatggtgcccctggaggaaggcaccccatgatatggatgctggcttttctatcccctgctgactgccacgactctccaaaactaaatttctttccaaccacccagcaccttgcattagaggactctcttacttgacttcataggattttcaagttggaaatattttaatgatctccttggtcagtcccttcctggcagatgattccaacctctgcttgaatacctctggtgttaagaatcttaaagtaggctggcatcatggctttgtagtgaataactgccctttggcaaattacttactttctgagtctttgtgttcctttctgtaaaaacatggataagacttgccaggttgtgaggagtagaaacaatgtgtctgaagtgcctaacctagtgcctggcactgtcaggcataacaacaaatggcaactattatcattgtggtcatcatcattattatacctagtgtcttctgagattgctcattcccttgccagcacattataaatgaatttaagttttgcaagttctcttattggaaactttgactaagtgggttattattattttttaaaattaaccttaatgttaagggcagaattgtgtattgaacaccctcacacacaaattgacgagattttatttgggttaaaataaatatgttctacctgtctgagaaattgtagcatcaagggaaattagtttgcaactttagtacagttgcccttcaagggacaatgtgtccagcttctaacttcagtcttagtgaaatatttactagcatgagcttgtccatcagcactaaggcttaagatgaatgcagttttattactggagaatacttggcttacctttgactgtcctaggcatttgctcgcccttctgggggcaaaaatttatctttccattttacagaccagaaaattgaggtctgttaatgagcaagtttgtaactgaagcctgagtagaacccaggcatcctgattcccactggttgtgtcctttggattatgctcactataaacagagcctccccctctctcctgcaatgattgggcatctcagacaactgccagggatcaataagctggtaactaaaaaattctcctgagatgaaaaaagtgcagaaatcatgatcccacaccatctgaagcctctcttaagaagataagttagggagaacccaaagaagagggacttgtgctaattgcctggcttccaggccattgccttttctaccagctcccattttacactggtgaattgtttacgaaaatgaaagatagcttttactcagtaaagtctgaatagttgtggcttaacttgctcagaggcctccttattgatatttggtggacaataccagagtggaaaggattaccagcttgggatgagtgaaagtacgatcaggtgctactgatgtcaacccagagtgctgacactggctccatgtgctagggaagaggaaaggtttagcgtggaagataggtgttttgtaatcatttttctcccaaatgcttgagggatggcaccttcccctagcagctacgttggtcattgcaaaagtggttttcacttgattgtcaaggggctgtgggcaaggggtgggtagatgatggatgcaacatcagataagagggtggagagcagacatacctggtttgaaaaagcccctccaaataattctgatacttcctcacccccatccctctaggaatcgctgccaaaaaggaagtaggggaaaatctgagggaagaaaattatctatggagacaggagaggatccagttagttgttcctcattatcatctcggggtcttgaggaatacagaggcatgtgcttcatacataggaacatcagagcaaggaattccttaaatgtttgaaatcaagctgtaagcagaaggcaaacaagttaactgatattcctggcccattgaaattcgcatctgcccagagttcatactgtttctgttttatctggttgaaatacatttttgcacatggaggcagtccagtcattcagcaaacatttattgaatatttataatgtgctgggcaccatgttagaagcttaggccataaagatgaatatatagagctctactctcaagttggagtaggagagacctcagataggtgggcttctcttggaagtagaggggagggttcagccacaccttcttgatgggaagggttctaaccattgccctcacttggctcaggtgccggatgtgctcactgacattctactccaagtcggagatgcagatccactccaagtcacacaccgagaccaagccccacaagtgcccacattgctccaagaccttcgccaacagctcctacctggcccagcacatccgtatacactcaggggctaagccctacagttgtaacttctgtgagaaatccttccgccagctctcccaccttcagcagcacacccggtaaggctgctcttggtttaccccaccacctggccgtgaaccctaagaccatgttgcctgcacctactcctctctccacatgtattattctttccctttcacctttgcccattggtagcctcaacctcctattactgtctgtggaaattatatatcctagctatttggggggccttgaaaattgtggtctccaattccaaagtctggaacaatttttgtggtttctctctgtgtctgtgtttggaaatcttctgcagagcaggcctgcttttactatatgcttcagttcagagccaaggtgtgcattcaacttcaggtccatggggaacaggcggtattggtctttgttcagattactatttggaagcagggtgtctgtggtgagtgtgttaaccttaggagaaagcggagggttgatgagattgactactttaaggttaccaggagccatgggttgcagctcttcatcatctcactgccattctagccaccgacttacgatcagcaacaacctagatctgggtgtcctcttcatttgcctatccaggctggagtgtttttgggaggagggaggaagggggtgctctcatccgtcaagcaacgtcatttcacccagcagagagctgagcccctggtgtcgaactgcttcctcctccccccttccctcctctcctctccggcaggatccactccaagatgcacacggagaccatcaagccccacaagtgcccgcactgctccaagaccttcgccaacacctcctacctggcccagcacctccgtatccactcgggggccaagccctacaactgttcctactgccagaaggccttccgccagctctcccacctccagcagcacacacggtaagggagagtggcgggctactgaccccgccccgctggcatgccctccccacccccgccccggacacacacaacaacccgcatgcggggggcgggggagagacctggctggaggagagacctggctggcatctgggagaaggaagaccaaacaacactggagattcaagtggacacagagcttctctggggcaagagctacgtcggggagctgcagtgactatatgatattcactgatccatgggagacagacacgtacctggagtagaaacaacttttctctaattttcctccctgaaaatactcatgtacccatcttggaagatttgccccttgatgccaaaacagaggcatttgagtggagaagaccatacctctagcccttagggcaccaattatgaacaggaaataaaatcagacattagctgggcaccagcctggtgacacccacagcaacaagcaaggctctgagggatgccaggagtagagaacaaaagaaaacacgtactaaatgttcagagagaatcagcaaacagaaaatgaaaacgcttatgcttcataaagatgcccagtgtttatcccgtgaatctggagtgactaggaagaagggaacctgccaactagaagtgatgatctttggtgctatctcaagttgaactggagtccagacttacaggccatagaccgtctcacccggcttcttgtggatgtgatgatctcaccttaaagtgatcagacatcttgctttgagaagaggaggagtcaggctttcctcacaaataagagacacgtcctgtgatgtttttgagattttataccagaggtcccgaaaagcacctggtcatagagatggttctgaagtcgctgatgaggagcaggtgtcactgcaccctcaagtccttggctcatcttagcagagggccctgtggtgttggggagagaggtcacattggtactaaactaggcatttcctgtcattagggggctgggctgcaaaaagcacttagttttcatgagtttccattaatatcactactactctccacaatcagtgtaactgcttttctttgttaccataacattctctggaagtgatgctcaaggctgaggggactgtttctggccataaggtggggccaaggaagacgcgttctgcttttctttttccttgccattgtgtttatcttgtgttcttgaatgttcgttaggacagttactgtaggagctgacttgaatgccaaattgtgggctgcctgttccttgggtgccaagtcctcagtctctcctcccccagcagagaggagcctcagcttgagctgagtgatgcaggcattgaccagaagcaaatcatcagtacctgatccacatcagagaggaaggctggtgcctcttggaggcccatctgatgtgcctccttaggagagcaggatgggcctggagaagatttgttgagccagttcctaaatggtcttgctgacattctttcccttttttctcttatcctgtgcagaatccacactggtgatagaccatacaaatgtgcacacccaggctgtgagaaagccttcacacaactctccaatctgcaggtaaatgttccaccctccacacaagaccttgagtctgagacatggggccatttgaatagtatcgtggttctcaaatgttttcaggactcctttacactcaaacattattgagggacccaaagagtttttgtttatgtgggtaatagctgtctacatagacgttgtaaaactgaaaaacctgaaaaatatttataatagtaatctgtttagaaagaacaaaaataaacccattgtgtgttaacataaataacatattccaagaccctccaaaaacaactgagtgagaagaatggcattattatacatttttgcaggtgtctattttttatttttgggacaggaccttgctctgtcacccaggctgagtgcagtggtgttatcatggcccactgcagcctcagcctcccggtctcaagtgatccttccacctcagcctcccaagtagctgggattctaggcatgcaccatcacacctggctgtttttttcattttcgtagagatggggtcttgctatcttccctaggctggtctcgaactcctggacacaggccatcctcccgcctcagcctccccaaagtgctaggattgcaagcatgagtcaccgcacctggcacaggggtctttaatgtcttaagctagaagatgagtagattctcagatctgctgcatctggcctattgtgttatcacacatcatgtaacctctgtaagggttacatgtaaaacataaggcacaatgaagccacttgaaattttgaggggaacaagatttcagttaggtttttcatctttgtgtttgtgtgtgtgtgtgtgtgtgcgcgcgcgcgtgtgcgtgtttgagacagaggctcgctgggtcacctaggctggagtgcagtggtgtgatttcagcttactgcaacttcccaggttcaagagagacaaaggcaaacattgtcttattattttgaaaagatttggctgggcgcggtggctcacacctgtaatctcagcactttgggcggcggaggcgggcggatcacctgagctcaggagttggaaaccagcctggccaacacggtgaaaccttgtctctactaaaaatacaaaaaaaattagccaggcctggtggcatgtgcctgtagtcccagctacttgcaggctgaggcaggagaatcgcttgaacccgggaagcggaggttgcaatgagccgagattgtgccgctgcactccaacctgagcgacagagtgagagacttcatctgggaaaaaaaaaaaaaaagagttttgaccctgtgggccccctgtgaaggtcttagtgttccctaaagatccccatgcctcattttaagaaccactggactggtgagacgggcataagctgtcttgggatcctggtatgtgctacatgaggtatgcttccacccttagcctgtagcttctcaagtttcatttgaaacaatttctactttcttcagatagagggagaagctgggaggcctgacacctacctttttgctttccatcgaggtcaagggggcaggaggaaagagtacaatgtattcattctggtttctcccaattttctcagtcccacagacggcaacacaacaaagataaacccttcaagtgccacaactgtcatcgggcgtacacggatgcagcctcactagaggtgcacctgtctacgcacacagtgaagcatgccaaggtgtacacctgcactatctgcagtcgggcatacacatcagtgagtgctccgtttcttctctccttcctcatagtcctctaagagtacagtccacttcaccccattttctgggtagagatctgttgcagtgaataccctgcctccctagctccaacttagcagaacaggtaaatattcagaaattaattagacccattctgaggaatttaggggatgcctgatctcctaatcctatagagacgcataagctgtaattcttcattttacttaaacataaggcaaaataaagccacttgaaattttgaggggagctggatttcagttaggcattttcttcttcttttttttttttttttctttttgagacacagtctcgccctgtcacccaggctggagtgcagtggtgtgatctcggctcggctcactgtaacctccacctcctgggttcaagcgattctcctgcctcagcctcccaagtaggtgggattacaggtgcatgttgccatgcccagcaactttttgtatttttagtagacatggggtttcaccatgttgcccaggctggtctcaaactcctgacctcaagtgatccacctacctcagcctcccaaagtactgggattacaggtgtgagccaccgcacctggcccagttagatattttccatgagactccagaaaaggttgtaaagttgtttcattcaggggtctttgaaaaaaatagcagctcattcctttgccagttgaatgttgagtgacttctaaaggttcctctcttttttttctcagtagtgagccactgaaagtgctacttgagttttgctcagtcttggctccagaaaaccagtataaagcttactctgcttacagcagaatcagagcctggggtgctagttacaagtaatctcttttccttcctctttatccctcaacttctttttaccatctccctcaggaaacataccttatgaaacatatgcgcaaacacaacccgcctgatcttcagcaacaggtgcaggcagcagcagcagcggcagcagtggcccaggcccaggctcaagctcaagcccaggctcaggctcaggctcaagcccaggcccaggcccaggcctcccaggcatcacagcagcagcagcagcagcagcagcagcagcagcagcagcagcaacagccaccaccacacttccagtctcctggggcagccccccagggtgggggtggtggggacagcaatcccaaccctccaccccagtgttcctttgacctgaccccgtataagacggcggagcatcataaggacatctgcctcactgtcaccaccagcaccatccaggtggagcacctggccagctcttagagatccgtgctgccacccactgggaagaggaagaagtagtcctggtgtcttctttctccaactcttggtgggaaaagtccttttcttccttgacaggccttggctccatctccttgggcctctgtcacggctttccttcacaggataccatcctttttctgaactcttcttcaaaaggaacatcagccctcctgattgcaaaggaatactgagctgatggtgtcatccagcagcctcccctcccaagcaaagcttctaaaactgggggtcggtgctcaagggaaggatttgctatgacctcatagaaccttgtccagtgtggccacttaccctatccttaccctccttatcctcaaagtttgggctgatgtaagactagaggctggccctcccagataacagagaaaagggagccccaaatgcaaccagcctcttgttctattcttgcctgcaaaagaacagaggtttctcaaatgcctcagtccctgagagccatttcttcccctacatcgtctcactttgcttcctattgactgctggtagaaggagatttggggtaggggctagacctccttttatttgaagggggcaagggctgagatgtggtccccaaggggccagaaattcccaagttggtcacaggtggcttagaagtgtgtgttatggttttacggatttccttgaagcctctctccttctctgcctacaaagaccctatactctcagtctccccaacccacccccaaggagctgtgggaggctttgtgttatctgtgaaactccaaaacaggggtgttgcggagaagggagagttcaaggcaaacgcaaggactggacttagctccctaggtgccacagtcagatgccggacacggatttatatataaatatatatatataaatatattatactcactcatcacggccatctttgttgtaaccatttctgtgtttataaatgcattatctctgagaattttcatatttgatgttttgtttatttttgtcctttttttccctctctccacccctgtcctctagccacagcatttttctttttgtcttttttttttttttttaaatcatggcagatttcagaggaaaggaaattaaaaaaaaaatcaggaaaccagttgttataaagtaatttaaaaatgaagaaaaaaagaaaaaaacttatgtacaaaccaaggggtgtttttagaacattgtatagaaataaattcatgtaaaagga

SEQ ID NO: 298 - DNA, 47627 bp, Homo sapiens
  source 1..47627: mol_type = genomic DNA; note = NC_000023.11:1595455-1643081 ASMT [organism=Homo sapiens] [GeneID=438] [chromosome=X,Y]
tcaggaactggagcagcaaagagaagaacaaaagcgcagagagaaggaagcggaggagaggcagcgagcggaggaaaggtaccttctgcgggagcgggccctcggcgctggtgtccggcacctgggagtgtgcgcagacccgtgtgcgtgtgtctgcatgtattcctgtgcgtgtgtgtgtgcatgcatgcttgtgagcttgtgtgtgtacctgtgtgcatggacgcacgtgtgcctgtgaaccggtgtgtgtactttgtatgtccctatgtgcgcccgagtgtgtgcctgagcatctgtgtgcacgtgtgcctgtgtgtgcgtgcatgtgtgtgagctcgtgtgtgtacctgtgtgtgtatgtgcacgtgtgcccacatgtgtgtgcttctgtatcggcacatagcacacatgtgcctgtgtgcatgcgtgtgtgcctgtgaacccgtgtgtgtacttgtgtgtgcacgtatgggtgtgtgtgcaggcctgtgggtgctcagctgtgcacgtgaggacctgcgtgagtggctgtttgagacgcagcagaatatgaatgtttctctttttcttgtcacacgtcgtggtctgacacgatctctgccggctcccaggaccgcgccttgcccgaagagccacctcttctccctccacatgctgttcacacctcccgctgaaacaagcagaatgccttggctgtttgcaagtttgcatttaggttgaggctacatttacaaaatgaagtagagggttgatggtgatggccagatttaaaaaaaaaaaaaaaaacaaaaaaccaatgataggacaaaaacccggtttcacataagaggcctttaaagcaattgcctgggtcgttcactgtggttggggtaccagagacaacctcaggtcactctttgtagccccttttatcttcttagcattgcaggagggaaccaacaactttctgtgaatcccctgaggcggaatcctcctcctcctcctcctcctccatccctcccaccctcctagtgaggtggattcctcctcctcctcctccatccctcccaccctcctagtgaggcggaatcctcctcttcctcctccatccctcccaccctcctagtgaggtggattcctcctcctcctcctccatccctcccaccctcctagtgaggtggattcctcctcctcctcctccatccctcccaccctcctagtgaggtggattcctcctcctcctcctccatccctcccaccctcctagtgaggtggattcctcctcctccttctccgtccctcccaccctcctagtgaggtggattcctcctcctcctcctcttcctcctccatccctcccgctgtgccctcctagtgaggcggattcgtcctcttcctcctccatccctcctgccgtgtcctcctagtgaggtggattcctcctcctccttctccgtccctcccaccctcctagtgaggcggaatcctcctcctcctactcctcttcgtcctccgtccctcccgctgtgtcctctgacgactttggtgcgtcctgcacgtctgttgcgcttcatgtcgccgatatcaagtctgggacgtgttggacttggctggggggctcctggacagcctctggtgggaccgagttggtccgttttgtttccatttctcactgctttatgtgacgctggtgccagcgtgttgatgtgtgtggctggtgatgtttgcacgagagtcccggcactgaactcctgggagcaggtccatcctgcccgtggtgttctttacgtagcccccgttgcctccccaggggagagtcgggttgtcagcctctgaatctgaaccccgagggctccttaggtgaggcaggtgcagtgtgtaagcgagtggccgtgaatgtgctgggggggcccatgtcagccgtcaggattcccaggacctaaggcaggcagcacagagaggcagacgccctgggagggagggacatgctgctgcgtcgccatcctgggaggcggtccctgggaggggcggttcggatgtggggttgagtccgggtcccctgtgtcagccactgtcaggccgagcaggacagctggggtgggagacagtcctggggcgttacagggactcttccaggctgcagacacagcccaggcctggctgaatgtgcctgtccacattctggaagtgtggagtgggactcagagcctcggacctctcggtgtcgcaggagtgtccccgcaacatttcagaaagcagcttgcgggtgcggagaagaagctgcatccttgatctttccctgaggagagatggacgttggagtagtggagtgtgtctctgcagggaagggaccccgtctgcctggccagaccacagagggattgggggaagcggggccgggccatgaggttctcgagagcaggatggggtgtccagagccccggggaggggcaggcctgttgtctgggggagctggccaggagggctccacacgcagggccgtacttgtccccgctgtcccccactgtccttcctcagaggctgagcatgaggggaggcccagggcagcctcctgcatttctttctggtgggtggagatgaggcatgtttgcttgttcagccctcacgtgtaactttgagcttgatgagagctgtcctctgaaagctgcccagcctcgaggcgtcgctgtgggtcccgcctaagggcgtgctgtgtgctgggctgccctgagccgccctccgagctcgtggggcggtgacagctcacagggcggttaaaccttcagcacatgaaactgcctgaggacctgcatgccccgcccggagaccgtgtggatcactgtctgggcgtcggcacctggcccggcccccttcttggggtggcagagcgtgggatgccttttctcccggcctgctcctccttgtccccgtgtctcctctccccttggtgtctgcgtgggtctgtgtcaccccggcgggctttgtggcctcactaggcggttggcggcgcccacccgggcttcagaagtctccgcctccgtgtcgtgttccataggaacagctgcgacttgttcccatgtccggtgttggttgaaatgcatttgagagctgcggggcgggggaggctgagctagggaactccccactgtctcttgtggactctctctggggaccgcgcccctccccggccgcattcatcctcacttcctggacacccctctccacaggaaaagtgcaaggagctgagtggcgtggctgtggttggatttgtttagagagaggtccccccgtgccagtgctgtgtggtgccctcacaggagtcctgcacaacaaggagtcacccagcgcggttcctggtgggcagaaccggcgtcctccgcgccgctgtgcatcccggggccttgttgggcctgctggggttcctctttcacccgtccgtctgcccatccgtctttcccctgactgggggcgtggcttttgatgtggtcggtccagtggtcgttttcttcgtggtttcagggttgggtcacacttagcaggacggtgtgttggaaggtcacggaggtcctcgcccggctcactccttccacctctcgggctgctttgagtcaaccgaggtccaccttgggataaagagttaaatgcttaatcgttggaccgtggcctgttccgccgtgtttggaaagccgcttgtatggtgtgtggtgtgttggctgcggcgctctctgtgaccacccccggtgtgttccacacaggaaacaaaaggagctggaagagctggagcgagagaggaaaagagaagagaagcttcgcaagagggagcagaagcagagggaccgtgagctgcgccggaatcagaagaagctggagaagctgcaggcggaggagcagaagcagctgcaggagaagatcaagctggaggagcgcaagctgctgctggcccagaggaacctgcagtccatccggctcatcgccgagctgctcagcagagccaaggtacccgggggctccctctgcagccgccagccgcgcccgggctgccctcagtgccctcccctgaaatgcgggcggcgtcacggcgccgtttccccgccggctgcagctgtagctacgaaaccagctttaatgccgaggatgacggctccttcccgggagggtgtagcgctcgtctgtcgttcccgatgatttcagagctgtgacggtttccttttgcaaagctggtgcattcaggttccccgagcaggctggcagcctcccgggggccagggcagaggctctctgtttcctttgggtcggggcagtggcagagagtgcagggggccgctccctctggcccgcgcctctgtgtgtggtcagctggcctggctgtgacctcaccagtggcccagagcagaggggcaaggtgggctggggggagggctgagcgcacagagggggcctgccgtgggcccgggtccctcctccgcagcgtgaacctgacaggtctcaccagcgccggtactgacgaccccctcagcaccaagagcctccctgctcctcctgcaggcgcgactggtaactcccatgagcccggggccagggcccacagacagacagacctccccaggacagacgtccccggcacgctccttgtcctcaggagggctgcgtccccctggagtccaacgcggggcgaccccataacctgttgtctgattacagttgtgataagtccccgggaaggagcatgacaagaggctgagacatgtggcagcccagtccttacctcatggtgaatattgaagacactaacccaggctaggccaggctcgccccgcagctacggcggtggcatgcgtctgcggcgtcatctcagctccctgttgctggcggccgcttgtgacctaaccgcaggcgcctgtgtgcaacgtggtggggctcccggcagggctcggctctgcccaagaggcccgccctggggctgcgccgagccgctttgccaaggggtttccttctcactcagacgcatgatggccccaggtgtggccgcgggagccgagggatggacgggctggacctggctcgccgtaggagacgccccccacccctgggctggagtccagccaggccgctgatcctgcatccccagaccatggggcctccaaacaccttcccagctcctgtcccacgtgtccggccaggctcaggaaccgggctcagctgcactttcctcttccccgcaggctgtgaagctacgggaacaggagcagaaggaggagaagctgaggctccagcagcaggaggagcggcggcggctgcaggaggccgagctgcggcgcgtggaggaggagaaggagcgcgcgctgggcctgcagcggaaagagcgggagctgcgcgagcggctgctgagcatcctgctgagcaagaagccggacgacagccacacacacgacgagctgggcgtggcacacgccgacctgctgcagcccgtcctggacatcctgcagaccgtgtcgtccggctgtgtgagcgccaccacgctgcaccccctcgggggccagcccccggccggtgcccccaaggagagcccggcccacccagaggccgacggcgctcccaaaagcgtgaacgggagcgtggccgaggaggccccatgcaaggaggttcagagctcctgtcgtgtggtccccgaggatggctctccagagaagaggtgcccgggcggcgtcctctcctgcattcctgacaacaaccaacagcccaagggcatccctgcctgcgagcagaatgtctccagaaaggacacccggtcagaacaggacaagtgcaaccgggagcccagcaagggccggggccgggccaccggagacgggcttgctgaccggcacaagcgggagaggagccgggccaggcgggccagcagcagggaggacgggaggccacgcaaggagcggcggccccacaagaagcacgcctacaaggatgacagcccccgccggcgcagcacgagcccggaccacacccggtcccggaggtcccacagcaaagacaggcaccggagggagcggagccgggagcggaggggcagcgccagcaggaagcacagccgccaccgccgccgaagcgagcggtcgcgctcccggtccccgagcaggcaccgcagtacctggaacaggtaatgacgggcacggcctccccacggcctgtccgggaaagaccaggacctgctcgagcctcctggccgctccttggccgctctccgtccacccctgcaaagccaagacccttctgcagccacgaatgtccacggagcccgccggcaggaaggaagacaccatgctttagagatccatctttctccactcaccgcagcgtacttggcacttcagtttcaaacacgtagtcctttaaaacttgatccgatagctttaatgcggccggtcctctctcagtcaggaaaattgcacagaccgacagtcgtgaggatggcagagctgctgcattcccccacacggggatttctgtgtctgcttggcgacctccctgcgtgcacggcctaggaggtgcacgggccaccatagtcacactggcactgaaaagaaagcgttgccctggtgattctttcccccccgtttgtaatgttaactgatcaggaagtgcagtttgggtgggatgccgaatcgtcgtgctgacattgagtcacggatgaggaaggtacaagtcctttaagatcaaaactcaaacgggccgttctttctaaggtgtcggtatgtggggagtggtacaaaatggtctgatgctccttcaaaaacattcactttttacaacgtcaaggaattaagcataaaaaagattggttaaaagctttggtttctagtaaaggttagtgtgtgtggtttttttaagaagctgttttgctaaattatttttacttggaatgtttcaaacagatttcaggctgcaaacttgttttataatcgtttgcttctccaagtgaagctcagaaatacctaaaaatagctgtaacgttcgcgttaggaaagatggtgtttattccagtttgcatttttatggtgaaataaaatccttttccaatgaactaaaatttttcacgcttacgatttttgtgtttttatgttccttggactgcattattcagctgaggctagccaagtgtgcgtgaaaccagtagagatcgttcgcttttcctagaactgctgattcaacgatgacatatcccacagctctcccgcagctgtacggtagtaaccttctgagaggagaatcctggctcttaagaggcatctgatttgtttgctgagaacataaacttagccaaattcccaaaaccaatcttttttaaagccaaggagctgtttttaaagcaaatttaaaagacggtcgttctttttttttttttgagccggagtctcgctctgtgacccaggctggagtgcagtggcacgatctcagctcactgcgagctccgcctcccgggttcacaccattctcctgcctcggcctcccgagtagctgggactataggcgcccgccaccgtgcccagccaatttttttgtattttttagtagagacagggtttcacggtgttagccaggatggtctcgatctcctgacctcgttatccgcctgccttggcctcccaaagtgttgggattacaggcgtgagccaccgcgcccggccaaagacggttcttttccccgcctaaagtagtggtcacaggtagcgtaggcactgcctgcttgacccagggtggaatagtctgttcctctgtttaattaaaacacaaacgttcttggggactggagggctggacacgtgcctgttgcacccccaagctcatatcactagcagacagatgagcactacacacacacctttctctcaaacggctctgtctggcctgagaccaactgacaagatgcgtccagacacagagtgtttgcaaacacggacctctcagaagtctgcatctggccgggcgcggcaattcaagcctgtcatcccagcactttgggaggccgaggcgggcagatcacgagatcaggagatcgagaccatcctggctaacacagtaaaaccccgtctctactaaaaatacaaattagccaggcgtggtggcgggtgcctgtagtcccagctactcgggaggctgaggcaggagaatggcgtgaaccggggaggtggagcttacagtgagccgagatcgcgccactgcactccagcctgggcgacagagcgagactcctgtcaaaaaaaaaaaaaaaagctgtgtatctgtgtcagtctgtccagcccagcactgagctttttgcctgttcagtagttattagagcgttgccagggccgggcatggtggctcacacctgttatcccagcactttgggaggccgaggtaggtggatcacctgaggtcaggagttcaagaccagcctggccaacatggtgaaaccccgtctctactaaaaacacaaaaaactagccgggcgtggggatggtcacctgtaatcccagctactcgggaggctgaggtaggagaatcgcttgaatctggggggcagaggttgcagtgagccgagatcacgccactgcactccagcctgggcgacagagcgagactccatctcaaaaacaaacaaacaaacaaacaacgttgctaggaccaggtgttgctctgggcacctgggatatggtgctggaaaagacagcactccctgcaacgctgaggaatgtgtagatacagggatgagaagtcccagtgatagcttctcgagagagctgtgtgcgcaagacagaagggtggacgtggtgtgtctgaggtcaagaagtgcatgtggccgggggaaggagtaggcagaagagaagcaggaaaggtggacatggagctgatcgcactcatgaggctgacccactccagacttttgggacgagaagcaagaggggctgtaagctgggagtgtgatgagtgtggcggcttgaagtgctggtggactgggctaggggttgatgggagagaaggtggcagaaattgaatgcgtgttgccttgtgatatgttagatgtgggcagtctaggaaagctggagagcaccacccccaggcctatagaattgggtatctatggaagagatttaggaatctgaactccttttctctgttttctcttttgtctatcgctcgtgctctctctctctctccttccttccttccctccctccctttcttttccttttctttccttttctctttcttttttcctttccttccttccctctttcctatttctcttttattttttgagacgaattcaaaaattctaaaatttttgaatttttaagtagaggcagggtttcttcatgttggccaggctggtcttgaactcctgacctcaggagatccaccagcctcggcctctcaaagtgctgggattacaggcgtgagccaccgcgcccggctgaaatttctcttctttgctgtaggggtcagtagcagtaagtagcggctgataggtgagaatggagattaattgaagcaacgctgttactgattagattttgtctttacacttgagcctggaaggaagaaatggaagcattcgacccgaggaatgttgccccacagatttctggggggagcataggagattggtgtgtgcgtgccctgccctcctccctctctcaacccctgtcagtctctcccctgtttttccctgctgtctcttctctcgcccagcttcccctctgcttgtactctcttctgatctctgtttttgtctctgtctctcctcctttcttttttttctttcttttttttttttttgagatggaatctcaccgttgcccaggctggagtgcagtggcgcgatctcggcccagtgcaacctccgcctcctgggttcaagcaattctctgcctcagcctcccaagtagctgggattacaggcacctgctgccatgcccggctaattttttgtatttttggtagagacgaggtttcaccatcttggccaggctggtcttgaactcctgacctcgtgatccacctgtcttggcctcccaaaatgctgggattataggcgtgagccaccgctcccggcctgtctctcctcctctcttaatccttccttctctcctctcgcccagcttcccctctgcttgccctctctccctatctctattttagtctctctttgtctctctcggtcttgtgatttagggcactttgtgttcagtccctttctagtgattgggattattatccacttaaaatatccacaataggccgggtgcagtggctcatccctgtaatcccagcacgtcgggaggtcgaggctggtggatctcctgaggtcagaagttcaagaccagcctgaccaacatggagaaaccctgtctctactaaaaatacaaaaattagccaggcgtgttgtcacatgcctatagtcgcagctactcagcaggctgaggcaggagaattacttgaacctggggggcggagattgcggtgagctgagatcgcaccattgcactccagcttgggcgacaagagtgaaactctgtctcacaaaaaataaaaaataaaaaataaaaatccacaaggaatttcacttccatgtggcagaacagaaaacgaatggatttattgcaaaatacgagtgagaaagtgtgattctctcgttcatacccttttatgacacttagttctgaaccgatttgcctcgtgtcttcagttgggatctcaggatctctttcagccaaaaaaatcaaacttccctgttgagtatggcctgtgtcacggtgaccatcctcggctccttccgtttttttgttttttttcaagacagtctcgctccgtcgcccaggctggagtgcagtggcacaatctcggctctccacaacctccgcctcccgggttcaagtgattctcctgcctcagcctcccaagtagctgggattacaggtgtctgccaccacacctggctattttttttttttttaatttttagtagagatggggtttcaccaggttgaccaggctggtctcaagctcctgacctcaggtgatccacctgcctcccaaagtgctgggaatataggcatcaaccaccgcacccagcctcaccaggtaaactttcaagttcaaaagtgcagcttggaattccagagggaaggaggatggggatacgggtacgtgtgaataaagcagcgctgtgtctacgattccactctctgtgctcacgtgaacacattactcagctcccactcagaagtgagaacacgctgcgtttgactttctgtgtctctgtgatttcaattaaagtaacggcctccagggtaacgaaactgcacttctatgccctaaatctataataatacatcaaggtaaaaaaaaaaaaaatgggccaggtgcagtggctgacgcctgtcatcccagcactctgggaggctgaggcaggcagatcacccgaggtcaggagttccagaccagcccagccaacacggtgaaaccccatctctactaaaaatacaaaaattacctggacatggaggtgcgtgcctgtagtcccagctactcgggaggctgaggcaggagaatcgcttgaacccgggaggcggaggttgcagtgagccgagatcaccccactgcacaccagcctggatgacagagtgagattccatctcaaataaataaataaataaataaaatgtatttcaaaagtgccaatatgacatgaactgctgttaatttgttcacctgtattgttaaaatgggtgaatacggttaccagattgtgatcatgttcaaattccataggccgcagccttcgggatgaagcaaagagtttttgaaaaattacatattctatgtctaaaatggcaccatctgcatttttgaaaaattttagataatattacaaatgcgtaggttggctcatgcctgtaatcccagcactctgggaggccgaggcaggaggatagcttgagcccaggagtttgagaacagcctgggcaacatagcaagaccccatctctacaaagataattaatcaggcttggtggcaggcacctgtagtcccagctactcaggaggctgaggcaggaggattgactgagcccaggcattcgagaccagcctgggcaacatggtgagagcttgtctctagcaaacatacagaaactttaaagtttttaaagtagctgggcgtggtggtgggtgcctgtggccccagctactcgggaggctgaggcaggaggatcgcttgaccccaggagttcaaggctgcagggagaaatgatggtgcccctgcactccagcctgagcgacagagtgagaccccatctctaaaagagagaccctctgtctctaaaaagaaaaacagaccgggcgcggtggctcacgcctgtaatcccagcacttcgggaggcccaggcgggcggatcacgaggtcaggagatcgagaccatcctggctaacacggtgaaaccccgtctctactaaaaatacaaaaaaaactagccgggcgtggtgacgggcgcctgtggtcccagctactccggaggctgaggcaggagaacggtgtgaacccgggaggcggagcttgcagtgagaggcgattgcgccactgcactccagcctgggcgacagagcgagactccatctcaaaaaaagtaaaacaataaagagtatagaaaaacatgcatgcatggggggtataggagaggtcccagccctcagccgtagccatggatgtccaggtggtgatgtgttgccctggcccgccccgcaggcctccagcatctccaacagcggcttcccaggggatgctgaagctgcggccggaccggccagctcgggcaggggtgagcggagctgcatcacccaggcatcccgtctgggacctcctcccatgcctccttcctgggcacctgcccctcctcactagctcatcctccttcccacctggtggaggacacgcacaccctcctggtggcgtcctcaagccccgtccacctgcccaggagctggggcatcctgtgtctcccgccttgctctcctgcacagcctgactcagagcgggagctcgaccccctaccctccccgctgtacgctgccccagcaaacctcccgagtttgcacccggccactggatcggcctgcacaggggctgccgcctccgtcccagatggcaggggcttttccctgcaccccacctcactcagctcatgcctctgctcctggtgaaaaacttttcccatcactccgtcccgtcccctctctgcagcaaatgactcttgtccaggctgtccaggctgccagagaccaccgaggcactcagtccggaagcccatctgtgccagggtcattgggaggtaaaggcaacaggctttacctctccaggccacccctgcgcctactccagctaagactccaggccacccctgaccctactccagccaagcctccaggtcacccctgcccctactccagccaagcctccaggtcacccctgtccctactccaggggctgagcgcggtggctcacgcctgtaatcccagcactttgggactccgagttgggcggatcacgaagtcaggagatcgagaccatcctggctaacacggtgaaatgccgtctctactaaaaatacaaaaacaaaattagccgagtgtggtggcaggtgcctgtagtcccagctactggggaggctgaggcaggagaatggcgtgaacccgggaggcggagcttgcagtgagccaagatcacgccactgcactccagcctgggtgacagagcgagactccgtctcaaaaaaaaaaaaaaaaagcaacagtatgttcccctgggagaacggagggggcggctgtttacagttgccccagggcaggacctgcacactggaccatccagggccagtcaccccacaggcatctcagactccacacatccccgccaaaccccagccctgggtcttctgcattctggggacatggggacaccacgctggtcggtagggtcccaggctcttctcaatctctctcgggcccctcctctcctgctgccgctgccgcggtgagactccgaggcctgtaggaagcttcaggtgcctgagcctccagtacagcccttcccctactccacccaagcctccaggccacccctgttcctactgcagccaaatctccaggccgcccctgtcccctactcaaaccaagcctccagaccgcccctgtcctctactccagccaagcctccaggccgcccctgtcctctactccagccaagcctccaggctgcccgtgtcccctactccagccaaagctccaggccgcccctgcccctactccagccaaagctccaggccacccctgtcccctactccacccaagcctccaggaggccctgtcacctactccagccaagcctccaggccagtccttcctttactccagccaagcctccaggccacccctgtccctactgcagccaaacctccaggccgccgctgtcccctactcaaaccaagcctccaggccgcccctgctcctcctccagccaagcctccaggccacccctgtcccctgctccagccaaagctccaggccgccccgcccctgctccagccaaccctccaggccgcccctgcccctgttccagccaagcgtccaggtcgcccccgttcctactccagccaaacctccaggccactcctgcccctgtagcaggactagccgcggataaaacccctcagacaccaggtttaggaaggttttggctttattcggccggaagcgttggcggactcacgtctcgagaaccgggctctccgaagacagagctcctggccctttgaaaggcttacaactctaaggggttccacgtgaaagggttctgatagattgagagcacgtgtggttagagtcgggggttaatgttttaacctcaggcctggtcaggggtgccggctggtcttgccactgacttcattcctgttgtttttcaacttttacttcctccttctcttcagagacaggagatagtaaaataaatggcctctctccccaccccgactccagccaagcctccaggccgcctctgaccctgctccagccaaacctccaggcctcccctgcccctactccagctaagactccaggccacccctgaccctactccagccaaaacttcagcccgtcccactcacccaagttatacaaaagctcctgggctttccggccaactctgtgtcccaaacatcccatccccaaaatggcagcttctgactgtgtccagaccatgcaggcctctcctgaaaccgtcctgccagacgctgtctcaaggtggtgaggggttccgtgcaatgtccctgagggcttttaaagccaccctgtctcctgtccatcggccccctcccctcctctccctctgtctttccagatgctccacccatgcagggttgttgtctcttctttgaacagcccggacgcactgccgctaccccacggcctccgcacctgctgttccctctggcagagacggtctttcctgggagcacccacccggtccctcctgcctcggatttcaaagacttccaaaaccaccttcaccccaaaatccagctctccctcccctccccttctgtccacacccccaaatcaccttctaacatcttcatctttttttttctttgttttgagatggagtctccttctgtcgcccaggctggagtgcagcggcgcgatctcggctcactgcaaccgccacctcccgggttcaagcgattctcctgcctcagcctcccaagttgctaggataacaggcatgcactgccacgcccagctaattttttgtatttgtagaagagatggggtttcaccatgttggtaggctggtctcaaactgctgacctcaaatgatccagctgtcttcgcctcccaaactgcccagatgacacatgtgagccaccacacctggcccagatctgatggttttataaatgggaggtcccctgttgcacacgccctctggcctgtcaccaggtaagacatgcctttgcttctccttggctttcctgccatgagtgtgatatgtatttatcagcaacatgaaaatggactaatacaatatgcttgtcagccacgcgtgtgtcttctttttgagaagtgtctgttggccgggcgcggtggctcactcctgtcatcccagcactttgggaggccgaggcgggtggatcacgaggtcaagagatcgagaccatcctggctaacacggtgaaaccctgtctctactgaaaatacaaaaaattagctggctgtggtggctggtgcctgtagttccagctactctggaggctgaggcaggagaatgacacgaacccgggaggcggagcttgcagtgagctgagatcgagccactgcactccagcctggtgacagagcgagactccatctcaaaaaaaaaaaaaaaaaattacccaaaattacccagtctcaggtatgtcttatcagcagcatgaaaatggactaatatgcttgtcagtcacgtgtgtgtctttttttggagaagtgtctgttggccgggcgcggtggctcacgcctgtcatcccagcactttgggaggccgaggcgggcggatcacgaggtcaagagatcgagaccatcctggctaacacggtgaaaccccgtctctactaaaattacaaaaaattagccaggtgtggtggtgggcgcctgtagtcccagctactggggaggctgaggcaggagaatctcttgaacccgggaagcggagcttgcagtgagctgagatcgtgccactgcactccagcctggtgacagagcgagattccatctcaaaaaaaaaaaaaattacccaaaattacgcagtctcagatatgtctttatcagcagcatgaaaacggactaatacaatatgcttgttggccacgtgtgtgtcatctttggaaaagtgcctgttggctgggttcagtggctcatgcctattatcccagcactttgggaggctgaggcagacggatcacctgaggtcaggagttcgagatcatcctggccaatatagtgaaaccctgtctctacgaaaaatacaaaaattagccaggtatggtggcaggtgcttgtaatcccagctactcgggaggctgaggcagaagaatcgcttgaacctggaaggtggaggttacagtgagccaagattacaccactgcactccagcctggtgacaaagcgagactctgtctcaaaaggaaaaagaagaaaaaagaaaaagtgtccgttcatgtcctttgtaagactccactctctagtaaccgtgttcctgcccttctcaattcctaaggtaatcgccttaactcagatccctgagaaatccccacagcaggcagagatttggtctcctgacagtagctttgggattccattaagcaaatatgattgggggccagccccttctgtctccaggtaaggtgtccccaaggacccttcatcgctctgaacttcaaggatttctttttctttcttgctttccttctttctttctttccttctttcttccttcttttctttttcttccttcctttctttcttcctttctttttctttctttctttccttctttttcttccttccttcctccctcccttccttctttctttctttctgtatctctctctctctttctttcctttctttctttccatttctgtctctctctcttctttcttttctcttctttctttctttctttctttctctctctctctctctcctctcctctttctctctctctgtttctctctttctttctttctttttgatacagacctcactgtgttgcccaggctggagtgcaatggcccaatctcggctcactgcaatctctcccttccaggttcaagtgattctcctgcctcagcctcccaagtagctgggatgacaggcacctgccaccatgcccggctaatttttgtatttttagtagagacggggtttcaccatgttgaccaggctgatcttgaactcctgacctcaagtgatcctcgcacctcagcctcccaaagtgctgggattacagacatgagccaccttacctggctaatttttatatttttagtagagtcggggttacaccgtgttagccaggctggtctcgatctcctgacctcatgtgatctgccccacattgctgggatgacaggctgtgtttatatttttcccctagaaaatcactctggaggctgggagtggtggcttacgcctgtcatcccagcaatttgggaggccgaggtaggcggatcagctgagatcaggagttcaacaccagcctgaccaacatggagaaaccccgtatctactaaaaatacaaaattagccgggcgtggtggtgggtgcctgtaatctcaactactgggagcctgagacagaagaatcacttgaacctgggaggcagaggttgcggcgagacatgcatcctcagaaatggggtagagacctggcacggtcacttttttttttttttgagacagattctcgctctgtcgcccaggctggagtgcagtggcgcgatcttggctcactgcaacctcagcctcccgggttcacacccattctcttgcctcagcctcccaagtagctgggactacaggcacccgccaccacgcccagctaattttttgtatttttagtagagactgggtttcactgtgttagccaggatggtctcgatctcctgaccttgtgatccgcctgccccggcctcccaaagtgctgggatgacaggctaccacgcccagccctggcacggtcacattttaattatgtgcaggcatttagattgtccaaataaacgttgcaagatatctaggctgaagtgggaggatctcttgaagtcaggagttcaagaccagcctgggcaacatagtgagacaccccccccccaccccgatctctacaaagaattaaaaaattagtcaggcacattggctcatgcctgtcttcccagcactttgggaggccgaggtgggtggatcaccttaggtcaggagttggagaccagcctggccaacatggtgaaaccctgtctctactacaaatacaaaaattagccaggtgtggtggtgtgtgcctatagtcccagccactcgagaggctgaggcaggagaatcgcttgaacccaggaggcagaggttgcagtgagctgagatggtgccaccgcactccagcctgacgacagagcgagactccatctaaaaaaaaaaaaaaggggtctcactatgttgcccaggctggcctgctggcatcttgatgttgaacttccagcctccagaagtgtgagagaactggtttcttgagccacccagtttgcagaaattcgcacgacccccagaaatgaatgcaggacctgctcaatccataagacgattaatgagtgctaatgatgggtgagcatattggtttgggatcagttctacagctgatgagtcaagggctcgggggggcctgatgcagactattttagggctgcggaggggcgcccagaaagccagggaatcgccacacgctttgtgatcccctaatacggttaatgcaaatttctagagtgatccgtctttgtttgagtactgggcaggcagcagggagagtcaggcagcagctgtgagcgggtggctcttccccaccttgccagcaggctctgtgctccttgaagcaagcgctccagaggctccggaagccacggctggattggagacaagatgggatcctcagaggaccaggcctatcgcctccttaatgactacgccaacggcttcatggtgtcccaggtaggatacgctctgtgggacaagggggaatagacttccgttcatcacactcacgttccattgttgtgtcagtcgagaaaaatgatgagtctccatcattttaggaggtttattttccaccgtgaaagacgtacacccacgatgtagcctcaggagttcctgaggacatgtgcccagggtggtctggggacagcttggtttgatacattttacagagacatgagtcatcaatcaatgtatgtaagtacattgggccagtcgtggtggctcacacctgtgatcccagcactttgggaggctgaggcgggcggatcacctgaggtcgggagttcgagaccagcctgacccacacagagaaaccccatctctactaaaaatacaaaattagccaggcttggtggtacatgcctataatcccagctacttgggaggctgaggcaggagaatcgcttgaacctgggaggcggaggttgcagtgagccgagatcgcaccactgcactcccgcctgggggacacagcaagactctgtgtcaaaaaaaaaccaaacaaacaacaaaaaaaaagaaacaaagcttaagatgaaatacataggattagaaacaagacaatgtttattgaactgcaagtgttgaaatttttaaaacatttcatgatagagtagtatatgtggttgtttattaacccagtaaataattacactgtgcgtttatcatagaggtgagttttgagggttcacccgtagaggagcaacacctcattccttttttttatttttttgagctggagtctcactctgtaacccaggctggagtgcagtggcacggtcttggctcactgcaacctccgcctccagggttcaggctattctcctgcttcagcctcccgagtatctgggattacaggcacccaccaccacgcccggctaatttttgtatttttagtagagatggggtttcaccatgttggccaggctggtctcgaactcctgacctcaagtgattcacctgcctcggcctcccaaggcctcatttcttcttctcacagaataacatcgtgctcagtgaaggaaggctgacgtgaaaggccccatatggtatgacttcatttatatgaaatgtgcagagcaggcaaatccttcgaggtggaaagtggactggtggtttgcagaggctgggcaggactgcggagggagtgtttaacggagacagtgtccctttttggggtgatgcaaatgttctggaacccggcggaagtgctggctatacaacatcacgaatgtactaagtgcccctgaattatgcttgaaaagggttaatgatggccgggctcagcggtgacacctgtcatcccaacggtttgggggtccgaaacgagggaatcgctttagcccaggaattcgagaccagtctgggcaacatagtgagaccccccatttctacaaattcttttttctttttgagacagagtctcgctctgtcgcccaggctggagtgcaatggcacgatctcggctcactgcaagctccacctcccaggttcacgccattctcctgcctcagcctcccgagtagctgggattacaggcacccgccaccacgcccggctaattttttgtatttttagtagagacggggtttcaccgtgttagccaggatggtctcgatctcctgacctcatgatccgcccgcctcggcctcccaaagtgctgggattacaggcgtgagccactgtgcctggccaaaaatattttaaaaattagccaggtggggtggtgcacacctgtagtcccagctactcaggaggctgaggcgggaggatcgcttaagcctaggagatgaaggctgcagtgagctatgattgcaccactgcactccagcctggatgacagagcaatactgagtctctttaaaaaataaacggcagggcgcggtggctcatgcctgtcatcccagcactttttggggtccaaggtgggcggatcacttgaggtcaggagttcaagaccagcctggccaacatggtgaaaccccgtctctactagaagtataaaaattagccaggcatgatggtgggcacctgtcatcccatttactcgggaggctgaggcaggagaattgcttgaacccggaggaggtagaggttgcagtgagccgagattatgccactgcactccagcctgggtgtcgcagtgagactctgtctcagaacaaaaaccaaaaaccagcatcatcgtgaaagggggtcgtgtgctgacgatattttgagatgtctgcagcagctctcgtgtgacttgaaaatatctgtggtttctctccgtcagcaagccaccggttttttttgtttgtttttttcctttttttttttcagacagagtttccctcttgtcgcccaggctggagcgcagtggcgctatctcggctcactgcaacctctgcctcccgggttcaagcgattctcctgcctcagcctcccgagtagctgggagtacaggcgcgttccaacacgcccagataattttgtatttttagtagagatggggtttctctatgttggtcaggctggtctcgaactcccaacctcaggtgatcctcctggcccccacactttcttctatcatggctgtggtttgccagtacgctcatggttgaagggaacaccacatcttaggaagaggtagtgaaaattagagtgaagtctcttctccttcctggtttgtagagcccgtgaattttacctctaggcccccaagggttaaaaatacctattccccagccactgatacgcagagcggcctccgcctacggggttcaagcgattctcctgcctcagcctcctgagtacctgggattacaggtgcctgccaccaagcctggctaacttttatttttatttttatttttatttatttttctgatatggagtttcactgttgttgcccaggctggagtgcagtggcatgatctcagctcactgcaacctctccctcccaggttcaagcaattcccctgccttagcctcctgagtagctgggatttcaggcgtccaccaccacgcccggctaatttttgtatttttggcagagacggggtttcatcatgttggccaggctggtgtcgaactcctgacctcgggcgatctgcctgcctcggccttccaaagtgctaggattacaggtgtgagctactgcctctggctaattttttgtagttttggtagagatgaggtttcatcatgttggccaggctggtcttgaactcctgaccttgggcaatctgcctgcctcagcctcccaaagtgctaggatgacgggcgtgagccactgacatccagctaattttttgtatttttggtagagacggggtttcatcatgttgtccaggctggtctcgaactcctgacctcgggtgatctgcctgcctcagcctcccaaagtgctaggattataggcatgagccaacatgtctggctaatttttctattttttagtaaaggtgggatttctgttactgtcccagacaacagtaacttgctacctttgcctcctttgaccgcaggcctcctgctggggctattgactgctcattcaaagactgtcgctggttcacagcggtgttcagggaggtggtctggtgggttctaaatcttggaagagcagtcactttaaggcacatgataccatgtcatgggagttgtcagaagtttcacagaaccagagttaatgcagagttaataccaccttaagaggatcaaacttagtacacccttaacagaaacaattagctaatgcagctttcatagaccaagagtgaatatcgccttaagaagataacatttagtatacccttggccaggcacagtggctcacgcctgtaatcccagcactttgggaggccgaggcgggcggatcacaaggtcaggagttcgagaccagcctggccaatatggtgaaatcccatctctactaaaaatacaaaaattacctgggcgtggtggcgggcacctgtagtaccagctacttgggaggctgaggcacgagaatggcgtgaacccgggaggtggaggttgcagtgagccgagatcacgccactgcactccagccttgggggcagagcgggaccctgtctcaaaaaaaaaaaaaaaaagtgggggctggggagggagagcactaggacaaatacctaatgtaggtgacgggttgacaggtgcagcaaaccaccatggcacatgtatacctgtgcaacaaacctgcacgttctgcacatgtaccccagaacttaaagtataataataataataataataataataataataataataaaaagtctttgggagcagaaaaaaaaaaagatcaaagttagcgtacccttaacagaaacagttaatgcacctttcatagaccaagggtgaactcagccataagaaggtaacatttaatatatgcccttaaaagaacaattaattgagacaaccccaaaaggaatgaatacaactttaatgaataaaacaaaacagaacgctaatttaaaaaggttaatacgggccgggcgtggtggctcatgcctgtaatctgagcactttgggaggccgaggaaggtggatcaggaggtcaggagattgagaccatcctggctaacacggtgaaaccccgtctctactaaaaatattttaaaaattagccgggcgtggtggtgggcgcctgtagtttcagctactcgggagactgaggcaggagaatcccttgaacccgggaggcggagcttgctgtgagccgagatcgcaccactgcactccagcctgggtgacagagccagactccgtctcaaaataaataaataaataaataaataaaaaagaaaaaggttaatacaacattaaagaacaagaattaatatagctttttttttttttttttttttttgagacctagtctcactctgttgcccaggctggagggcagtggcatgatctcagctcactgcaacctccgcctcccgggttcaggcgattctcctgcctcagcctcccgaataggtgggattacaggcgtgcaccaccatgcctactttttgtatttttagtagagacggggtttcactatgttggccaggctggtgtcgaactcttgacctcaagtgatctgcctgccttggcctcccaaagtgctgggatgacaggtgtgagccactgcacctggcctaatatagctttaatagaaaaggagctaatacaagcttagaataataaactttatgcagacttactgaaacaaacagtcaatgcaaccttaaccaaacaggaattgataacagtttaataaaaaagctaataccacttgaatagaatatatcttactacaaccttcataagaaaaacaactaatacactttgggagaccgaggcaggcagatcacgaggtcaggagatcgagaccatggtgaaaccccgcctctactaaaaatacaaaaaaattagcctggcatggtggcgggcacctgtagtcccagctagtcgggaggctgaggcaggagaatggcttgaacctgggaggtggaggttgccgtgaggcgtgatcgtgccactgcactccagcctggcgacagagcgagactctgtctcaaaaaaataatgataataataataaacaaataaagataccaaaaaaaaaatacaaaaatttagccgggtgtggtggcacgtgcctgtaatcacagctactcgggaggctggggcaagagaatcacttgaacgcgggaggcgtaggttgccgtgagccgagattgcaccgctgcactccagcctgggtgacagagcgagactccgtctcaaaaaaaagaacaaacaaaaagatagtggtaggtgtaatctgtgtttctttccccatgctgttgaaataaagctaactgtaagtatcctggaagacacgtggcctgaagaaaccatctttccctgtggtttgtttatgacttcctgtcactaaggttgcctgagccttggcacccatccaaaacgatgtgtgcaagaaaagaaatgcatggatgatttattcttgttttattttttttttgagatggagtctcgctctgttgcccaggctggagtgcagtggcgcgatcttggctcactgcaatctccacctccaggattcaagcaattctcctgcctcaccctccccagtagctgggactacaggctcacaccaccatgcccagctaatttttatacttttagtagagatggggtttcaccatgttggccaggttagccctgaactcctgacctcaggtgatccgcccacctcggcctcccagaatgttgggattacaggcgtgagctaccacgcctggctgatttattcattttttatagtttgtgtattatttgaaggcattacctgattactgctttattttatttttatatgtatttatttatttatctattgagacggagtttcgctcttgttgcccaggctggagtgcaatggcacgatctcggctcaccacaacctctgcctcccgggtgcaagtgattctcctgcctcagcctcccgagtagctgggattacaggcatgcaccaccacaccaggctaattttgtatttttagtagagatggggtttctgcacgttggtcaggctggtcacgaactcacaacctcagttgctccacctgcctcggcctcccaaagtgctgggatgacaggcgtgagccaccgcacccggcctatttattttttttgagacggagtctcactctgtccagcccaggctggagtgcagtgatgcgatcttggctcactgcaacctctgcctcccgggtttacgccattctcctgcctcagcctcccgagtagctgggatacaggtgcgcaccaccatgcctggctaatttttgtatttttagtagagacggagtttcaccatgttggccaggctggtctcgaacccctgacctcaagtgatctaccctcctaggcctcccaaagtgctgggattacaggcgtgagccaccacgcccggtcctctgtctctgtttttgagacagagtcttactctgtcacccaggcttggagtgcagtggtgagatctcggctcactgcaacctccgcttagcaggttcaagcgattctcctgcctcagcctcccaagtagttgggattacaggcatgagccaccacgcccggctaatttttgtatttttagtagagatggggtttcaccatgttggccaggctggtctcaaactcctgacctcaggtgatccacccacctcccaaagcgcagggattataggtatgagttaaagcacccagccaggagacatttttaaatgaggttgcacggctatggaaaacagggtggggccaggcgcaatggctcacgcctgtcatcccagcactttgggaggccgaggctggcagatcacgaggtcagaagttcgagaccagcctggccaacatggtgaaaccccatctttactaaaaacacaaaaattagacaggcatggtggaacaggcctgtaatcccagctactcgggaggctgaggcaggagaatggtgtgaagccgggaggcagaggttgcagtgagccgagaccgcaccactgccctccagcctgggtgatacagtgagacttcaactcaaaataaataaattaattaattaataaaaataaataaataaatatgactgttttccatagtggtgcaatctcatttgactctgtctcaaaaaaaaaaataaataaatgaataagaatataaataaaacaatgctttcctccctagcctgccatggtatggggtgtttctaagactgtggttcccaggaggctgagccctgaccttttatttccgctcctgctccaaggttctcttcgccgcctgcgagctgggcgtgtttgaccttctcgccgaggccccagggcccctggacgtggcggcagtggctgcaggtgtgagggccagcgcccatgggacagagctcctgctggacatctgtgtgtccctgaagctgctgaaagtggagacgaggggaggaaaaggtgaggacacgggcgttttgaaggaggcattttacatagacaccctctgcagcccacgtgttctgtaaaaagtgaaacagtctccatcctggctcacacagtgaaaccccgtctctactaaaaaaaatacaaaaaattagccgggtgtggtggcgtgcacctgtcatcccagctactcaggaggctgaggcaggagaatggcatgaacccgggaggcagaggttgcagtgagccgagatcgtgccactgcactccagtctgggcgacagagcgagactccatctgtatttgcaggtttgggggtcgtgtggtttttgtggcagctaccgacctctgccctggggacgtcaaagctgccagagtgtgagacccaggctgggggattccttgagcccaggagttcgagaccagcctgggccacgtatttttaatagagacaggatttcatcacgttggccaggctggtctcgagctcctgacctcaggtgatccaccagcctgggccacttatttttagtagagacaggatttcgtcacgttggccaggccggtctcgagctcctgacctcaggtgatccacccgcctcggcctccctaagcgctgagattacaggtgtgagccaccacgcccggcctcaataagttattttagacattctgtggaatgtaacgtacgtttcctctcgtggctcatctgcctttgtacttgctgcacccaaactcccgatggggatttgtacaaaccgaacccgacgggggtgctagccgccccaggtcacctttgcgccttccacagaaggctccagctgtacaaggcaagaggaagaccccatctctaaagaagagatgggcttgtaatcatgttgaaatcacgatgttgtcgagctggggagcgtccgccggcaggaactcggaatctcactgctttttccctgtttttttgtgtgtgtttcagctttctatcgaaacacagagctgtccagcgactacctgaccacggtcagcccgacgtcacaatgcagcatgctgaagtacatgggcaggaccagctaccggtgctggggccacctggcagacgccgtgaggtgggggctgcccccaggcagatgctgggaggtggtggctgcacccaggcagatgctgggaggtgggggctgcccccaggcagatgctgggaggtggtggctgaccccaggcagatgctgggaggtgggggctgaccccaggcagatgctgggaggtgggggctgcacccaggcagatgctgggaggtgggggctgcccccaggcagatgctgggaggtggtggctgcacccaggcagatgctgggaggtgggggctgcccccaggcagatgctgggaggtggtggctgaccacaggcagatgctgggaggtgggggctgaccccaggcagatgctgggaggtggtggctgaccacaggcagatgctgggaggtgggggctgaccccaggcagatgctgggaggtgggggctgcacccaggcagatgctgggaggtgggggctgcacccaggcagatgctgggaggtgggggctgcacccaggcagatgctgggaggtgggggctgaccccaggcagatgctgggaggtgggcgctgcacccaggcagatgctgggaggtgggggctgaccccaggcagatgctgggaggtgggggctgcatccaggcagtgaccaagtctcaggactaccgccaggggctggtgaagtggcagtggaggaggtgaaagggaaggtttctttttctttgttttttcttttcttttctttcttttttttttttttgagatggagtcttgctctgtcacccagggtggagcgcagtggcgccatctcggctcattgcaagctatgcctcccgggttcacgccattctcctgcctcagcctcccaagtagctgggactacaggaacccgccaccacacccgactaattttttgtgtttttggtagagacggggtttcaccatgttagccaggatggtctccatctcctgacctcgtgatctgcctgcctacatggtggcaggcacctgtagtcccagctactcaggaggctaaggtgggagaactgcttgaacccagaaggcagaggctgcaatgagctgattgtgccactgcactgcagcctgggcaacagagcaaaaactctgtctcagaaagaaggaaacagaaagagagagagaggggagaaggaaggaaggaagggagggagggagggagggagggagggaaagaagggaaataatggaaagtaagagaaagaaagagaaggaaggaaagaaagagagagagagagagaagacctggactcaatagaaaggagtgtctgggtggccggacgcagtagcccatgccggtaatcccagcactttgggaggctgaggcgggcggatcacgaggtcaggagatcgagaccatcctggctaacacggtgaaaccccgtctctattaaaaatacaaaaaattagccgggcgtggtggcgggcgcctgtagtcccagctactcggagaggctgaggcaggaaaatggtgtgaacccgggaggcggaggttgcagtgagccaagatcgcaccactgcactccagcctgggcgacagagcgagactccatctcaaaaaaaaaaaaaaaaaaataggggtgtctgggttaacatagggggttgtggagaccaaattcttattatgtagatgaaatctccaggtagcaggcttcagaaagaatagactgttactgtttcctatctgacttggttctctcctggatcagaaaaaaggaaggaaaaggaaggtgattctctccagaacgtagattttctccacaacaggtagctttacaggagtatttcaagctatggtaaagagaacatgtttggggctaaaatatttttatttccttttttttttttttttttgagacagagttttgttttgttgcccaggctggagtgcagtggtatgatctcgactcactgcaacctccgcctcctgggtttaagtgattcacctgcctcagcctccccagtagctgggagtataggcatccaccacacctggctgattgtttgtgttttagtagagacggggtttcaccctgtctttgaggctggtctccaactcctgagctcaggctatctgcccccgtcttggcctcccagagtgttaggattataggtgtgagccaccacgcccagcctttgattttcttctttatctgtgatgggttgttatgccagagtcaggttggaaagtgagccacgtaatatagggttaaataaaacccatctcacgagactttatagttatagagcataactccctaggccccttagataagaatttgggcaaggaagaaaaaggtcacgtgtaacaattaagtcctcaggtttaaacaattaagcaacagctggccaggcgcggtggctcacgcctgtaatcccagcactttgagaggccgaggcgggtggatcacctgaggtcacgagttcgagaccagcctgaccaacatagtgaaaccccatctctactaaaaaatacaaaaatgagccaggcatggtggcgggtgcctgtcatcccagctactcgggaggttgaggcaggagaatcgcttgaaccgaggaggtggagattgcagtgagccaagatcgcgccattgcactccagcctgggcgacacagcgagactccgtctcataaaataaaataaggccaggtgcggtggctcacgcctgtaatcccagcactttgggaggccaaggcgggcagatcacctgaggtcaggagttcgagaccagcctgaccaacatgatgaaaccccatctgtactaaaaagtacaaaaattagccaggcacggtggcaggtgcctgtaatcccagctactcgggaggctgaggtaggaaaatcgcttgaacccgggaggcggagattacagtgagccaagatcgtgccattgcactccagcctgggcgacacagcgagactccatctcctaaaataaaataaggccaggtgtggtggctcacacctgtaaccccaccactttgggaggccgaggcgggtggatcacctgaggtcacgagtttgagaccagcctgaccaacatggtgaaacctgtctccactaaaaatacaaaaattagctgggcgtggtggcgggcgcctatagtcccagctactcgggaggctgaggcaggagaatggcgtgaacccagaaggcagaggttgcagtgagccgagatcgtgccattgcactccagcctgggctacagagctgaaatgaaatgaaacgaaatgaaacgaaatgaaatgaaatgaaatgaaatgaaatgaaatgaaatgaaaatcagccttctctctcttttcttagagaaggaaggaaccagtacctggagacgtttggcgttcccgctgaagagctttttacggccatctacaggtaacacccatcactttgaaaccaacaactcagataagattctgtttatttttaaaggacttaggaaacccaatccatttactcaaatggcacaacccaggaggaagctgccatttaatttaaaataacatcccctatccccactactaccccagattttgctcatctgatgtttaaattgatcaaattcctgaggaggtgcaacgtgacccttccttcgaaaggactactcacaaactcagtgtttatgtagaaaatggaggcacgcgccgggcgcggtggctcacgcctgtcatcccagaactttgggaggccgaggcaggtggatcacctgaggtcaggagttcgagaccagcctggccaacagggtgaaaccccgtctctactaaaaatacaaaaattagccgggcgtggtggcggacgcctgtaatcccagctagtcgggaggctgaggcaggagaactgcttgaacccgggaggcggaggttgcggtgatctgagatcgcaccactgcactccagcctgggcaacaagagtgaaactccatctcaaaaaagaaaagaaaagaatatagaggcccagtttttgatttggtcagaggtgaaggtgaggccaggtgagacctcagctcttcactttgctttgcgatgtggacacagctttggcctttgcccgaagctcttacctagaattcccagatggaggtgaattgatgggcccgtccagtgttccagctggctgaggcatggagtagggaagggtatgaaggacaaggggatgcctgagtggttcgcctgccccccaacctctcctctcctcccctgctctcccctcccctctcttctccttctgtcctgttccctctcttttcctcttccatcctcctctctttctctccttttccttctcttctcttctctcctctcttttcctctccatcttccccctcctctctcccatcttccctctcttgtctcctctctcttcttccctctctcctttcctctcgcctcccttcccctcccttcacctgcctctctccttctcctctcccgtcttctttctctcatcttctctgttttcatgccccgtatttcacctccttttctcctcctctcttctcctcggtctgctttcctttcccccgtttctctctttctttctctctctctttctttctttccttctttctttccttctttctccttccttccttcgttccttcctctttccttctgcctgccttccttccttccctccctccctcctttctttctttttctttcttccttcttccttctttcctttctttatatatatatatatgtgtgtatacatgtgtatgtgtatgtgaatatatgtatctgtttagggggcacaagtacccatgtcttccatgcttacatgttgcaccttgcagcctaggcttttagtgtgcccatcacctgaatagtgaccgtggtacctaagaggcaatttttcagccctcgctactctgaggcaaacccctacagcaggctctgcagagaggacaggaggagagagggagctgtggggggggaggagcaggaaatgcttccaacaccagagccctgtccgcctctgtgtccacctatccttcttggctccatctcacctgcctcccttcctagttcctgccttttctctagcctcttccccaggatgtgtggacctcccacccgcttcctggatttgtcctctggggctgagctctgtggatgggggaacgtattattgactttcctcttagaaaacatctaaactcctcttcagatagaaatcccttcccatccagagaacaatcgtccgttctgaatcaactccaggtttcccggagctgggtacactttgctggctgacctatggttcccccatcccgaatgacttcctgttccatttcacaaatgcaagccttccaggtgcacctgtggggtatagctccgttctcaacagggggttatgtacacccttgctctgggcacgtccccagatcctcaccatcttgacaagcgtggttttgcatgccaggtccgagggcgagcggctacagttcatgcaagctctgcaggaggtctggagcgtcaacgggagaagcgtgctgaccgcctttgacctgtcagtgttcccacttatgtgtgaccttggtggtaagtacccctcaccactaatacctcggaggtgtggcttctgttctgtatggggaatgtgttattcatgtcttttattttctgcattctgatgctttgacatgtgcggccttactggtcttagaggaatcattcctcccagcactgggcacttcctagagtcagcaaacatctcctctgcgagcacacgtttctttttcttttctttttttaagatggaagcttgctccatcgcccaggctgcagtgcagtggcatgatctcggctcactgcaacctttgcctcctgggttcaagcgattctcctgcctcagcctcccgagtagctgggattacaggcacctgccaccacaccaggctaatttttttttttttttttttttttgagatgaagtgtcgctctgtcgcccaggctggagtgcagtggcacgatctcggctcaccgcaacctccgcctcctgggttcaagcgattctcctgccccagcctcccgagtaggtgggattatgggtgcgcaccactctgtcaggctaatttttgtattttttaatagagacggggttttgccatgttggccaggctggtctcgaactcctgacctcatgatccacccgcctcggtcttgtttttagtttttgagagagggtcctgtttgtcacccaggctcgagtgcaatggtgtgttgatagctcactgcagcctcagactctcaggctcaagtggtcctcccacctcagcctcccaagtagctgggattacagatgactgccgccacacctagctcatttaaaaacttttctgtagagcctgagtctctctacgttgccctggctggtctcagactcctgggctcatgcaatcctgctgcctcagcctccaaaagtgctgggattacaggcgcccgccaccacacccaggctgagctgagcttgttttatttatttatttatttatttatttacttgtatttatttatttatttttttttttgagatggagtcttgctctgtcacccaggctggaatgcagtggtgcaatctccactcactgcaagctctgcctcccgggttcacgccattctcctgcctcagcctcctgagtagctgggactacaggcgcccgccaccacgcccagctaattttttgtttttttttttagtagagacggggtttctccgtgttagccaggatggtctcgatctcctgacctcgtgatccacccgcctccgcctcccaaagtgccaggattgcaggcatgagccactgcgccgagctcattttcaaacttttttgtagagaacgagtctccctatgttgccctggctggtctcagactccagtttcatgcagtcctcctgcctcggcctcccagagtgagtgatgggattacaggcatgagccactgcacccaggctgagcttgctttttgaatacaaatccccaaccccgagctcaccccttaagcacctcctctaccccatagggctgtcacactccaggccgtgatccacccaccctatctccctcctgtgactcagtggatcactcagaacagctcctggctggtagaaggccctttgcagagtgaggagcttctccaagtttattacttttagtcactgtgagcagggatagatagagttcaggatccccctgcctggggagcagcttgggaagaaaataatgaacaagcagaccgggcgcggtggctcactcctgtaatcccagcactttgggaggccgaggcgggtggatctcctgaggtcaggagttcgagatcagcctggtcaacatggtgaaatcccgtctctactaaaaatacaaaaaaaggctgggtgcggtggctcatgcctgtaatcccagcactttgggaggctgaggcgggcggatcccaaggtcaggagtttgagaccagcctgaccaacggggtgaaacccggtctctactaaaaatacaaaaacttagccaggcatgacagtaggtgcctgtcatcccaggtactcaggaggctgaggcaggagaatcgcttgtacccgggaagtgaaggttgcagtgagctgagatcgcgccactgcactccagcctggtgacagagtgagactccatctcaaaataaataaaaagactgactttctacagaaataatggacaaggagcatggggctggaagtctctgtggcccatgatggattttgtgtgcacgacttaccggggcctctgaatggggcttgttattacatccttctcttagctgttggccgcccttggctggacaggtgcgccggcttcaagaacacacagttaagtgcgtggccatatggaagtttggagcttgggtcagcccagccagaaagaccacctgaactcaggggcctgtagacaatcacgtcaccgtcaagattagacatggtggataaaaaaggatgagttcggccgggcgcggtggctcacgcctgtcatcccagcactttgggaggccgagatgggcggatcacgaggtcaggagatcgagaccatcctggctaacacggagaaaccctgtctctactaaaaatacaataaaaaaattagctgggcgtggtggcgggcgcctgtagtcccagctactggggaggctgaggcaggagaatggcgtgaacccgggaggcagagcttgcagtgagcggaaatcgtgccactgcactccagcctgggcgacagagccagactctgtctcaaaaataaataaattaataaataaaaggatgcgttcatgtcctttgcagggacatggataaagctggaaaccatcattctcagcaaactatcgcaaggacagaaaaccaaacaccgcgtgttctcactcataggtgggaactgaacaatgagaccacatggacacagggaggggaacgtcacacactggggcctgtcagggcctggggggctgggaggctgggggagggagagcactaggacaaatacctaatgtaaatgacgagtcgatgggtgcagcaaaccaccatggcacatggatacctatgtaacaaaaccgcatgttctgcacatgtaccctagaacttaaagtataataaaaagaaaaaaaagaccagacatggcggaaggacccaagttcctgggttggacccttcatgagtccatggtgtgtggagggtgagcgatgtctctcaggttcatctctgagggtcaaacgggctgtgtccccttccaggtggggctggagctctggctaaggaatgcatgtctctgtaccctggatgtaagatcaccgtttttgacatcccagaagtggtgtggacggcaaagcagcacttctcattccaggaggaagaacagattgacttccaggaaggtgtgtttgtgtccgtggggaagcagagatgtgtctcacggcttctccagggggactggatgtttctgggaaatgaagaagatgtgatgtggttttcctctcactcccggaaacaccctcaactcaacactgtctgttattcatgatggatggaaagctgggtgtagatatacagttttcttacaattattattattattattgatacagagtcttgctttgtcgcccaggctggagtgcagtggtgcagtctcggctcactgcaacctccacctcctgggttcaagcaattctcctgcctcagcctcccaagtagctgggattacaggcatgcgccaccacatccagctaatttttttttttttttgagatggagtctcactctcttgcccgggctggagtgtggtgacagatctcggctcccttcaagctccgcctcccgggttcacaccattctcctgcctcagcctcccaagtagctgggactacaggcacccaccaccacacctggctaatcttttatatttttagtagaggtggagtttcactgtgttagccaggatggtctcgatctcctgaccgcgtgatccgcccaccttggcctcccaaagtgctgggattacaggtgtgaaccatcacacccggcctctttttgtatttttagtagagatggggtttcaccgtgttgaccaggctggtctcaaactcctgacctcaggagatccacccgcctcggcctcccaaagtgctgggattacaggcgtgagccaccgcacccagccagtcatatcatttctgcagtgaagggtgtggccagggtctccacgactaccttcaggttcaataattcactagaaggacacaccgagctcagaagagccatcatacacatagttatatttacaacaatgaaagaatacagatgcatatcagcgaaggagaaaggagcatgggatagagttcgggagaaaccacatgtgagcttcttgttgtcttctcccagtggagctgtggacagcaatcaattcccccaacaacaaggtttgacaacacacaccactcactgccagcctggagagcctccgcaatccctgacatccaaggattttcttggagactggttacatagacatggcagacaccctgcatggctgactccaatcttcacctcttccagagttcccaaggtgatcctatagtaaatcccactgttagtacaaactatcctgggtggcccagagacccagctgaacaaagatacccttgtgaggtaggacattcttagagattacagttgccaattaagtgccaatcctctctttagaatgtggagggtttggacaacacaggcctgctgagttaaccccccccctttttttttcttgtttttttgagacggagtctcactctgtcacccaggctggagtgcagtggcgtgatccaagctcactgcaacctctgcctcccaggttcaagcaattttttgcctcagcctcctaagtagctgagattttacaggtgcctatcaccatgcctggctaattttttgtatttttagtagagacagggtttcactatctcggccaggctggttttgaattcctgacctcgtgatccacctgcctcggcctcccaaagtgctggggattacaggagtgagccaccgcgcctggcctgagttaactcttttttttttttttttgagatggagtctcgctctgtcacccaggctggagtgcagtggtgggatctcggctcactgcaagctccacctcccgggttcacaccattctcctgcctcagcctcccgagtagctgggactacaggcgcccaccaccacgcccagctaattttttttttttttttgtatttttggtagagatggggtttcaccgtgttagccaggatggtctcaatctcctgatctcgtgatctgccccgctcagactcccaaagtgctgggattacaggcgtgagccaccgcgcctggcctgaattaactcttcactgcacagagctcaccaagatctctcccaagattggcaccttatcattttgcgggaaaactatgacaagacttgagcgtttcacatcgcacacacataaagggtcagtcttgcgtatttactttaaatctggagaacaggtcttgactgtaggttcagttcagctcatcagttaggagctgctgaccgaattcccagggactcctggaatccacggctttgggtgatatcagcagcagtgcttttgcaggggacatcagaaagaaagaaagaaagaacatgggccgggcacagcagctcatgcctgtaatcccagcactttgggaggccgaggcgggcggatcacctcaggttgggggttcgagaccagcctcagcaacatggagaaatcccatctctactaaaaatacaaaaattagccgggcgtggtggcgggtgcctgtaatcccagctactcaggaggctgaggcaggagaatcgcttgaaaccaggaggtggaggttgcggtgagctgagatcaggcccttgcactccagcctgggcaacaagagcaaaactccatctcaaacaaacaaacaaacaaaaaaacaaaaaagaaaccatattatgatttttttttaaaggaggaggagagaaagaggccacacttattcagtattttctttctttttttttttttggagacagtctcgctgtcgcccaggctggagtgcaatggtgcaatctcggctcactgcaagctccgcctcccgggttcatgccattctcctgcctcagcctcccgagtagctgggaccacaggcacccgccatcacgcccggctaattttttttgtatttttagtagagacagggtttcaccgtgttagccaggatggtcttgatctcctgacctcgtgatctgcccacctccgcctcccaaagtgctaggattacaggcgtgagccaccgcgcccgacctcagtattttcttatctttctcctaagcctttttgttttctgaggctaggtctgcaggtgactagcctggaagacctgggaaaggcgtgacccatccaggtgaccttttgtgcccagaataggtttagtcaaatgggattggattgcaggctgacctcggtgtgcctgccctgtgttccaggggatttcttcaaagaccctcttccggaagctgatctgtacatcctggccagggtcctccatgactgggcagacggaaagtgctcacacctgctggagaggatctaccacacttgcaagccaggtaagttgtggggtttgcatttcagcgtgtgcttgtgacacggggcagaattgtacgagtcacatttagaaggcaggcactgaaatcatcccacaggtaagggtagacatcctgcccaatatggctttccttttagataacgacctgaaataaatagggtcctaatttctattctattgataaaaccacataaagatggaaaaagtgaaaggccctctgaaacttcagtggcctcactttggtgaaattctttcagaattaggctagtatttgtgtgtgtgatgaggacagtgccccactgacttctgaggtccacccatcctgatggttcatgaggatgtgggcacagcctctgtgtgtgatggggacagtgtcccagctctcctgtgaggtccatccatcctgatggcacatgaggatgtgggcacagcctctgtgtgtgatggggacagtgtcccagctctcctgtgaggtccatccatcctgatggcacatgaggatgtgggcacagcctctgtgtgtgagataaggactgtgtcccagctctcctgtgaggtccacccatcctgatgcttcacgaggacgtgggcacagcctctgtgtatgatggggacagtgtcccagtgtcctgtgaggtccatccatcctgatggcacatgaggatgtggacacagcctctgtgtgtgtgatggggacagtgtcccagtgtcctgtgagatccatccctcctgatggttcatgaggatgtgggcacagcctctgtgtatgatggggacagtgtcccagtgtcctgtgagatccatccctcctgatgcttcacgaggacgtgggcacagcctctgtgtatgatggggacagtgtcccagtgtcctgtgaggtccacccatcctgatggcacatgaggatgtgggcacagcctctgtgtgtgagatagggaccatgtcccagctctcctgtgaggtccatccatcctgatgatccatgaggatgtggacacagcctctgtgtgtgtgatggggacagtgtcccagtgtcctgtgagatccatccctcctgatggttcatgaggatgtgggcacagcctctgtgtgtgagatagggaccatgtcccagctctcctgtgaggtccatccatcctgatgatccatgaggatgtggacacagcctctgtgtgtgtgatggggacagtgtcccagtgtcctgtgagatccatccctcctgatggttcatgaggatgtgggcacagcctctgtgtgtgagatagggaccatgtcccagctctcctgtgaggtccatccatcctgatggcacatgaggatgtgggcacagcctctgtgtgtgagatagggaccatgtcccagctctcctgtgaggtccatccatcctgatgatccatgaggatgtggacacagcctctgtgtgtgtgatggggacagtgtcccagtgtcctgtgagatccatccctcctgatggttcatgaggatgtgggcacagcctctgtgtgtgagatagggaccatgtcccagctctcctgtgaggtccatccatcctgatggcacatgaggatgtgggcacagcctctgtgtgtgagatagggaccatgtcccagctctcctgtgaggtccatccatcctgatgatccatgaggatgtggacacagcctctgtgtgtgtgatggggacagtgtcccagtgtcctgtgagatccatccctcctgatggttcatgaggatgtgggcacagcctctgtgtgtgagatagggaccatgtcccagctctcctgtgaggtccatccatcctgatgatccatgaggatgtggacacagcctctgtgtgtgtgatggggacagtgtcccagtgtcctgtgagatccatccctcctgatggttcatgaggatgtgggcacagcctctgtgtgtgagatagggaccatgtcccagctctcctgtgaggtccatccatcctgatggcacatgaggatgtgggcacagcctctgtgtgtgagatagggaccatgtcccagctctcctgtgaggtccacccatcctgatgcttcacgaggacgtgggcacagcctctgtgtatgatggggacagtgtcccagtgtcctgtgaggtccatccatcctgatggcacatgaggatgtggacacagcctctgtgtgtgtgatggggacagtgtcccagtgtcctgtgagatccatccctcctgatggttcatgaggatgtgggcacagcctctgtgtgtgagatagggaccatgtcccagctctcctgtgaggtccacccatcctgatgatccatgaggatgtggacacagcctctgtgtgtgtgatggggacagtgtcccagtgtcctgtgagatccatccatcctgatggcacatgaggatgtgggcacagcctctgtgtgtgagatagggaccatgtcccagctctcctgtgaggtccatccatcctgatgatccatgaggatgtggacacagcctctgtgtgtgtgatggggacagtgtcccagtgtcctgtgagatccatccctcctgatggttcatgaggatgtgggcacagcctctgtgtgtgagatagggaccatgtcccagctctcctgtgaggtccacccatcctgatgatccatgaggatgtggacacagcctctgtgtgtgtgatggggacagtgtcccagtgtcctgtgagatccatccatcctgatggttcatgaggatgtgggcacagcctctgtgtgtgagatagggaccatgtcccagctctcctgtgaggtccatccatcctgatggcacatgaggatgtgggcacagcctctgtgtgtgagataaggactgtgtcccagctctcctgtgaggtccacccatcctgatgcttcacgaggacgtgggcacagcctctgtgtatgatggggacagtgtcccagtgtcctgtgaggtccatccatcctgatggcacatgaggatgtggacacagcctctgtgtgtgtgatggggacagtgtcccagtgtcctgtgagatccatccctcctgatggttcatgaggatgtgggcacagcctctgtgtgtgagatagggaccatgtcccagctctcctgtgaggtccacccatcctgatgatccatgaggatgtggacacagcctctgtgtgtgtgatggggacagtgtcccagtgtcctgtgagatccatccatcctgatggcacatgaggatgtgggcacagcctctgtgtgtgagatagggaccatgtcccagctctcctgtgaggtccatccatcctgatgatccatgaggatgtggacacagcctctgtgtgtgtgatggggacagtgtcccagtgtcctgtgagatccatccctcctgatggttcatgaggatgtgggcacagcctctgtgtgtgagatagggaccatgtcccagctctcctgtgaggtccacccatcctgatgatccatgaggatgtggacacagcctctgtgtgtgtgatggggacagtgtcccagtgtcctgtgagatccatccatcctgatggcacatgaggatgtgggcacagcctctgtgtgtgagatagggaccatgtcccagctctcctgtgaggtccacccatcctgatgatccatgaggatgtggacacagcctctgtgtgtgtgatggggacagtgtcccagtgtcctgtgaggtccatccctcctgatggttcatgaggatgtgggcacagcctctgtgtgtgagatagggaccatgtcccagctctcctgtgaggtccacccatcctgatgatccatgaggatgtggacacagcctctgtgtgtgtgatggggacagtgtcccagtgtcctgtgagatccatccctcctgatggttcatgaggatgtgggcacagcctctgtgtgtgagatagggaccatgtcccagctctcctgtgaggtccacccatcctgatgcttcatgaggacgtgggcacagcctctgtgtatgatggggacagtgtcccagtgtcctgtgagatccatccatcctgatggcacatgaggatgtgggcacagcctctgtgtgtgagatagggaccatgtcccagctctcctgtgaggtccatccatcctgatgatccatgaggatgtggacacagcctctgtgtgtgtgatggggacagtgtcccagtgtcctgtgagatccatccctcctgatggttcatgaggatgtgggcacagcctctgtgtgtgagatagggaccatgtcccagctctcctgtgaggtccacccatcctgatgatccatgaggatgtggacacagcctctgtgtgtgtgatggggacagtgtcccagtgtcctgtgagatccatccatcctgatggcacatgaggatgtgggcacagcctctgtgtgtgagatagggaccatgtcccagctctcctgtgaggtccacccatcctgatgatccatgaggatgtggacacagcctctgtgtgtgtgatggggacagtgtcccagtgtcctgtgaggtccatccctcctgatggttcatgaggatgtgggcacagcctctgtgtgtgagatagggaccatgtcccagctctcctgtgaggtccacccatcctgatgatccatgaggatgtggacacagcctctgtgtgtgtgatggggacagtgtcccagtgtcctgtgagatccatccctcctgatggttcatgaggatgtgggcacagcctctgtgtgtgagatagggaccatgtcccagctctcctgtgaggtccacccatcctgatgatccattaggatgtggacacagcctctgtgtgtgtgatagggaccatgtcccagtgtcctgtgaggtccacctatcctgatggtccatgaggatgtggacacagccgctctgtgtgtgatggggacagtgtcccagctctcctgtgaggtccatccatcctgatggttcatggggacgtgagcacagcctctgtgtgtgtgttggggacagtgtcccagttctcctgtgaggtccacccatcctgatggttcatgaggatgtgggcacagcctctgtgtgtgtgatggggacagtgtcccagtgtcctgtgaggtccacccatcctggtggtccatgagtacatggacacagcctctctgtgtgagatggggacagtgtcccagttctcctgtgaggtccacccatcctggtggtccatgagtacatggacacagcctctctgtgtgtgataaggacagtgttccagctctcctgtgaggtccacccatcttgatggttcatgaggacttgggcatggcctctatgtgtgtgatggggacagtgtcccagtgtcctgtgaggtccacccatcctgatggtccatgaggatgtgggcacaacctctttgtgtgtgatggggacagtgtcccagtgtctgtgaggtccacccatccgatggttcatgaggacgtgggcacagcctctgtgtgtaatggggatagcatcccagtgtcctgtgaggtccatccatcctgatggcccatgaggatgtgggcacagcctctgtgtgtgtgtgtgtgatggggacggtgtcccagttctcctgtgaggtccacccatcctgatggtccatgaggacatgggcacagcctctctgtgtgtgataaggacagtgttccagctctcctgtgaggtccacccatcttgatggttcatgaggacttgggcacagcctctgtgtgtgtgatggggacagtgtcccagtgtcctgtgaggtccatacatcctgatggtccatgaggacatgggcacaacctctgtgtgtataatggggacagtgtcccagtgtcctgtgaggtccacccatcctgatggttcatgaggacgtgggctcagcctctgtgtgtaatgaggacagtgtcccagtgtcctgagaggtccatcgatcctgatggcccatgaggatgtgggcacagcctctgtgtgtgtgtgatggggacggtgtcccagttctcctgtgaggtccatccatcctgatggttcatgaggacatgggcacagcctctatgtgtgtgatggggacagtgtcccagcgtcctgtgaggttcacccatcctgatgatcgatgaggacgtgggcacagcctctgagtgtgtgatggggacggtgccctgactgtcctctgaggtctggctgtccttatggttcactgggactttggcacagtctgtctgtgtgtttgtgtgtgatgtggactgtgcccctccctttctaggtggtggcattctggtaattgaaagcctcctggatgaagacaggcgaggtcctctgctcacgcagctctactctctgaacatgcttgtgcagacggaagggcaggagaggacccccacccactaccacatgctcctctcttctgctggcttcagagacttccagtttaagaaaacaggagccatttatgatgccattttagccaggaaataactgtttcttgtgacctggaactaacgtcaaagcacacaagacataataataaagacatgtacctcca

SEQ ID NO: 299 - DNA, 47627 bp, Homo sapiens; identical to SEQ ID NO: 298
  source 1..47627: mol_type = genomic DNA; note = NC_000024.10:1595455-1643081 ASMT [organism=Homo sapiens] [GeneID=438] [chromosome=X,Y]

SEQ ID NO: 300 - DNA, 156543 bp, Homo sapiens
  source 1..156543: mol_type = genomic DNA; note = NC_000001.11:162630863-162787405 DDR2 [organism=Homo sapiens] [GeneID=4921] [chromosome=1]
gagtcaccctcaggcctgacttcagatgctgtaagttatttgaagagtcttcttaataagttgatctctgcagtgtcttttctcttcataaactaaccctagttctagttttttctctaaggtcttgcttgctgcctttaatcatttccatggctgccctctgaaccattcccatgttctccgtgtccttttctgtaacagctgtgaggcacagatgttaacggctgctttctgaccctcagactggtgctgagcttatgagacttttagggacttaacactgactcaacactagctctcagtttcatggccaccctcattgtgtgtgtgtgtgtgtgtgtgtgtgtgtgtgtgtgtgtgtgtgcgcttttccattccccttatgaaacatctcctgcccctaacttactatgggaacgttcctccatgatctctttccatcctccctttcctgtttgctcacttcttttcttgctcatcttggagactgtgcaatcccagattaactacaaacagagaagagctggtgatagctccagagctcagagaaaggaggtctctttacaagaagtctggctctcaaaggtaagctcggtcttcttgacctgccttttgccatctacctctctctttggatctcctgcccctgggtccctgcttgccctgcattctccatactcacggagaatcaggacctccagaacagcccagcgtgggcttggtcaggaatgatccaggctctgaagggttaaggctggagcctggatggatggagagggttattagttatcgtttggagagtggagtgaaggctcctcccctgttgcctacccgcccctttcacatgatctctgactatagctgtggaagcggggagaagataaaggagggaaaaaaaagttcacaaaataatttagaaagtccttataaatgcttgtgttttcatttagcagcatgaatccaggacagcaacagaccctcagaggcagcagccaactgggaattgagtggaaaaaaataggaatcctggattctggcagtttccagttgttttcttggtggggggagccgtggtgggaagggattaaatcaaatctttcgggggagagctcagctctaggctttcatggtcaaaatactaaaggtcagctccgcgtgtgtgccccaactgtcctggaagcttcaattggaaaactccaaactttaagttttgcttatagcttcagctcaagtaagaaaaatgaggtgtggggtaggcggcgggggggtggggatcacaggaaggggatcaagtcttagatggaggggaaggaagtggagatggatatgggtgggaataaggcagaagggagcggtgtctttaagtctgtcctatggttatacatattttttcttctatgaatgggttttgctgtaaattatagctttgcccatagtcccttgggtcaaaagaaatagtctccaaacagaaaacagctctgattggtgactttccttcttccctccccaacccccttcctaattgaaaccaaatgtgcaatatattggatgctgggatccctggcgctttcccaggaatcctcagaatgtgaggtttctctcaaaggcatcttgcatcagcctgtggatgtatgcctaccaccgggctccttcaccagcaaagtggaaaaagaagcgtttcacaacaaattcttctttttgggttggggaaacgcagtggattatagctctgttttcttctttccaaaactgtgcacccctggatgaaagtaagttatgtgggtcttttttctttattattttttcttttttgaaaatgaaagctccgcatatacttcttttggtgtttcaggaaaagttttaaaaaggaaacagaagggcgttttaagtcagacaaggaagggaacgtaatgaggcaccacagactcgagaaatcagatcccatgtttttgggggtctggatttatgctatgaagggaagaataaagagcagtaataaccaaagaagcctgaagcaaaataaatgaatctatagcagctgcaagatacaataaacagtgttagcagagttgaaattgttggcaggcaagacaggccgattgcagagttagtttcaggatgaagaaggcagagcaggagagctaagtttttagacatttagtagtggtgttagaaggtcctgagttttggagatagtgtagaccaagcactttttgtttttcaggggagttgctgatttacttgtgagaagggtaactttggatgaggggtggcttccccctgagatttggggtggctagggggaggctgggtgcatggaagatttttcagttgtgacagtgaaatacagcttcccagactcatctcctcgctggctctgggtgcctttccctttgttatggaatgactggggctgttttcatttgggacctctgagtcctggcctaggttcaagagtcccatccaaagggaaagagaactgttcccagtggctgaaactctcagaccagccatttgaggcaagagttcgtactgttcaagccagtagggggttcagcaccattttgccgatcattggcttcctacaacacagagttaagagtcctgaaaagggccttaggcctctcatctaaccccttcgctccacagatgtaaaaaatgataggaaggggaccgacctgttcaagtcccacagcacatctgtagtggagctgaaaatgaaattgagattctctctactgctagtccagtgttctttccactccatacctctgctttcatttcctttttaaggcttattctggctgagacaatagaggcagtatgatgagcaagtcaccacaaggacgttaattatcagtaatagagaggacgccaatggcggctcatcagctaatgatgtctatggttatatttgtgtgtgtgtgtaaaataaaaagaagctaaattctgagtattttctatgcagcaggctcaaaataatacataattcatgctcagagctcttcatacataatttgattgactctcacagctatgtaaggcattatttctatcgtacatgtaaggacattaacgcttagagaagcgaaatgagttgctcaaggaaaggtagctaatacatttgaaactcatgtatatctgactctaaaacctatgcttggaatcactattcaatgatactcccctcatctcccttgcatttggttacttttggggtcaaattccatatttcactggctgatcaggaggtgaaggtgtcaggctatgggagcagtatggattctctctcagaggccacttctgcacttggctgaacatttgtctggatatcagatgtggggttgatttctgggtctttggtatatacttacctttgttatgcaaagagcctgggacttagagtcagaagattcaggataagttctggctctaccttttactacttagcaaagttgctttgcctttctgcaccttgacttctgtatttattatatgggaacaattgcagtacctttcagtgtgattgctgcaagaggtattggacatgcatgcatgctgaaggctatcaagggcttacccatatcagctctttcgattaggatcggtaaacacagaacgtcatatgaggcagcccctgtggtgctgggtctggcagttggtgctgatgctggcaggagggcagatggatttggatgtgtgtgaaactctgaaatgggtggcctcagtcttagtgcccatctcctttgaatggaagcaggccttcctccctcccgggggaatattcctgagggctctgtcttaaattctgtctcttaaattctcctccactggcctggtttgatatgattccttgcccaaagcagtgcaggctgaaggacactgtgcttggtgaagcatcccctgtctctgaaaaggaagtgtttagtcaggaccagtcccctgattgctcctcagacaagactgacatttgaggagcttcgtatctagctgagggcagatccttgacccaggaccttcttgtcactggcaggcacatctcccttcatcctttccctggcattccctattctgtgcctgcagtcagaagggaggctgctgctcctggggtgggggtggagagccagcctgcagtggggaggcctcagcctctgtttctgggtaagatccatttgctttagaaaccttaaatgtaagggaagtgggtaaggtgtttccggaatgcctttcacttagattcctcaacagagtctccatgtccaagcacaggaccttatcacctgcttattctcccctagccactctgtgaactcgcacttttctttccttcttgtataattgctccccagtcttgaagtcatctgaattctctatcacacacagtgaatttacttcaaacctttccatgtatttgcatttttaatagacacatgaaaaaattggagcggccaccccccatacattcatgtcacaccattttcaattcgcatgagctctcagatatccttcccaagctcccttacaagatctgctttcaggcacttcacatcaccctcacctcaaacacacaatccaaacacatgtctcgcaggcatccaaaaagcaaacacacgtctaaaagtggacctccacagacatgctaacattcttgtgccagctcacataaatggtgacctgtccgcaacacagacacactggactctttatacctcttgccctgtttgaagctgtgcaacatatgaattgatcgactctgtcccaacaatgactagtcagtccagaaatgtgtccagcatccccaggcatcccagggcttctctgaatgcagcaaccatccataatgaggactgttcaccaggaaattagaaaccccaggtagaccttaaaagattttcagaccaatcaaatcagaatatctgaggttggagattgggaatcagtactttgaactgctccccaggtgattctgatgtgaaacagaattaagtacctctgctgataaatctccaactgtgttgtctttggcaattcaattttattccatttgatttagttctattcatcaaagatttagtaacactgtgctaataacatagtttagtaaagaagctgagatgtccagatacctgtcaaggatatttattggaacatcaatcacctcgtgtctaaagtgatgatctctgtaaatttttctctcttttaattatatttgtatatgtttaaatgtgctattattaagcctgcattattcatgtacgatttggctaaaaatggttctcttattttctaattgttttgcatagatatatttgatgtttcctaattttataaaccccagcatttggcaaattgtgtacttattagctggaatcttactttggctttgaaatgctgaagaaggtcagttttgagccagcccaagagttgctaaggcctggaagggcaatgcaaaggtagaggaattctaaacatgggtttggactcactacacagctcctgagtttagctgggcttctcctggaaattggatattgtctgtaatggatccactcattaagtcgtctgtggcttgtgatttgtgcctaaaagaaccccacaaaaatctgtgaggggccctttggatctatagctccgaggttagtgctggctggtgctctgtagtgtgagtgagagggagagggcatgtgataaatagaacttcagatgcgtgatgtagtgaaaagaacatgtagtgaggctctagtcccaccaccatcattttctagggtttcgacctcagaggagttttttaacttcattggtcctcaatttccccttgagtttttatccccttcatttgagtttagataagataatgtataggaaactggaaagcactgtacctgtgaagatggtaggtaatgcaagataatccttagggccttaatagcttaggtagccaaaataattgagatgggagatggattaaaaatgagggcaaataatctagcatttttgcattttttccttttaaaatttgaatgctcttatgaatccaaaaaaacatgaaacaatacaaatctcagtgaactctcatgtctaagatagttttccactgattttatttttctcttgaatagtggtgatttaaaaaaaaatcgcaggtatattttttatctattaaaaatatcatagcatcctggtaaactctgtcataattttgttttgctgtatttatttatttactcctcagtaagtagttattggatgcctagtctctgctggacactgttctatgttttatgatgaacaaaccccatgaagttacaagcatttataagcattcattgctttaggttctagggagtataatatgaatttgactgtgtgaaacttgatttagaaaattggtatccacattgggttaataaaatttagtttttaaagtttactgaactgtaatttaaaaataatacagaaatagttattaaatggtgattttcagtggagcaggtgttatgccataaataggaccccaaattttatattttttataatttttaaaaattatagagcaactttagctttacagaaaaactgagaacaaaatgcagagttctcatgaattccttctaccctttgcacaatttctctattattacaaccttgtattagtattatgttttatttgctatcagttactcaatgtgtatttattaaacataacaaaataataaataaatttattatttatgccctatttgttattatgaaaagaatacatcatattgctgcctctcaagctgtttataatgttatgtagctacagtttgaggtttctcatttattagaaaaattttttttctgtgcacttagtgcatgccttattcagtgctagggcttaacacattatctggacatagtagacatttaataaaatatctgctgagtatacagacaaatgaaatgaaggatccagaagtaaaagacgcaattcttgtccttaggaacttaggaaacaacagacacacatagcagtgactggagaaaatttcagaaatacataaaatatgattaaatctctgataaaggagacattggtataggcaaatgaggcataaagccattaacaagagccccatcctctttttcctcctttttgggactgtacttttttttaattttttttatttgtttgagacggagtctcactctgtcacccaggctggagtgcaatggtgcgatcttggctcactgcaccctctgcctcctgggttcaagtgattctcctgcctcagcctcctgagtagctgggattacagacacccgccaccaagcccagcaaatttttgtatttttagtagagttggggtttcaccaggttggccaggctggtctcaaactcctgacctcaggtgatccacctgcctcggcctcccaaagtgttgggattacaggcatgagccactgcgcccggcctgggactgtacttcttatcatcaccattgtctttgttgccatggtcttcattattatcatcataattatggctatcgttctatgtctaaatccaagcattaaagaacaaactcccatatccccatggtaaggttggagaagtgcgtgcaagtgtgtctatgtgtgtttttggcaattttaaagtacagtcacaccaatatatgccacttccatttcttgctggaagtaaaatgagtgactacttgggctttgtaaaagaaaatcgcactttggaagtccttgtgggagccataccaaaatgccttgcagtactgtaacttctcagaggcatgtaaaagttagaggattggtgaagttttcaaaagctactggcacttgtccttcaggatgaaccctcttgagatgcaggggagcaaattgacctcaataagagagtagtgggagctaaattcactcaagaatagcaatctgttcctcagacagatgcagttgtaattttagaatgtgtacataacagacagtttaaaatggacataataacgctaaaatagtatcaatggaaattaaaaataagtcctaatcccaaccaaaattctagcaagttgttttgtggatatcaacgaactgattctttttttttttcttttttctttttctatctttgagacggagtcttgctctgttgcccagactggagtgcagtggcgcaatctcggctcagtgcaacctccacctcccaggtccaagtgattctcctgtctcagcctcctgagtagctgggattacagacatgcaccaccatgactggcctcaaccagctgattctaaagtttatatagacagttaaaagaccagattagctactgcaatattgaatgagaacaaagtcaaaggactgacagtacctgacttcaaggcttactgtaaagctctggtaatcaatacattgtggtactggtgaaaaaataaacaaatagatcaagaaaacagaatagagagcccagatagacccatataatgtagccaactgttctttgacaaaggagcaaaggcaatctgatggagaaaaggtagtattttcaacaaatggtgctggaacaattggacatccacatgcaaaaataatgaatcttaggtataaaccttacatccttcacaaaagcaactcaaagtggatcatagaccaaaatgtaaatgcaaaacaatgaaactcatagaaaataacataggaaaaaatctcagtaatcttggatattgtgatgactttttagttacagcaccaaaggcactatctgtgaaagaaatccctgattagctggacttcattaaaattgtaaacttccactctgtgaaagacaatgtcaagagaatgagaatacaaaccacaggttgagaaaaatacagatggtgctgacttaaaacggttcaacttacgatttttcaactttacgacagtgcaaaagtgatactcattcagtagaaatagtacttcgaattctgaatttcattggacaaaactatggaaacagtaaaaactattcgtagttgccaggaattaggggtgagggagggataaattgaacacagaggatttttagggtagtgaaactgttctgtggttactacaatggtggatgtatgtcattatacctttgtcaaaacccatagaatgtacaacactgagagtgaaccctaagacaaacaatgtactttgggtgaaatgatttttttttttttttgagatgaagtcttgctctgtcgcccaggctggagtgcagtggtgtgatctcggctcactgcaacctctgcctcctgggttcaagcgattttcctgcctcagcctcctgagtagctgggattacaggcgtgtgctatcacgcccaactaatttttgtatttttagtacagacagggtttcaccatgttggccaggctggtttcgaactcctgacctcatgatctgcccccctcagcctcccaacgtgctgggattgcaagtgtgagccaccgcgcccagctgaaaatgatgtgttgatatcacagaccattaggtttattgataggcttattgattgtaataaatgtgccaatgtcgtgagggatgtcaatagtgagggaggttttgtagcagaggacaagggtgtatatgggaacaatctgtactttctgcttaattttgctgtgaacctacaactgctttaaaaagaattaaagtttaatttaaaaaatctgcccaatctccaaattctaatactttgattccatcttggctacttctttcttatttgaaggcagtcattgtaatatagttataatcatgagcatctgtattttaaaatgcttaattttgtttttcagataagtaccctaaacttaaatgatattattttatttattaaagctacctgaggcagaaatgtttcaaaatcttgaaaaagactaattcaataggttaatagcagataagtaggtatttttgtgtcatactcttcaaattataataactatcacttaaagaatagtcatttttgttcgtttgtgatccttccacctcagcccctcgactagctgggactatatgtgcgtactaccacacctggctaactgttgttttttgtagagatgaggtttcactatgttcttcaggcaggtctcaaactcctgggctcaagcaatcctcccaccttggcttctcaaaatgctagtattacaaacatgagccactggacccaccctcattgagctgttttaactacaacttggtatggtagaaagagtgatgggccaagggttaatagggtgagattctaattttaactttgccacctacaagcagtgggactttgtgcaacaatgttttaaatctttctgcatttaaatttttctcatctgtaaagggcaatatacaatttctgtattctccagttcagttatgctaatcgctgtcctgtcagcacccacatccccatattcactttcacagataagacttgagtcgctatgatcttcaccctagttgtcaccctgtccccatactctctgaatatgctcctctctcctctcattttagccaaataccactcttctttgaaggccagcttaagtttcagatcctccatccatcccagatcttcttggaatccctagttcttttggtcagtatcacttagtttagcaaagaccatgtcttaggtgattgctctaactcaccttatagcattaacccataagtgagtacttactgaactctcactgtatattagattaagggcttattttatatgcctggcacagttcttatttgttgttggaaaaatttttagagggcagtaattgaaatgtcatatactatagtctttgaggatggaaaagagctcagtaagtttctattaattggttatgccgttaagatcagcatctaaagagagctaggtcatggaaaaaatggcctaagtactggacttactatcagaagtactggacttaaattttaattcttatgatttgtgaacattgtagaaatatactaatgtctttgtgagtacagataaggaggaacagataagcttatgtgaaaactcggtttgtattgggtctatattatatacagggctattttattttatttatatttatttatttatttttgagacagagtctctccctgtcgcccaggctagagtgcagtggcgggatctcggatcactgcaacctctgcctcctgggttcaagccattctccatcctcctgcctcagcctccgaagtagctgggattacaggcacccacaccacgcccagctaatttttgtatttttagtagagacagggtttcaccatgttggccaggctggtcttgaactcctgacctcaggtgatccacccgccatggcttcccaaagtgttgggattacaggcgtaagccaccatgcctggcctattttatttatttatctatctatctattttttgaggtggaatttcgctcttgtttcccaggctggagtgcaatggcgccatcctggctcaccacaacctccacctcccaggttcaagcgattgtcctgcctcagcctcccgagtagctgggattacaggcatgcgtcaccatgcccggctaattttctgtgttttttttttttttttctttcagtagagatggggttttttcatgttgattaggctggtcttgaattctcgacctcaggtgatctacccgcctcagcctcccaaaatgctgggattacaggcgtgagccaccgtgcctggcctgttttattttattttaacaacaaatagaaggtggttattccaggagggtttcagaatactaccccagatttggtttctcctggtttgactacaggcagtgctggtgtctttctcttgatcatactcctttcctcatgggtgtgttcagtcctctgatgatagaagtgcttacctttatttaacctttccctctctcactgagtgttctctctttcctgaaatacttttcatttgttaaagcttttaagaaattcttatttgaacattcagtgttatgtaaaaaacaaattaactgctgcttaatatcatgtttggaggtgaaaaattttctaagccttttgcttagccatttattaccaaaggggtatcaagcttggatgtcaagctaggatgtaaattctagacctatacaattccttcaagggcggctgaaaagttgctttctaatccttttgctatattttggtggcaagctttgttttcacagtttaaagaggattgatggttttcctattgtctttccttcacaactttctgaagttcacttgcctgtttcattttcatgacttaaggtaccagcttcttctgcccctctcctagatccaccagcgccccccatgctccagaaaaattgagctacactgtgcctttccctgagctgtagaaagttccacctctaggtttccaggtgcttctgatcatcatttttcaatggattgagttgccaacatctacaaaatatattctaacaaagatgctcagaatgtctggtgttgacctatctatacaggtaaacttcaatgactctgcatttccctttcactgctgacctcatgccttttgcagaagtaatataggaaagaagagcattgaaatagggcagaagatctaattttctttttctttcttgagatggagtctcgctctgtcacccaggctggagtgcagaggctcggtcttggctcactgtaactccgcctccccggctcaggtgattctcctgcctcagccttccgagtagctgggattacaggcacccaccaccatgcccagctaatttttgtatttttagtagagacgaagctttgccctgttggccagtctggtctcgaactcctgacctcaggtgatccacctgcctcggcctcccaaagtgctgggattacaggtgtgagccactgcacccggccagaagatctaattttctaacttacaatgtactcgaatattgaaaggaatttcatatttttagaactaagccctcattggggttgggtacggttagggcaaggagaagcctgggaaggagttcttgggtagttaaattggaaaaagagagtctggcacattcagaatggctccatatttgttacccgcagactgtacataagaaatgagacctggctattaagagatatgatgcctgtgaaaaccctggatacacttgcaacttgctttttcccaagtgtttaggactctagtagggacacctccagttccttttggaaataagctaatatttggtttccaaaaatgtattgaagtagtcttaatgagacaaatagaaaatagaaatttgattgaatgttcttacattcttaaaaatgctactttttagcatttttaaaaataatgaagtacatgttggggtgggagtggagaagagactgtaatatttctgtatctgaagcctccataaggtcttaatccagccctccataggaacataagccataattgtcatctacaacttgttcctaaatttactcagctacagtttctcagagctattgagggaagtactacgatgctatttaaaaatactttcaaatccatccttatgatgatgaagttattatagttacaaatgcatgattcagcaataggcattaggaaaacatatccaccagacagcctgatgatcatggtgtatgacactttcttctgaatacatgagggttagatgaaagtggtgacaaacgattgagatatctagatccacattatttaccttttttttttttttgagacagagtctcgctctgttgcccaggctggattgcaatgacacacttggcttattgcaacctctgcctcctgggttcaagtgattctcctgcctcagcctcctgaatagctgggattacaggcatgcactaccacacctggctaattttgtatttttagcagacagggggtttcactctgttggccaggctggtctcgaactcctgacctcaggttatctgcccacctcagcctcccaaagtgctgggattacaggcatgagtcaccacgcccagccaaccacacttcttaaggctagataaatacatagctttaagtgtagagtaaatggtgtctcacttgcaaagaagaggatctcttggtcctctcctttccccaaccccaaataatggctttgctattggcaatgtaaggtgggtcggaaagtttgtgaagcaatggccaagggccttatggaacaggcatactgcaggggtggcgtggtcataagttgctgatgaagcagattctctgtcactcatgcctggtgaacaggcggggactcccttcttcaagagagacaggtgatgatagaagagtagacagccctgaacaaacctttcctcaggattgtcccttttggtattactcagacctgaataatacatggacatgttttatagggaattttttttcagctttttgggtgatctattattaggatcttattaaaatatgtataattttaaaactaggtatacacttcttatgcttatagttcttatgcaactatagagccaaaacaaattaataaatgaaatcaactatatctgagcagacctcaggatttgagagagagagagaaaaagaaatcaaatataactatgaaacccaataaaatttaaattattttaatgtgatagataatgtggttttgttgaaactaatcactagtgtggaacttaaagatagacacagtagaaccatgtatcctcagggtctggtctatgtttaaatctgttatttaaatgtattaatttcatgcaaagcatgcctgttagtgtaagtatgttgaacaaattgttattaatagctttgagggttcataagttcaggaaaataagatcttaacccaaactctgtagtaagcaatcatcgaatgtcagtttctatgaggtgtcatttgataattttttaaattgtttactcacttgaagatagggttagcattgtgttgatattaaaattggtactaaatggatatctaatccatttactaacagaatcagggacagaaccattcttctttgtgtgtttatgcctcaagtttctgcttataagctggtatgtgttagtatgtaaaaagccaaagtccccatagcacatctgctcacagcgtgaagatggcatcgaatcctatggctgagtagattgaactgcctcatgccatgcaacgactcagttttcccaacatttcctctatgtccagattgatccttgacttcatctggctttcactgggcatttgtgcaattgtaaacaccaatgaaaagccaggcagtgaaattgcatgatggttactgcttgtattaaaatgttaaattataatcgaagacagaaaattttttaaatcctagaactcttgtggactgcaagatatttatcctttgagacaaactgctttaaaattaaatttgggctccacggttctcaggaaaacttttctcatttgtggtctttcctttaagttccattaataattaaaaatgacaattgtgaggacttctgagtaatgagtgtttattatgctctaaaatttaagataagcactttacatatgtaatctcatgaaaaccttgtaattggtgtgaggtgagtgctttggctattttacatgtgaggacacatgacaccaagaaaaggtcaatcacatgacaagtaagtggcagcagcggaatttgaacctatatctttctcattgcaacgcccaagccttacacactaaagcctcttcttatgtctccatttcacattgtgaaaacctgtttaactgcaactaggaaccagtgctctacaattatcctcttacattcctgtcttttccattgggccagtgggtctcaatctttaatatgcatcagaatcacctggagtgctttttgaaaaatgcaggtcccagatgccactccgaatttactgaataagaaattgtctgtgcaaatgtccagggggcctgaatcttttaaaacaacctccctcaggtgattctgttgcaggtgtctgtctgatcacattttgtgtaaaactgcattagactgtggatgcctcaagaaccatgacttttgaaaaaatccatccttgtacctcaaggactcactcactaaatgcttgtcaaataagtaaaagaatgaatgaaggggcaattgtcaagaaagatgtgttcttgggaagaatacgcttttggccagacccttggaaaatttagagatgcatgtttaaatatcacttaatatactcggtctagactctccttcctggaggccaagcatggcaaagagccgatgagagggtggtagaaagtacaaatctatctataaaaaaaagaatgaaaatgctcctgaccatccaggatgagatagaataaatcttcccctgcgtttctaaaactaaagtcaattgaactagaaatatttaaatgcacttgaggcccagaaagagattcatttccttaatgttttgtggacttgacgttttctacttaaatcatagctctaaggtcaatatggatttgttaccggcaaggggtcccaatctacaccccaagagagggttcttagacctcacgtgagaaagagttctgggcaagtctataaagtgaaagcaagtttattagagaaggaaagaaacaaaagaatggctactccataggcagagcagtggcatgagctgctcaattgggtatacttgtagttatttcttgattatatgctaaataaggagtggataattcgtgagttttctggaaaaggggcagggatttcctttggaactgaggatccctaccctttttagactatatgaggtaacttccagatgttgccatggcatttgtaaactgttatagcgctggtgggaatgtcttttagcatgttaatgcattataattagcgtctaatgagcagtgaggatgaccacaggtcactttcatcaccatcttggttttggtgggatttggtaggtttctttactgcatcctgctttatcagcagggtctttgtgacctgtatgtgtcttgtgccaacgtcctgtctcatcctgggactaagaatgccttaacctcctgggaatgccacccagcaggtctcagtctcattttacccagtccctattcaagatggagttgctctggttcaaatgcctctgacagattcattcctgtatttagcaagaggttttttccttttttttttttttgagtacttactaagagtcttgtatttaataagacatagtcctttccctttctgagtttattttcagttagaaaattccgggagcagtaaaagagcaatgcaagtaaatggggggctagttgctcagaatctgcaaatgtaagagtgcatggaagggtttgtatagccaggggactggtgctggatgctgcaaattgaataagaattggaataaattggatagccaggtagcaaagagcagtggaacagacacttggcagtcagattgcttatggctggctggttcagttaacagtgaggacaggagcctagggtggtgggatatttgccttggggagcatggggaaataacattgcatagatgggttttctgacattaaatagagctttggatgttgtggaattttgaacatttcctttatctgaaagccggtgaagtgttgtcttaagatgtgacagcagtatgtaagcaaattgcaggggataagaaatcaagtcagggagacccattagagggctgcattctcagaacaaggagcactgaggaaaaaattaaaaaacaaacaaacaaaaacaaaaaaagaaggttgctttcggtagtccagatgtgaagggacagggtttagaccagggtggtggagtgcagaaagaaaagccagagggatgtggaaggacaagatggcatgaccacgaatggtggcaaaggcagcgtggaacaagcacatcagctgatgtggaatgtatgagaacaaaaacactcattttcccaccagaacccttagtaggagaaagtgccttaagcttacagtgaggattccaaattgaaattgctcagtagctgtttcaccctttgttactggcagagcagatggctctggaagagactaggactacttgttgcttctctttcccatctctcaccactccccaaccttatcccatagtgaggaccactcactagtgacatttctgcttgagacctacaaagcaagtcttgctaatgagacttaggcactttttcccaaagtgcaattcttggaaatctgtgggttttaagtagattacagggccacagttccgtggtcaaattagttcaaaaaatattgttagagaattaagcaagtttctttactgcaggatgtcccacagtctttaatatggtaatcaacattttgactatccaagagagggcgagcttagagcactccacaaactttttggatcatggagctctttttaaaagaagcaccttgagagaagaggatggcacagcatatatttaaagaaattagggactagaaagtttgtctcttgcactagaggttggtagtgtcatgcaaagaaacaagagttgggatttgggtccaggctttgccactaactggtgatcttgggtaagtcattgaatgtctctgagcctcagtttccccaggggttatgttcattctaaatgaactcttcagctcctttcaaaagtctgtcttcatattcaaaaaggaaaataatctgcaatttctctactctgcaataactctggtggtggaggcagtggtaggaaaagagagagtagagcggacagtgacaagaagatgaataagatacggtctgaacccctgcactgattagactgttgggcacaattacagtgctgggctgatgtaacaaagataaatgaagtttgtagtgtgttctcaagcttctctgactccaaccacatcatgtgatatacagcaactagttcagttgctaagcaacactaattcccaatggtcacttaatccatctagtctcagttctgctactaagaagctgtgaggccttggataaatcagttaaccctttgggtttgggttttcttcatccgtaaaataaggaagttgggttaggtctggaaccatttttaagttgacctgagtcttacctggaagaaggtaaaggaaacacagctattctcctctcacccaccccatgcagatgagccccaacattctgtcttcgcttttcttctcttccttcctcctggatcacttaatctgtctcagactttaattattgcatttatgtagttgaagttcaaatgtggatctctaagaccaacccttctcttgaatgccaaaatcaagatgtgtctacctgttttcattctaaggaaaccaaattacttatgtttcaaaccaaactcacaatctccccttacaaaccaattcctcctccacgttaaaaaaaaaataataataataacaggccaggtgtggtggctcacgcctgtaatcccaacattttgggaggccaaggaaggcagatcacttgaggtcaggagttcgagaacagcctggccaacatggtgaaagcccatctctactaaaagtacaaaaattagcagggtagggtggtgcgcacctgtaatctcagctactcaggaggctgaggcaggagaatcgcttgaacctgggaggcagaggttgcagtgaactaagactgcaccactgccctccagcctgggcaacagagtgagactccatctcaaaaataaatacataaataaataaataactatgtgctcctggtcacatgcagcccagactcccaggcttttcgactccctccttcttccctcctgtgctagtcattggtcaattctcaatcctctccacattattattattattttttgagacagagtcttgctctgttaccctggctgtagtgcagtggctcgatctcagctcactgcagcctaagccttccaggttcaagtaattctcatgtctcagcctcccaagtagctgagattacagtggatgtgtgccaccatgcccagctaatttttgtatttttagtagagacatgttttcatcatgttggccaaggtggtcttgaactcctggcctcaagtgatccacctgccttggcctcccaaagtgctgggattacaggcatgaaccaccgcacccagcccctctccacattattatatgtccacattatttatttccctttcctgatgtcattattgtacatcaggctttcattggtcatcctgccccaggtctctcctccaaagcaacccacatgccaggttcagcctcacagagcttctctgagcctgccatcccactctccaaagcctttcccggctctcttgtgctcactccttgctggcatttggagccctgcgttttcccacctcaatcatcttccagcttccagctttgtcttcgattacctgtgtgttcctgtcctcccaccaactatttattaatcttcttatcccataacttgcccattcaaattgttcccttttcttagacttttgtctgcattctttctatctgacaaaatcctagtgatatttcaagagtcagctcaaataatggctcctcactccaacaaatctttagggaacactcaactggcttgatttctccttcttttagcaccttgttctttcctttcttactaccttaccaacccagacatatatatctactatatcttgtaatatccattatatcttttttgaggccaaggaacatgtttccttcatctttctatcaactatagtacatattacatactaggaactcagaaacgtggttgaacaaattactattaaattattaagctattaaaacaataatctattgaaataatgtaataatcttaatctcctaacaaaatactaataaaatttaagtaaaataaataatctacaataatccaaaaatgagtcgaatcttggtttactctttggtgttttgtcattctactttcgtgtcaagcttagaaataattttctgaagaattttgattttgattttagttataactttgcgttagtaagaccatcagcctacggttaaggatatttgtctcacctgtgaaatctcactatctccatgaaaccgactggcttcgctacatcatgggaagggtgttatctttcctagttggagcatcatatgatgatgtggttgaaaacatgcactttggcataagacagacttggtttggaattctgactctgcccttgttggggctgcttggggaatttagttagcatctctaaatattagtttgctcatttgtaaatggaggatgtaattgcaggtgctggttctactcttggaaggattcaaaaattgtcatgcttacccgaggggctcctccaaacctgggcggggttttctgtatgccttatggacctacaaatgcaaaccacactgaccatgtaattttgggggcagattggaaagctgaaacagaagtgcagggactgttggtgcccatcttcctggcctggtggggaggaatgtaggaaagcagactcgtgcttctcatcttgaatcagacagacgacagacactccaggaaattccttttgtttggaaaagaaaaatgctctgccatcttctcttaccccagttttctacattcccagacttcctaaaagagtagaccactggggttccctgaaaagccagctaagtccagcacatacgatcagccccacagctcattttggttcacagacaataaggagagaggacttaacaattactgagtgctgagtacccactatgtggtaggaacattttgtacataattacaattatgcatcctcataactttatcacataagtatcatctctattttacaagtagacactaagcaacctcccaagattgtacagctagtaaatctgagtgaggaagtgaactcagatggtctacaaaacttttagcatttgtggccaggcatggtggcttacacctctaatcccagcactttgggaggctgaggtgggaggattgcttgaactcaggagttagagatcagcctgggctacaatggcaaaaccttgtctgtacaaaaaatacaaaagttagctgggcgtggtggcacacacctgcagtcccagctacttgggaggctgaggtaggaggatcacttgaaccaagaggtggaggttgcagtgagccatgatcacgccactgcactccagcctgtgtgacagaacaaggccctgtcttaaaaaacaaacaagcaaacaaacaaacaaagaaacttttagcatttgagaccttcagtgtgatcaaagcaaattagctttgtgaggtggggtttcctttagcttctacgtcagcaaaattgtgaaccaacaggattaaccttttgccgtcttagtactgcagggaactagctttcagaaaattgtttgggggccgggcatggtggcttgtgcctgtaatcccagcactttgggaggccaaggtgagtggattgcctgaggtcaggagtttgagaccagcctgggcaacatgtcgaaaccctgtctctactaaaaatataaaaactagccaggcatggtggcgagtgcctgtaatcccaggtacttaggaagctgaggcatgagaatcgcttgaacccgagaggcggaggttgcagtggctgagatcatggatcgtgccactgcactccagcctggatgatagaatgagactctgtctcaaaaaaaaaaaaatactgtttggggacatttgggtcctattttcttccctgatgctgatgtgatgctgatgatagtgagtgtttcaagaaccaggagaggctggttgttgtaaacattcctataaacgttggctcagagattgttaatgtaagtttttctggagcagtgaggtaagccccaagtagaaaagggcagaagtatagtaaaatttggttgttttgtcaactttgtaagacttcagctgcataccttgttaggaaactagaagccggaggaaagttgtgctgagatgtgtagcatttgttcttgctttgtgtggccattttattcccattaagtactgtatccttcactaaagaaatgggccattcagcagcccgcctgaacactgtggcactgtatattgttatagagagttatatccattcagagggacacaacagatcagaggaaaggaaagaggtaaccatgtatgcagacgtggaactgtccccaacatgtataatagacaagccaaggtgaaatgtatagcatactaatattcaactttttaaatttaaaaaactatgcatctcaaggcatggtggctcacatctataatcccagcactttgtgaggccgaggtgggaggatcgcttgattgcctgaagccaggagttggagaccagcttgggcaacatagcaagacctggtctctacaaaaaatacaaaaattagctgggcatggtggtgtgtgcctgtagtcctagctacttaaaaggccgaggcaaaaggatcacttgagcctgggggttcaaggctgtagtgagctatgatcactccactgcactccagcctgggcaacaaagcaacaccctgtctaaagaatacaacagcaaacaaacaaacaaaaaaccaaaaaccctcaaacactataaatccatagtttttatatatgtgtaaactatttctagaaaattactcaagtaactgataattagttatatctgaaggagggtgatggtgcggtggaaatgagactcacttttcatcgtgtggagcagtgattcccagtgtgttctgggattctggggagtccttgagaccctttcaggagatccatagatcaaaattattttaataataatactaagttgtttttattctcattctctcacgagtgtacggtggagttttccagaggctcagtgacatgtgccattgcagcacattgaatccagaagcagatacgataatccaactgtgtctggtcaagccaaatatttaagagattttaaaaaatgtaaaatgatgtcattcttctcatgttgaagataaagttatttttataacaattttgaagataaagttatttttataacaattattattcaacaaaattactattatttaatgagttaatacacaataaatttcaaattctcagttttaatttcttaactgggcaagtatcagtttaggtataaacaacatccctccgagatcctctgggatacatccaattcctttagtgcctggtgtgcttggaaggtttctgttgcacggcgctggacaggagtgccaaagaggaaagaaatgtgaatggaaccaaagtctataataaaatattgctttctctttttcccagcctccatcaagggagacctgcaagttgcctggggttcagtgctctagaaagttccaaggtttgtggcttgaattattctaaagaagctgaaataattgaagagaagcagaggccagctgtttttgaggatcctgctccacagagaatgctctgcacccgttgatgtaagtaggtccagtcactgaggctctgttaccacatgagattgggagtggtgtggctcacattgaatccccccacttatcctgcctggtgtcacagggaaagttgaacacttggtttctgtgcctagagctgctatcagatgagaagacaatgtatttgactatataggaaatctgttgtggactgtcaattaactcattttcacttccgttgatttggttgtgaccagccctagattagagggcagttttagagtgtcctggcctagaatgtcttcctcagttttgagtaagccagggtacctggcctctttctgggacttctctgcccttacaggacccactggaatctgtagggttccagcgtcaatctgtgttttctaatattacaatttgtttttattttttatttttaacaattattttataagttgttttcttctgggaataatttgaggtgatttagagtaaaacaatacttaatagaagcactacaaccaggataatagtacaagagtcctgtaattatattttgggggaattaaatgtaagaaaacctagcccagggatactgattgcagattcatacagcgcttagctgggactcaaggcaaaaagagaagcatgctatattgcagaacttttattaggaaaccatttccacatatcaaggtggtctgctgcaggtgaattttggtctgaatgggacttctcagttcatcctttggcaggctaaaatcccactgaggatctagaactgtagcaatttctagattgtgtctgagaccttcccagcctggagctccatatctccttcatgcctgtgcctctagcatctagcacagggtctgacacatggaggatgctcagcgagagccctcagattcaacttaggctttactgtattctgcacagcttctggaatgagtgctgaatgaatgaatgagtgagtaaataatgtgaatgattattgggataagggtggggctaaagtggtattttcttacattccccagaagatttcttctccctgtcaagatgctttttggattatctcttcctttctgtttattatctagggaatgcctcgctgctctttagcttcctggtggtaataattcacttcatagtttaatgtcttaggtttccttcttcccacagattgccttcaaatttgccttttcttcctccctccctttcttccttcctccctcctttccttcctcttttccttccttatgatagactcttggtatgggggagttaagaggtcttaacttgagccttcacagtgtatattttagaatgaataattcattgctatgcttcaccaccaaccagaaattattacagggtttctctattacatgagatttttcaaacattatttatctatgatttgttccgctttacctttcagaaactatcactgtggtcttttcttcccctgccactggagttttttttttttttttattttttttgttaacagggttttgctctgtcacccaggctggagagtagcagtgtaatcttgtgcaatcttggctcactgcaacctctgcctccaggctcaaattatcctcccacctcagcctcccaagtagctggaaatacaggcacacgccaccactttgtattttttgtggagatgagggtctcactatgttgtccaggctggtcttgaactcctgagctcaagcaatcctaccaccgtgccctcctaaagtgctgggattacaggcgtgagccaccatgcctgggcaccaatcttaaacaatgatttccataaattactattagaatattcaaggcatatgctatatatagccttgtcctgtgaagcctgattttggtgcactcctccacccccactgtcatattatccctggaactatctcaaacaccttggctcctccaggaagagtccttctggtcaccaattcaggctcattctctttctgggaacgatcagactgagtttttcaatctgtttagagatttactaagttttagtttcttgtgtttcttattaatagggagaccaaataattcagcatccaatctggagaactaatgaggacaggagaagttattaataggtaatctggaacataaggcatactctggatgggtagccacctgcttttcaaagatcttgcctctttaatgggtactgagagcagaagggtaacaacagcctttggagattgaactcctgaattctgttcagttgtctggggctagggaactctgacacagatattgtagcactgagtatttctaacaagctgtggggggcctgtcccctagtggatgttagagttcccagagggagaagtcaagaccactgcagcaccgacggccccgtgcttatgagatccagtggtggtacccctagtcagtcttcctccaccctctccttcctcttttcccttctcctccccttcttcccttcccctccccactccccagtctgctcccttctctttttgatccttattctctccctctcccttccaacgcccccacctcggctccctcttgttttgttttctctttccatcgccttctctttctccattttcttctctccctttgccattcacagtgtcttcctttccttttctcttctaaaatggctcttccaaaatcactggagggcagctcaaaagagcaactctgccaatattaatttctccttgaaagggaaaagcctgcatttccaattatgacttagtcttcattagttagaaactgtcttttttccacagcaagtggcctaggaatggtgtgtttctcgcaagtctctggtcggaggtcctggttttatgtattctgctgtgcacgctttctagggcatgaagacagggcaggctgggccattggaggtgggggtggcagtgaggatggcggtctggctgtgacaggaacacacctggaaatgtctgcttgtcacagaatggattgcagctgaagtaaacaaaactctgtgatcatgttgctgcataaacctcgatgtctgaaatttgggacgatggctgtgccaggattattttagaaaggcaagctcaggatcagtgttcaactaaccagagaatctacagctgctgtggatgtccctccaccagagagagagagagcctagcagaaactgaggagagaagctcttcaggccgctcaatggctcacgtctgtagtcccagcactttgggaggccgaggaggaaggatcacttgagccaggttggagagcagcttgggcaacgtggcaagaccttgtctgtacaaaaaaaaaaaaaaaaaatgccaggtatgatggggcctgcctgtcgttccagctactggggaggctgaggctgaagaatggtttgagcctgggaggttgaggcatggtaagccctgttcacatcattgcactccagcctgggtgacagaatgagaccctgtctcaaaaaataaataaataaataaataaaagttcttcaaagaggaatggaggggaggaaccaagggctgacatggacaattctaggtaaacagggctccagaaacattctgaaaagcataagctgagagcagacttcagtaacatgaagaaagaactggggaggaggggagcggtctagagaataacatgctcttatttgttcatgggattcataaactgtggacaatatttttatttaccaaaaaggtaacaaagtttattgagcacctgtgatgtgtaagggactctggaagtattttgaagggatacaaatataaataagagataactccagccttggtttctcatgggctaataggaaaggaaaggaatgaaaaagagaattacactcaagggaggtaagcatgagtcaggacctgacaaatggttgaaggaaggaaaggacacttgtagctgggatgttcaaggaacacatgctttgaatatggagggtgtggagcttgacctaagccttgggggctaggaaggaatttgatatgcagaaggaaagatgtgggtcattatccttggagctgacctaggcagtgaggacccagagtgatctggcgaacacagactgtgctgggcatgtggagtggaggggaggtaggaaacggctgtctacttggggcagaggattgggttgaggagtggtggaagataatactggaaaagaggacacttgccagaatgtggaaagccctgactgttggctgggctaagacatctggacagtctggacaccattttagggattcagcacgtgcgttttacgtgctctagcagggaaggatgactttactgttagagatgctcatttctgatgtccctctcgctgagtgtgagtgcagtcctgaataagattaaaggtgtcataactataaaccatttggaaaatgtaaaaatatatatgcatgagacacttggagcaaggattttctaaggtctcaatttcttgtttttgctttgattgttatagcttataagagtagatttaagggttagccacaaactctattactgtcagagcagatttgggctgctaggtagaatcttattttcactgtttcaattctcatttctttgtaattttttgtattatactacatattttagccccaaattgtgggctgcaggaacaacgttaagtatttcttgctggctgtgttcactgaattgcttcctgagcctgaacttgctcaaacttcctgttttttgggcacagaactcctggtttctccatttatgatggatgagaggggtttggagtctctcttctagactttcatagcatgtttcaggatttctcactgatatctaattgtcttataagagacattaaatttttttcacactcaaaaatccatgatcccctctaggtaaggtctgagtctctgtcaaacattttcgcttttgtgtaacatttagcacagtatttatcaggcattattttgtttgggggtagaggaggtaggcggcggtgggcagttgggaccccccgtacttatgttctgctccaatattgtcttgtagaaaatggtctaaaatagatctttactatctgaaatatcatctagtgagagcattggcatcatcaaagagcttgttaaaaatgcaggatctaggacctcagactaaatcagaatctgtaatttgattggcctttgagacttgctggtctccagatgtaatgtatacacatcacctagggatcatgttaaatgcaggttctgacactcaattacttaggtaatgatcaaacaaccagatcttgaagttttctaacatcaaagcagcaacttcctttctagagttgtcaccggacaccttccctcctgagagtgacacttctgcacagaacagatggtttatgacaggagttggaaaactgtggcctgctggtggcatccagcctgccacctctttttgcaaagaaagttttattagatcacagtgacgctcatgtatttacatattgtctgtggcttcttttgtgctgtactgactgagttgaatagttgtaaaggagactgcatgacacacaaagccaaaagtatttactatctgggactttatagaaaacagtttgctgaccctggcttatgtgagtgactctaaatatttccttaaagaatcaaatagctatactctcttgccccagtggcaaacttcgcaagcccatctgaatccatggctattcatagagaagctgaaccataaaccgtcattcccaggcaacccacaaagggtcttgagcctaaaattggtctggataatggtaccacagagcctgtgactttccaaaatccatttaatatgtccctcctcaaagaaatggttataattttatataattttattgagctgactccctcctccacaaattgatttcattaattgttcaacataagtctgactttccccaagaattggaatcaaaaggaaattctgagtaaaaatatatctgggaccaaggaaataaaaagacttgtacaagttggttataatacacattttactcctaaaaaggtagcgttggttttggccccactctggcctattcactgggcagactgtatgggcttggagtccttcttttaattcccttggagaatcccaccacctgtctcttatttgggtttttgaattgtgaaatgatggcacacacaagctccaagaatagctgcgtgtgtacaccaagcatacagagacagaaggcagagacttaggccaaggatcaggaaatacagaagagaagctggcatggaggcatctgctccacaaacacagtgaagccggaggttgtaggaggagggaggtgggacccgtgtaatcactggaggatgtgggcactctgctctgctctgcaagtcttggagatcttggttttctttccagaaccaaatttcagaggaggtgggtgtaggagaattgagattctttttcctcatccagagttatctggggccaaagaggtttagggtgagattctgtgggaatctttgctgtagctccagaagctttattcttacttagttccttttccctttgtctgcatagtccaggacactaaaagggtttgtgaagagtccgggtagacataagtggagagtcttctccttaattctagagtctatcttgacttcaaccaattaaagattgtaggagtgaattagagccccttatgttaaaccttgtttcttggaagccctcctggaattccctaagatgcagagctgattagcttagctggtcagaatgtgaaggttttaaagccaaagttattatttgggctgatattttagacattctcttcattggaagaagtacaatgtattcattcattcattcattcactcattcattcattcactcagtgaatatccattgaaaacctattgtgtaacaggatgcaggaaaaacctgaactggagagtcagacacatctgagttcaaattctagtttcttgatctgtgagctaactaacacctcattcagctttccatccaggtgacataaccaccccagcttccttccctgaatctgcaggttaggttggacatttacttctctgcttttgcagcaacttctacaccgtctgttctcataccacattatatggaaattatccatttgcagtctgtctctctctccagattgtaaagtcattgatagaaaagagcttcatttcacatacttttttacccttagtgcctgacatatattagaaattagacatatgtttattgcactgaaaagaacctaattgtgtggcttaatttccctaaagcatgtgtttctcatctgtaaaatgaaggtgataaaaacatgccttgtgagttttttgtgaagatcaaatcagataatgtttgaatgagtgttttataaatatgaagtgcttgcaaatactaatagttgttctaatatctggattgattgcgattcagtagaaaacaagcagaagagaatcaagaaagtatgtggaggtgtcctagtccactttttctaaactgaataactgaacgagggggatctggagacttcagcttctgaggcacagtttgggtgtgtggggttgacacgggacagaggaccctttccagcaagctcgatgtctctgccattagattatatactcataacagtggggatatgttttattaatttcattgcccctttattcaccctaagcataactaagaaagtgaatatgtaataattggatttcaatgggcattgcaaggccaaagtctcctgccccccaaatctcccagtatccctggcctgtatgtatcttttcttgagaacctgaataatggaaccattagattgaaaacatagattggggagaagagagtgagttgaatttgaaaaatgttgagtgtgacatctggcagtcaaatatgcagggctgactcatttcacttttcatgtgtctgttttagctcacaaactagacatagagctcattgtacagattccatagtgcttaatgcactggctaccccttaaaaaacctatagagcttgctggagggggtcccctatctcatgtcaactcaataaataaatatgtatggatttgttgcaaaatattggattttcttttccatgtaagtaacaaagaactgctgcagatatttgagcagagttgtaaaatgatatgaattttgctgtgagaaaacttgatcttgctgtaatgtatgaaaaagactagaagggaaagaagttgagggtggagagtcttgttaggagggccaggataagagcaggtgggcggtgaaggaggctgcggcagaaccatgccaagcagaatggagtggaggggacttgactacacaagaggctggtgactcagctttctgcctagtattagtcctagagaagtctccctgctctgggaagaccggtgtctagcctcatgtggcttcggaacaaaagccagtgattgcatccaagggaagataatgagaaacacacaggccgtgaaaatcaggaaagcaccactaatctttttgttgcaaaactttacttttcaaagtcctggggaagggtgcagaagcctcagcacgtggacttgagccctgtactcggaaatgcaaaatggaaaccccctaatagatcacagaactgaaaatatccaagagtctgagaggctgggggaggacaggagtgagaaaaggaagggggctggagtactgatcagaagataggagaaagcaacagtgcaaaatgcggggaagggctgagtagacattcaatttaatctggacttttattttgctacaaactaattttatgaagactttttttgcccaaatattaaatatttattaattaaagatattaaaacaggaaaaactgctttcattcaataaaaactctagtaattcttcctaactccagaattgtatgtatatgttttacctattaaataatcagaaatagaaacaaattagacaagatacgtgaataaccttaaaaattttccataatatttgacttaggaactttagttttatgaatgtactctaaggaataccctgaaaaggacaaaatctatacacaaagattatacacaaatttattatagaattatgtactaaaaaaccctaaatgaccagccttgagtatatggttaaatatataagttataagcctttgggttttgagagttttagataacacaagaaggtatttatgatattatattaaatcaagataaaagtcacaatgtaatataaagatatacaatcaatgatgtaaaagtacatagaagaaaactctaatgaaaatatgccaaattgttaactatgatgacttttaggttacggaattatgggaccatttttgtttccttatgcaattgaaaagtcataaatgagcatgcatcactttttcatcagaaaaataaatgagttacatatttttttaaagggaagatattgtaaaggaatatttgttgacagaatgcattaaaaaacctaggtaatttccttatttccctgggattctgagaatttttttactcttgggaatatctttccttgctcttagttattttcatatgttagtcttgttcctggggataaaaaatggtaagtttgctatttgagctctgctcgaacatatggagtagttctctcttacatatacagaattggtttgacattcaaggtctttcagagtcaaatcccaattgatcttcccaatttcacttcccttagtttcctacgtatattttctacacaaatcaaaaaccttttcagacttcctatttcttgtacatgtccataacctcccctttctgaaactctacttgttcctggggacagaatgttcacagagcatgcgttaaacatcataaagtggatcgggagcctcttttaacataaggctgtgtgattttgacaaggcagttagctcaccctctagatctcagatggaacacctgtaaaacaagggactatgttgtagatggttgccaacattccttgcagtgctacagctgagtgaaccttgttccctcatggccctaggtgtgctcattcatctgcctgcaccttgtctcaggttcccactgcatcttaagtggcccctgcccaccccactgtcaaatttgacccttcctagctcatgtaccatttcctttataatgccgtcctcagtgattctgattaacagggacttgcatgtatgattttttttttttttttgccactcatacaggctgccttttatcaaaactatggcacatgtcaatgatataacagataatatcatttgaataaaaagtcaactccatggggaggaaaaaaacctacttaagtgagctttagagataaaggtgaacacttctctaaatcctttgtttatggtctgttaatcaataaagtccaatctgtgatccccagatacataagaggagaaggatatgtagactatttatgatatttctgaaaatcctaagaaaaatcacacacaggcccacagtaagtctatgtttctttattttgagtcagaggatttcttttttccatttttaaccagtataaattggtttaaacttcatctcttgaataactcctaacatgaccagagcccttttcttccttcaaatttccacaaatgcattgctccccttttttcttttcaccacccatatgtccatgttggacaaaaaccatgaaggaaggaggttgagaaactgtgtaccaaaacgccaagagcatctttgccatgttccagcacaaagggcactgttagaaggaggtgatcagagtcatcttctgactcaacctcacaagaggagtcaggttagatgaacagttcccaactatttactctcctctctctctcattctctctctcgcattctttttccttctgttttttattagcagcacaaaagattttgaagtgcttaagggcagaaagcttgccttgttcatctatgcagctcttgctgggaccaagtatggtgctaaacacacggtagacattcagtaagtatttgtggaatgaatgaatgagcaaatgaaggacaggtgtggcttcgatggcaatgggtcagtgtgaactccggaaagagtatgcagagttatagtcaaagtggatgatggatcattgctctgacttactagttatgtaatcttgagtaaacccctttatcactgtgggattaatttccccagctgttgaaaaaatgtgtgtgggggaaagggggagggttagtgattaaaaatgtgttccataaggagcatgtatgtaaaatcatctggcacatggttgcagctgaatagctggcatttatgtagcactttattttttctgcattttttaaaaattaaaaacctgaaaattgttaagttgtactaacctcaaatctcaccacttaagaattatataaaataagaagtaaaatttctcttcccagccaacttttctaattccccagagataactacttttcttaacatttaagtttgatgtttatccttcttgacatttttctaaagtttcatatatatatattttttataattatttaatatatatgtaaactcatgaatatatatatgcaaactcataaatatatatatatatatctccatgcaactttggatggagatatatatacacacatatcattttcaaaatggaactattcatatatgtctatctatctatctatctatcaatcatctatctatctccaagtcaattatttttgaatgatggcagaatcatttgttgtttgaatataccatattttgctgccagtcacccagttccagtgttttgtgattacaaacaataatgcaagggtcttccttgtacatctatatctgtaagcttttgtacagtacttactttagtaataaggcacttgaacacttattattctctttactcataaccaccacaagaagaaaggacagaaattgttattctgtgttacagatgaagaaaaaggagagctaaagggggcaactggcttggccagagacccacacagatagactatggcagaccccgtgtttcccagtggcttgaatttttgtccagagctctttttgtcacactgcaataaagcacaagtcaacaggaaacctttacaaccaggcagagaagcttggatcagggagcaggcagtcacactaaattgtagaaaagaacaaacacacacacacaaacaagaagctcgaggccaaacacatttaaaggatattatttggaagaaatgcactggtggtgagtgagggaccagcataagaagagctgtcctttaactagttaccatgttttatgcaatgttctcaatatgatatccaaatgattaggatggcttagattgcataaatgaggcaggagaatgacaaaggacacccccacaaccccaacaatgacactacccctctccctcaagggaagtgtctagggaaggccagtcagcatctggttaggcttggccttaattgtcatcttcctcaattatctgcaggaaatattagctgttattaaaatttgcagatgcagtcaattgtcagagtcactggagaccaagaattattactcagagcattggagagaggctggaaagaaaaagaacaattcagcctggaaaaatgtaaactaatggataaagtgaggtagggggagtgggggaagaatttagagggataaggccagtagtagggtgaggcagtgaagcactcccctggagtacaaactttaaggggatgccaaaaactcagctatcaagataaataaaattttaattcaatattgaaaaaaatcaagttggcaaatgacagcctgtgggccagcagcctgtttgtaaatacaattttattggaaagccactggaagtaaaggtactgtggcaggggagatccaggctaattctttgatgtgaaaaccctggttaggcttgtgaatgttagacacattagaccttagcttgtgattgatgggaaaaatatttctgaagaaaaggaataatggatctgactgcttttatgggtttcctggggttactgtaacaagtgatcacaaactgggtggcttaggacaacagatattgattgtctcacagttctggaggctagaagtccaagatcaaggtgtcagcagggccatattccctctgaaggttctagagaagcatctttctttgacatctaatttttgatggctcttgcaatcactccaatctctgccttgatgtttacatactcttcattgtgtatgtctctctgtctttgtgtccgtctctctgtctttgtgtccacatctttttctcctttcccttagatcctagtcattgggtgacatcccaatccagataacctcattttaacttggtaacatctgcaaagaccctagtttcaaataagattacattcctaagattacctatgaatataaccttaactctttggttccttatttggaaatagggtctttcttggacacgattcaacccaccacactgttaaagatatctttctaggacacaattcaacccaccatgctattaaataggtagggatgtggagagatttgacttaggcgcagcagaaacattatccattcacagaaatctggcagcggagtcaggggcagactcctgacatgatttaaatacctaagaaaatatttaaggaaaagtactttagttcctttggggcgcaaatattataacctttgctcatgtcacatggtgacaaatacatgcaggatttttaagggtagttctgatttcaaacatgcaaacaatagtgactggaaatatttttactaaattttatattccttttgttactattttattcttctcaatgtaagcaacttattaaattattactataaccgaatataacaacttttagatatttttcacaaaaattcaccaaccggggaaaaacgttgtttgtaaaatgcagtattctgatttttaatttatgaaatatggctgttatgcttctgaagcctgttcaaaggctatgaaacaatggagatgatcgaataccattagaattttaagtaagttgaaatgtaaatgggaaacaaatctattttctcccattttccaaacacatcacagtcaagtccaaaaatttgaatgttacatggctttttagtgaacacttttgttataaacatgcgtgtgtaggtatacttaattgtatcagcaacaataacattagttattttaattattgtatcaccaatcctaatcactaatcaataaatgtatactcattaattaataattcaataataatggctaatatttatgaagtgcttatgtgctagacagaagaattgatccctttatgtgaattatttaatttatgaatacagtaattcttccttagaattggtattctgtttatttgggcttgaaatgttctacatattatttttcctgcttttggtcaggagtcaccagcccatttaaagagagacagctgtatctttctgtaactgggctattttctctatgagtgcattaatgttaacagagaagcatggccagcaagggctgctagcacaaagtgaagggccctgctgtgatgaacagagaaattgggaactttatcattgctgctatagacattatcaactaataacacgtttttaaaattcctgaaaagagtttgctttctaaaggttaaaaaggtttaagttctccctgtaattttgtttatatagatgatttgctttgtaaacatttgttttgtttgtttgtttgtttttgagacagagtcttgctctgtcgcccaggctggagtgcagtggcacgatctcagctcactgcgacctctgcctcctgggttcaagcaattctcctgtctcagcctccccagtagctgggattacaggcatgcgccaccatgcctggctaatttttgtatttttagtagagacgcttcaccatgttggccaggctggtctggaactcctgacctcgtgatctgcctgccttggcctcccaaggtactgggattacaggcgtgagccattgtgcctggcacagctctccattttaaggctttgcaattgattgaatcaggctcgttcaggttacctaggatgatcttcctcacgtaaagtcaacccatgatggattctaatcggtctacagaacttcttcacagcaacacctagatcagtgtttcagtaactggggtctacagcctagccaagctgacagatcagaagagccatgacaacaatgataaaagaaactgttgccctctagtttcctcctgggcattaataatttagctaatataaacccaatactttggatacgattgactgaattcagctttgctgatgcctctgatttcagttgctttaaccaaatgcaaacccctagtgcttctgttgtctgttgatacccagaggctcatgtgatctggaagggtaagtggcttctctctgatttgccagaagaaagtggttatgttagctgaggagccagaacactaatttcagtgatttgactctggtacaagtggtgggaggcccgagggtgggatgctgctttttcctttggccctggtaaacattttatgcttgttatggtggttgaaatgctgtatttaaccttttcttcatgtgccaggaggttcacagtaaatgaggggtgtggtctgtgaagggaaaagtggctgtggcttggcctctttgtaccctgtcagcacacatacacgcatggtctgtaacatgtgaacctatcacgtgggaactcattactgagctgtgagggctgcccctgaggagctgggggcagtggtcgggagaggagaaggtcgtggggcacagtagaaatggcaccggactgggaatgagttcctactgccaacttctcatcagctcagttcctacagtcctctacttactccttcgttgcccaggacatttatttaatgccaggctaagcacaaggcttccaggattcagcagtgaacaagacagatgctacccttgcccttttggagctgactgttgagcaattttaataaatagcaatgatcatatcattagcatttcccgagggttaccatgtcccaaatgtgtgagttatgatagaggaagatggggttattctaggtgaaggccgagaagcttctgggaggcagtgactaataactactgccttttttactttggagtcatgtcctttctgtgactcccctttccttctcctctgtgttctctcccttggccttgtcaggctgcccctggctttggttctctcttcctagtctcctttctaattagcctttctagcccaataaattaagctcttgtctggaatctctagctccctgatggacacctcctcgtgaaagccctcagtatctcaaagacacaacatctgtgaagaactcaactcttccattgtattcttccttccctttcctgtctctgataatgttatcacaattcgttttgtcatttaggtcaaaaacatagtcatctttgacctaccttccctatcatacctaccagtcactcagccctaccctgtctattcccatgatgtctctcatctctccctccatttgtttgtcactctcaatggtcagactgtcttggtcacttttctgggcaattgctatagtttaatgcttgcagttttccctcaactttagttcatcctctttagagctaccagagcacatactcttgatacatcttcttgcgtcactctgttgctcaaaagccttcagtggaccactgctgggctctgcagccaggtgcttgtgttctaaacctggctctgtcacttaccagcttggtaactggaaaattattaaccattctgtgcttctattatttcatctataaaacaattgtgtctgtctcatagagttgtgatggggattaaatgagtcaacatgtaagtagtgcttataaaaaaaagtctgacataattttagcattccgtccaggtagatgctctggctcctggtcctccacattttccctcttgtgccttgactttttgcgtttctaacttttccctgttatatttctgaatagttttttgcaaagtagtgcacaaattagtgcctggatctacacaaactacatcatacatgatgctcttgtctttcttcatattcttttaaagactatatgttatatatttaaacacatatgcatatttatactaaactaagtatatatatgtatacacatatatacatatagattcatgtatactttattgtttcttcattaattgaccaaatgttttgatggtgcctctaaataagtagtacttaggcaaatctccactcatagtattgtggtaaaagattaacttttgaaaactgcccagagaacagctttctatcacattaatcatgagatacagttttgttttttccaatgttctggcggccattctcatgaggatggactgtgctgactgatctcagtgaaagttaccagtgggcatgttctcggggcctctctgtccccatgaagcatccccactcagagacatggaaaacctgtgagatgagctcatacaaatgatttctgggatgaaaatagcaatgtgagatagtgccaggaacttcaggttcacagagtataattaagatttttcctgaatcattgcacactgtaatttcatcacatcattatgtacgttctttaattatgggctctaattgcccattttagttctgtaattagacataaagacattaattttgtaggtataacaatcagctcaaatgtacttccaaattctttcccctacctttcaagaaaaattaatacatcattaaaaagtttgtgcacagaagagcctcttagagggcagcttttgggagccagttggtgttctcaaaggtggggccccagttcagaaagggtatgggaacatcaccctcttatattccccataaactgtgttgcttcatgtcagatagaccctactgggtccagggcagggaagagctccattaattcacatagggccgatttctcttaatcgtaaaattttaaggtgacatcaatgcttaatgagtcatgggagaggaatgaactaatgttagggcaactctggctttttatttctcttgtgtcctattaaaagatgagaagatgaagcattttaggctcatggggtttgtatttttcatttgtgcatgggtagctgattatcatctgtcattatgtgcgtgtgtgtgtgtgtatgtgtgtgtgtgtgagagagagagagagagagagagagagagagagagagacagcaagagagagccagaatctgttttttaagaactctcaatgattcagatctccattttttcccttcacctacagcactttagttaaaacaaaacaaaacaaaacaaaacaaaaaaaccgacgagttccagcatttccccccatggaccatgctatgtccatttcagccgacacattttacatgtgtatctatttgcctccacttacaaatccaaggaaaaaaaggcagtgtggtagagtagaaagagccttagtaagggtcctggcccctttttcttccctttttacacatactctctctctaggtaatctctctattctcgtccttaaaggccgtttatatgcttttgtccctccaatttatatctctagctcaggcctcatctctgagctccagattagataacaatcagaatgcttatttctacttggatgatttacagataatttaagcttgctgtgttcaaagctgggtttactttcctccaaatgtattgcttttctattcttcccaaactcaataaatggcaaaaccatccattcaagtactcaagctgagtcatccttgattattctttcgacatatgagccatcagcaaggcttgtttcaccctccagaacctatcttcaatctgtctgtttccctctccctcaattcaggctgcaatcccaatgcagagtgttcagtaaagcaaaaggggtggtctgctctcaccaaaagcaatttgcatgctcttaattcacggatggattacctagcacttaacacagacccagatatatttggtactcagtaatatacactgaagaatgaatgagtgagttaatgaattaatgaatgaataacagaaactctacctcctaggacttaataatacagagcaggattaacctgctttcataagtaatcagtgaacctggtaaagtgtgacatttatcttttggtgaaagcagctcaccccttttgctttactgtttcaccagcaatctctgttttatttttacctgttcttttggacacacaatttagtcagaaatttgcacctgagtcttacttctgccacctgctagtataaagatcaactggtgcagagcactatacagagattatttattgtttgctacaatgttggatatagagtttcctctctaggacctctttaactgggagggataaaaatggcacaactaaattttcatgatttggataagaagagaaacattgggtgggcatggtggctcatgcctgtaatcccagcactttgaggggctgaggcgggtggatcacctgaggtcaggaatttgagaccagcctggccaacatagggaaaccctgtctctactaaaagtacaaaaaaaaactagccgggcatggtggtgggcacctgtaatttcaactactagggagcctgaggcaggagaatgcttggactcgggaggtggaggttgcagtgagtcaagatcatgctattgcgttccagcctggccaacaagagtgaaactccatctcaaaaaaaaaaagtagaggagaaacattgcttcattcagaaagtgcttcctaagagattcccatggtccagggatgatgctggatggtggagatgtagaataatgtagagattacagggtagcagggatggggatgcacttgtaagccaatgagtagaagaaaggggttctggcggtggcacagcagcaaccacaggacgaaagcaactgcagaggacatgtgctcaattctgtgaggggacgatggcgggacatggaagggtcctgatcatgtcgatgttgatggcaagtctaccagtcaaaaggaacaggtgagcaagggcctgtagcctggaggtggcttggggctttcaaggaaccactttgttagacctgctaaagcatgtgtttcaaagagaatgtacccagctcgaagacttgcacattgtaggcacttagctaatatctgtttaataaatggataagtgaatataagtggcagaaagacagctgagttgctgggacaggtgagatcatggaaggccttgtgtatcatgctaggatcagtaatgggaagtagagaagtggtcaatgaagttttatttaagcagaaaagagaccctattgggttgagttttagaaaaatccctgtggctgcagaaaagaggatggtttggtgggaatgagactgaagtcatgagcacagacaggaagggtaactgaacattttgagagagctgaaagtgtagacaggaagggtgttcaaagattgttggagttcagagagaagtcctcggcctggcctagcagtgtagacagccaaagacagacaagtagtggaatgtcacattctagtaactgattgaaatgtgtgtgtgtttataggcaagtgagttgaaaactgtgtgtgtgcttaagttggaatgtacatgtgcatatatgaaggtgatttgaagtgtgtgtgtgtgtgaatgcagtgtgtggtagtgcattggaacgtgtgtgtgtttacatgagtgcaagtggacagtcaagaatggtgtctaacacttacctatttggtctaaaggctcataaaacttctgccttactcctggtcacatgctccaagtcacaagcagaaatgggcagaacagctcggccttgtaattccagcctgactcacactaagctgtttccaaccaagtgaattaatttctccctccttatgcccacacagcactttcctctacaacaattgttacaccactgttgttattagtttatataatactttaccccctgctaggctgtgaaatcctgaaggaggagaaaatatgttatgtatcatttatctccagagtctagctcattcaggcacatgctaagttctcagctaatgtctgttgaacgaactaaaagaataggcacacttttatagcttattaagctcaaacatagactccaaagcaaaatctcatcattgcctcttgcacattttggaaacaacagcaataatagttaccatttcttgagaacctactgtgtgcaaggcacagtgccaaatactttgggggagccagtgattttatgtgcaatgtttttaaaagtccctggagttaaaaaattcctaggaggtaaatattatccaccccttccacagatgacggaagtgaggctcactaaggataagtaacctgccaagttgcacagctagaaagtagagagctgaaacaggaactcaaagcctgggctccgaacaagcacgccctgcagacttcccttccctgtgatgccccatgctcagttttctattttctttatagtggaaaagtcaatgcccttcctatgagaaataaaagggtttaaagtggtcaaaaggaaacagtgtttcctctgtgctcacggggttttggccaatcacagagggtgaaccaaaaacaatattatgcgagatgtggccagtttgggttgattccagctttggatgctgtgagctggatcccaggagcacacgaggaaaaacgataatagcatacttgagatccaagcccatgttggggtgaggatagaggttttgctttcctcaaactattgcatttttcttttcctccctaagggtccgggcaggatgcttcctaccccagggggccacttccaaatgctgctctgtcacttggtggaaaacttcaaatttactgagggtttactgtggaagacttagtcaagagggcaagtaccctatatctccagattgctttgcacatgttggcattcaattaatattttatttgtcaatggatttaatagctgattacagtttgcaatgctctactcatggataaatcagttgatcttctcaggcttcttatgccttttcccagtggatttttcattgtcgtggataaccccaggaaaaagaggaggcacagaggaacctctcttacatgaataggtggggggatgcaagggaggacttctagcttttcttctcctgacttttctacattccccaggttgagtgactcgtctccatcttttaatttagcatcttggaactgaacagcacctcccaagcaaccctcacctgggaaccaggcagaaacaagtgaaaatgtggaggaggtgtttatgaatttttgggcagtcagtgatttcagggatccaggaagttattctactttctaaaccacttccccacctgctggatatgaatgtaactccctcagctttcagctttcacatctactttatatacaattctatactgcctctcccattttatattatttatacctatgtgctgggacttgagcaaaggtttttttattttttatttttttttattttttaaactttgtacaagggaagccataaagaatttgggcaacttgtagggaagagggagagtgaatttggtgaaaccgaaagtcagtaaaggtcacatgggagatgctgagctctgcagacagatctttcaacgtgaagcagcagtgaagaacatggctctggagtcaaactggctgagctaaagagttgactttgttacctactagttacctattggtagttacctactagttatctactagttacctacctctgttacctactagtgtgaccttgggcaggttaagtaactttttgaacttagtttactgatacataaattagtgataataataattcctgtctcataaagttaccgtgaagattaagtgaggcaatgtatgtggagtgttaaaacagtgcatgacgcagagtaaacacgttaaaatgagctgttattaatatttggttgctaaaggtctgtcctacctgatgtgtctatctctttcaaatacatcctctgggatttagcactagaaacagtcttgcagaaagttagagcagggaggaaccctcaagatcatctaatccaaagtcctcttttgtaaatgaggaatcactggcccaaggtcacggagtaagtcactgagtaatccctctggtctgttgcccagaatgcattccttcccacaaatctggccatgcttgtcctggagggcagatagactagccttccccaggtaaccttgtatcttcccgtaaaaccgtctgtcctcacaaagtggcacaatttctaaggctccctcgggcaacaaagtaggttgtgttcagagaccagtgaggtggagaaactgcccagccactgaactccaggctggacttggtgagtggcactcagtggagtcagagtcctggagacctgcacatcagggagagggtcctgaagaggtcttgaaataatttgacatggaaagagaaaatacaaattttcagagacacagataagcatcatatttttaagccaagaactcagttatatttttgacagtgtggtgtctacagtactaaggcatgttcttacaagagtgacactcactagctcttttttttttttaactttcattttagtttcagtggtatctgtgcaggtttgtcatatagtaatggggatttggtgtacaggtaattttgtcacctgggtaataagcacagtacccaataggttttttttttctgattctctccctcctcccactgaccatcctcaagtaggccccagagtctgttgttccactcctagcatccgtgtgttttccttgtttagctcctacttgtaagtgagaacatgcgatatttggttttctgttcctgtgttaatttgcttaggataatgagatcatgttctctgacatggaaagagaaacacacaaattttcagagacacagatgaccatcatatttttaagtcaagaactcagttatatttttgacagtatggagcctccagctccatccatgttgctgcaaaggacatgatctcattcttttttatggctgcatagtattccatggtgtgtatgtactatgttttctttattcagtctaccattaatgggcatttagtttgattccatgtctttgctattgtggatagtgctgcaatgaacatgtgtctttatggtagaacaatttatagccctttgggtatatacccaataataagattgctgggtcaaacggtaattctccttttagttctttgaggaatcaccacactgccttccacaatcgctgaactaatttgcactcccaccagcagattatgtgtttttttttcaaccttgccaacatctgttttgttttgttttttaataatagctattctgatgagtatgagatggtatcttattatggttttgatttgcagtgctctaatgattagtgatgtcaagtatttttttcgtatgcctgttggccgcatgtacgtctttttttgaaaatgtctgttcatgttctttgcccactttttaatggggttgtttggtttttccttgtaaatttgttcaagttccttatagattctggacattaagtctttgtctgttgttcccctcctagtttgcaaatattttctcccattctgtaggttatttactgttaatagtatcttttgctgtgcaaaatctttttaattagttctcattggtaaatttctgtttttgttgcaattgcttttggtgtcttcatcacgaaatctttgccaagtcctatgtccagaatggtatttcctaggttatcttccaaagtttctatggttttaggttttacatttaagtctttaatccatcttgagttgattttcgtatgtggtatataagataggggtccagtttcaatcttctgcatatggctagccagctatctcaatatcatttattgaatggagagtccttttcctagtgcttggttttgttgattttgttgaagatcagatggttgtaagtatgcagcattatttctgggctctctattcaattacattggtctatatgtctgtttctgtatcagcaccatgctgttttggttactacagccctgcagtatactttgaagttaagtcgagtaacatgatacctcctggtttgttcagctcatttctttcttgttgaagacttcagttcaatggccttagtcatctttggaatggcatttaggattcagttcaatgaccttagtcatctttagaatggcatttaggaaaatggactcctttaccaaaaaggtgaaaaagaaaataatataacccaaccttaaagactatttttttaaggggagagggagaggactttattcataatcctatcagctgaacacattccagtcttcttctataaaaacacaattttttataaagttgaaattatggagctaagacatttctaagaagacttaatttcagttagggacttgctgattatctttgggtaagtcagtctggcttcttttctgggaggagtgttgtgtccatagagacgtgaacatcgacgtctgcttgtttttgtgaggaagcatggtagaatgaagagaacgctgtctggagccaaaagatccagattgaaaccagactttaagcctgggctctgcttccccttttgctggatgaccttgagacagtgtcttaaccttcctggatctgttttttagcttttataaaatagatcactggcatatcagcttgttaacgtgcactgtactcagccttgacacacgggagaaaggttttcagggacagggtgaagatttcatctatatgacctttgactgcagtttggttggttgggttacacaatctacaattgtagattgattgagagtcttttgaaatatgtttttctttatgctagttacccaggtcctctcctctctggtgacagtggtaatttaccagggcattgtgtcctcttttcattaattaggccactcaggcctacccgaatcccaagagaccatttatggatgatgaaggtggtaagatagggttgtagtatgttggacctgctgtcacaaactaccatatgcagggtgacttataattaagagaaatttatttttcacaattctggaggctgggaaatcctagatcaaagtgccagcagatttggtgtctggttaggcctgcttgctggttcagagataactgttttcttgctgtgttgtcacatggcagaagggggaagagaactctctggggtccttagtataagggtactagtcttatccacaagagctctgtcctcatgatctaatcaccccacaaaggcttcaactccaaatgccatgactttgggggtcagatttaaacataggaattttaaggggacacaaacattcagtttatagcagagagtgtatgttcacagcacaggaaggttcacagcagaagggagccattaattgtgtatagactttcatgtctctgctctgattcattgtataatctgcttcattcaaaggaagaaggtaaattttgggtccctcttggaacatttaggtgactcccaccaaatacaggatagctttgagttataacctcatgaagtccctggtcatgtctgtgtgtttgctttggaccagacccaagggcctgtcctgtgtcctgcccgggctcctcccacctctttcctggagaaacccacagtgagagtggagggtgggggtccatgtttatcttggtgggcctcactggagctggacactgctgctctgtttgcccaggcttaagtatgcatctccttttttaactggccagggactttcccccagtcacttggcctgccattgatttgggacttttctgcctaaaacttctaggatgataaggagagcactattacccactgcctgcccaaacctagtagcaacagcagctagtcatgaccagcattcatggctgcaagtactgtcaggccaggggcctgaccagtgaactggaactttacttctctcccaagtgggattagagttcactgagtaggtggccctattaaaatatgtatagcctgtgctaaagttaattctaggggtgagaatgaggcagctctgcttgctggctagcccaggctggcaaagaataatgggtgcaagcaagaataccagagccagattgggttcaaattccaattctattgcttcctaggtatactgacttaggcaagtacttctatttctctgtgtctcagtttcttcacttgtgaaattttcatattttaaggattttgaagatatcattttgaggcttaaaacaatgtatttacttatgtttaacacatgtaattactgatgtttaacttttttggacttataaaaatgacaatgtttagcagagtgctttaaaaacatgacccaactatgtgctttctataagaagcccctttgaatataatgatatagccatgttcaaagaaaaaggatgaagaaagctatattatataaacattaattgaatgaaagcaggagtagctatattaatacatgtgaaaatcctctacaagatattagcaaattgaatacaaccatgtacaaaaagaattacacatcatatcaaattagatttattctaagtatgcaagactggttcaatattttaaaatcatgtgattatattaattgatgcagaaaattatttgacaaaattcaatattcattcatgacttaaaaaaaactctcggcaagttaggaatagaataattacctcaattaaaaagtttacagctaacatcatactttgtgaagaaggacttaatgttttctccctaagacagggatcaaggcaagaatatctgctcctgccactcctattcaacatagcactggaaattctagccattatagaaaagaaattaaaggcatacagattggaaaggaggaaataaaactatatttgaagatgacatgattgcctacagaaaaaaataccaacacatttacaaaaaactctcctagaactaataaattctcctagaactaataagagaccacaggatacaggctcaacaagctcaccggatacaaaaatcaattgtacgtctacatacctataatgaacatgctgacaccagaataagaaatatagtgctaattttaatcactcaaaaataataagtgtaagtacatttaaatatattatatttgtaatgtatattatgtaagtttaaatataataaaacatacataggacttgtatgttgaaggctacaaagactgatgaaagaaataaaaagatctaaataaacagagagacatactatgttcatggaagtacttgacatagtaaagacacaatatactaaagatggcaattctccccaaatcaatatatacatttaatataattcctacccaaatctcagcaacgttgttttttttaaaatagatagaaagaggattattctaaaattttgactaaaggctgaggaaccataatagctagaacaatttttaaaacaaactaagtgggaggaatcagtctaccctatttgaagacttattatatagctgtagtaatcaaggctgtgtggtattgacagaagtacagacatagatcaaaggaatgcaataaagaattcagaaatagacccacacaaatacacctctgtgttgccttatttttcagaaaagctctagactcagagtcaggaagcccaggtttaggtccttggccttgcacaagtgagttcttccagttataaaactttgattttctgggtctaaatcacttaaacttttctatctcagttttcttttctgtttaagggaacatccttccttcttccttccaagcctctatttgacaaggatgataaaatatctttcttttttaagcataaggaattctacaaaccaaaagaattattacattggttgatgtgaataacacatctcaacaccatgaggccctgactccgcaaacctgaagtcaaatgccaagaactttcatgaaatttattaatttattttttcttcccaactaacaccactaattctttatttggactccttaaggagcatgaagaatgggactcattcttgcagaactgtttttagagtttgctactgctcaaagctcagagtttggccatgtgaacttctgagaagtctgtgaataagagattttacagcaatttaacagtggttcaaagatagatgctctgtctcccagtagaatacttgtgcttgtgtgggcagaaaattcttaaaatgattcaaaccaaccacccaaagaggattatatgtaaattcatattgtgtgggtcctgggagctttgaaaaccacatacacagagcacagaaacacacaaacacacccaccaacacacacacacacacacacacacacacacacacacacacacatacatgaatagcacccttagcaccattgctaccttatgtgattcctaccatgaaaatctgcactttaaaaagcaggaaaatttgaaatctacagatgtggataacactcaaacttgaattgggacacaagaacttttccctctcgggctagtgagatagtacggcctagtggctacaagggtgaattctggagataaattttctgggtttaaatcacaattttacctttcattaactgtgatttggggcatgttttttaactattgggtgccttggtttgctcttcagtatgattggaataattatatacaaaatatacaatatctatctcacagtattgctgtgaggatttgaagaaatcatttatactaagcttttatgcatgaaatatatttagaacagagtgaagcagaagtatctgtgttctttcatagaatgtatgaatgaaatgggacagtgggtggtcactgccttaaaatactataccatatattttgtcatggtgctattgcaacaatactcctaacattatgtatttctttatttgagtcactgaaatacaaatatgttctgagaagagtcagcagagtgatttacaaactagctttttagactgggaggcacactggagatccaggttgggggcctgggtctaatctcagggctctacttttttaacaaggtatataattgtggacaagtcaactggtgttcctgaacctcattcttacctgcacactgaggaggctgaactgggtgatctcggaggtcctttctggctgtaatatcctaagagactggatgctccctaggcaaggaaactgttttatcgacgtacatactgtggaagcttactaatgcaagtctttattaagtagtttttctgtagcagccgcttttctaagccctttgacctatttaacccttgcagcaatcctatgaagaaggatttatcattatccccattttacagataaggaaactgaagcagacagaggctaagtgatttgcccaaagaccatatggctattaagtggcagggctgagattcataatccagtaagttgaggtacgcacaccaggcattctattcagcatcagacagtgctaggcaaagaataaccgaagaagagggactgtgttctattcactttgttttccccacagatctgtaagagtgcctggagctttttataggttctgaatagatatttatcattcttgcagtggcttgatcttggctcactgcaacctccgcctcttgggttcaagcgattctcctactttatcctctggagtagctgggattacaggtgcccggcaccatgcccagctaatttttgtattttttttttaaattttattttaagttctgggatacatgtgcagaacgtgcaggtttgttgcataggcatgcatgtgccatagtggtttgctgcacttatcaacccaccatctaggttttaagccctgcatgcattaggtatttgtcctaatgctctccttccccttgccccccaccccgtgacaggccctggtgtgtgatatcccactccctgtgtccatgtgtcctcattgttcaactcccacttatgagtgagaatatgcggtgtttggttttgtgttcctgtgttagtttgctgagaatgatggcttccagcttcatccatgcccctgcaaaggatatgaactcattgttttttatggctgcgtagtattccatggtatatatgtgccacattttctttatccagtctatcattgatggacatttgggttgattccaagtttttgctattgtaaatagtgctgcagtaaacatacgtgtgcatgtgcctttatagtagaatgatttataatcctttcgatatatacccagtaatgggaattttttgtatttttagtagaaatggggttttgccatattggccaggctggtcttgaactcctaacctcaggttatctgcccgccttggcctcccaaagtactgggattacaggcatgagccaccacgcctggcctatcattcttgtttttgttgacgacaaaaagttgttggattaaattgctttcagccttctgggttgctaagtgttgcagagttggctgtgttaaatttcattttcttttgttaatgttacccacacaaggtgaaggttttggttggggctcaggagggctcctgactggggagaaagtgggaagatccagagcaaggagaagacaatgaggctgccaggctttgggctgctctggcctctctgctgcctgccactgtcttcatgtccagcctcgctgtgtttctataaaggtggagttgtacctctctgatttcccctaaaggtggcctggatgtggtagaagaaagaggaggcaaggcattacctgcacctggaatactgatgagtggtttgctctttcttgtatgcccagtggcctggtcttaagcctaggaataaatgtagtcaccatggccataaaacggccccactgctgggcttgctttccctggcctctgtgagttccatgctcattatatggactccccatagcaacgttgagagcttgcttatcatttccagaagtgaccatggcagattaggaatatatgtttattttgaagtgggtttttttctttttaaattttacacattgttggatgaacataacatcaagggctgctttcccaactgtcttaggaaaagagctctaatgttggagccagtagccctgcgtgttctcatcccagttttgattataactgactataatactgtaatgacactctgacctgtgttcttttatgactgagatttccggtggggatggaggaggtgtctgatgtacagaaccagggggatgctgcctgagccaggttggggacggagagaagaggctgaatttcaagacactgacatcatcagtactggccctagtgcagttacatacctggtcctgcaacaaataatgagtatttagggcacatatgccaagcattaatggggtcacgaggtggatcgttcttttgggtgcccttttatatgccgctgcaatcagagaagcaggacaccatgtaggtgagcatctgctgttttcacagctatttgaagctgcaacccagtgtactaaaagtttccaggctgactcagtccaaaggtgactgttttggaaactttgaatgagattggttcggcaacttcagtgttatgtaagtaaaaggatgagagcagttgaaagagccactgctctggacatgttctaagtggcttctaccaatgggaatacgtgagcgtgcattaagaatgtagcaagtgagactgacatgtctccagtacaagcacagcacgtacaaggacacaacttcatgtttggttcaatgtgagacttctctgtggctcctttctcttcatttgcacagatatctgtaccacccagtataagtggtatactaatcgtagctagcctgtgctgcatgcctgctattttctgggtaattcccatgtgttttacacaggttaactctacttcctctcatggaaactacttgttgtcgaaataatggttatattttaccaatatggcaactgaggcacagagatgttaagtgtttcagcccaggtaaataagtggttcaatcaggatttgaactcaagcagcacctaccttggagcctaagctcttaaccacagcacttcactgaacctataaaatacatgtttattggttttaagctctgctagttgaagaacatttatacatgtctctattaaaaattcacttgtgtgtgggttatgaattcacccataaagaagactgccatgacgcacggaggagggatgtctgtggagcttcaggagacgtgataatccacaaactgtcctgggttgaacttagctattattctgccaggaaactgtctggagaaggtccaggaaagtaccaagaagtaaagaagtacctgagagtgctcagctcccagtgtgtcccttggcacctgccagtcacagcttggttggttctggctgtggggccggccttcctgagacccttgtcagggggctcataccctggtgctctgttttcactgatgatgaagcctcagagcccttggtcccctcatgatgttctgcgggaaaattgtgcacacttttgttgtgtgacttaggttctttaactcaggctggttgacatggagcttggttccagtgatcagtgctggctttagatatgatttgcgcatctctgcaggctagtgtcacgctgcactgtggatctggactgtggctcgggtgccagttgcaacatagtcttcaaggatagccaatggcgagacaacagcactctgtcatgcagctgaagttatggaaacacatgatgtcacatgaatgtctattgtgtgaggtgatggttaatacctgtgtttccaagaaagtgccaggtactggctagtcctcaccacaaccctatatgtggtaagggcagttattaagcttattttataactgaagaagcattagcaccaacagagaagataacttgcccaaggtcatacatgaaaaccaatggagaaattaaggtttcaacctaggcagttaaggcctaaagtctgtgctcgtgaccaccaagctatctcaccggtcccctgtcaggctttttaggggataaagtacagagtaaagtagaactttcctcaaagactgtcttattggtctcacttattttttttttttgttagtctttgggtttactttaaattgatgggctgctggaaaaaatgtaaattgtcatttaaaaagaaggcatcaaggttttgtcttaggttaatttttcaaagggcttaccaagaacacagaagacagaatgccagctgggtgccgtggctcacgcctgtaatcccagcactttgggaggccaaggcaggcagatcacttgaggccaggagtttgagaccagcctggccaacatggtgaaaccccatctctacttaaaaaaaaaaaaaaaaaaaaaaaaatagccaggtgtggtggtgcatgcctgtaaccctagctgcttgggaggctgagttgggaggatcccttgaacctgggaggcagagattgcagtaagctgagatcatgacactgcactatagcctgggtgacaaggcaagacaatgtcaaaaaaaaaaaaaaagacagaatgctgagcaattaagaactactttatttagtcctgtcttatcatttgtggcctttgtgtattgagcacgtcctgagagctgggcactttctaaatactttacatgtgtttcctcactttatgcttgtaactgctttctggaagcaggactgtgattattcccattttatggaagaaggaaatgaggttcacgaatattacataatctgctcatagtcacaaagctagcaggtggtggggctggcgtagaaacccaggcagtctggctccagagtccatgttcttaattaaccactcctctagggtggaaagctcactggttttggggttaggacactcatgccagctctgccaaaatgtcaacatgtgtgacactggccaagtcatatctcctcttgggttctcattcatttatttactgattcattcagcagctctttccagcatacctaccatgtgctaggcattgttagtactagatacataacgggtgataagatagatttcctcgatgcttctgtagagtttacagatggattttcagtttcctcatctgtaaaagatgagaattaaaatatatgaatgtttctcatcctttacaaaacccacacatctttttataaacataaaaagttatgccttccctaatgttatttgaaatttctgagtaaataaccatgactaaaaataaattaaagcaattataatagtgagtaatttttgtttgaatcacacaagccctcatgcctgttcctgaggagattctcctgcgctggccctctgagccctgggcattctttcggttaagaatcatgggaatagtattcttgctctaaaaacggacctacagttatattttttaattgctttgaaatgctggagttgtgtctatttaatttgtattcattctttcaccaagttttggctcttgggtttgtatggcagataaaactttactcattccttttactgaaaacctctttcccccccagggtatagtcgtgagtcacgagctctctcaccaactgacatttccccatcctgtttttggagggaacaacaaaggacatgcctggtgcctgacacagcgggcccacaggctgctcctttagtggccttgtgagttcgatgagcttttggctctaggaagtgcctgggctgctattactctgtgaatctcatgagattcacagacctcttaggagcaccagccaggttgtaaagatctcttgaggactgggctctggaaggactggccactccaacaccctgccttgcccttaattgtgcattgcctggtgttctttaattgcctcacaaatgcccttgaaaactctcagggatggcctcactgtgcatgacaaaggaatgcaacctactgtctggttgtactgaaggagcagagagcaggattctcataatgattgttcaaagaatttatttatgtggagtcctaaaaggagtgataggtgtgaaaaaatgcaatttaattcaacaaacattgatgcaaacgctgtgcttggtgacagcaatatagagatgaataagaccagtgtctagtgacgtgctggcaagtacaactggctctgtggggaggcggtaccctgatttgtaccttttgctgatttccattgagtaaatactcttgccatgtttgatttcaagctaccaacatggtgtcaattggctcacagaagccctgaaaatttaataatcagctcttatgagcctgtacaaactgaacttgcattctgctaccaatatctacttttgaagttgtcagtttagattggaagatacataaattgccatgcagtctgataaagacagaaatagaagtatgtagaaggtagaaaggtatcacaagggacactggttcaattctgcggtgggcatatccacatggtaggctgcaaacaaagacaggcaaggcctgtaggtgggtggagacagagaccttcagagcatcctcagtgccttcaggtcatggggaaatgccttggcctgccttaaggtcccgtgcagtctagcctcaccttacctggctgaacattctcccacatttactgacacaaaccttctgctctagtgagtccagcccagtgttttcagtcttgagagcacatccctgccttggctgacacccacctcctcccaccaccgtttagaaagtgccttccctccacctccacttccctgctctactcatccttctttatgaatgcttcctacaacagctccaagccacagaaagcactgacagaaagggaaagattgatcacgtgaattccattaaagtgaagaatttatgtttatcaaaagtcactgttaagaaaggaaaaggcaaacaatggagtcagaggaactgtttggaacacttatgaccaatcgaggatttgtattcaggacatgtaaggacctctcacaaatcaataagaaaaagacaagaaaagggaaaagagaccagaacaggaacttcacaagaatggatatccaaatgacatgaaaagaagcttgccttcactccacctttacctcagtcactagggaaatgtgatgccactacatacccactaaagtggctgaaaccaaatagacttgtattaccaagcattgttgaagacttgaaagagtgggaaataatgtatactgctggtaagaatcagacatggtataacctatttgaaaaacagtttggcaatatttattaaaatggaacatttgcatactctatgacccagcatataatctgaccatactctatgacccagcatatgatatgacctagctataatccaatgaaaatgtatatccatatgtttacctaaaagtatgtactggaatgttgatacagcatcattagttatggctccaaattggaaatacccagacattcatcaatagtaaaaaataaattataggctatttgtgaagtggaatctttttaaactatgaaaaagcatgacatactgctccatagaactacatggatgaacctcacaaacctaattttgagcgaaaggggccaaacaaaaaagaaaacaaatggagttattatatttatataaagttcaaaaacagacaaaactatatgaggttagacatcagtttacctgatacctttggggaagagcaagaggttagtgactgggagggctgtgttgggggcttctgagttgctgaggttgttatatttctggccctgagtggtgataacacaggtatgttcactttgtcattgagctttacgtgtgcaatttgtgtacttttctgtatatcttacatttttattagctaaaaagcaaaggagcttctgcatgaaagtattagaactagtgctggaaagtgagggagtgtttctgaaccgcctttgtgtttttcttttgacgttttctatctttatgagtttattcatcaaacaaagacattttgagagtgacaatgtgccgggaactattttaggtactgagagtgaaacaaaatagaaacaactgctgctttcatggagcttacattctcaaggggacagcaaggtccttgaacagacaaatgtataacaagtcaggggataagaaatactctgaagtggtattaggggataagaggataaagaataatggagctgggctgagggtttgggcactgactaggtgttgttttatatggggtggtcgaagaggacctctgaccaggcagccttggagccagagcctggatgaagtgagtaagggaggctgacaggtatgtgaagaacattccaggcagagagggcagtaagcgcaaaggccctgcattgggatccttggcctccgaagcaggaaactcagcatcattcttggcttctctctctcttcttcaccttcatatttgaatcaaatcatgatccatttgatttcatagctaaatctctcatagtttgcaacctctgcctcccaggctcaagcgcttcttctgcctcagcctctcgagtagctgggattacaggaacatgccagcacacccagctaatttttgtatttttagtagagatggggtttcaccatgttggccagggtggtctcaaactcctggtttgtctccatcccctccattgttgcctatttgggtaatagtttcttaactctgccttcccgtttccatttttttctcttctgattttaagtcactgactggatatgccactcctctgcctaaaagccctccagtggctctgctttgctctcagagtaaatgccctacaaggttttggttttcctcactggtctcatatctttctgctttgccgtacactccgtgcttgagccacaccaaggcgattccatgtttcccacattccctctgaggaaaggccctttagtctctgggtctttctttatgagggtgcatctacctgtggagttctttcccccacctcctcattttatgttttgcacatcccttagatctcagcttagatgttgtttagtctgggaagctgttcctgtcccttaaaccttggccaagtccctgtgttctcctatcgttgccccgtcatatcattttgtcattgatttttcttttttccagcctcccatgaaactctaagacacatgtgggaagtaactatgttacttattcatagtgcttagcaaagtttctgatgtttagaaatttctcaataaatattaaaaaaagaatgcatgttgagctacatttctgtgatatgtcaaaaatctagaagtatttttattagtaactgatagaaatatctttcagtcaaaacattattcatcaactcacaaaaaagcagactagctttgtgtttgagttttgtttttgtttttcctggtaattttgtgttccataatttctcagacacagaaacattatctttcaaattttaataccactttatttgactcaatcacatgtaaaatttttgttcagagaattttgaatgtatccgtgaaaaatattcaaatgtcgaaatccaaatgtcttgctttggctgtggagcaatatcattactgtgacttagttctagaatttagacttaattgctaaaaaaaaaattttgaattcaactttattaattttgtcaagtttttgatgtgctaggtggacattctttccaatttattacagtcccttcatatagacacaaaagcttttaacacgatgggaaagctggtgagacaagtcagaaaataaagcagctcttttttctttttttgttgagacagagactagttctgttgcccaggctagagtgcagtggtgcgatcttggctcactgtagcctccacctcccaggttcaagcaattcttgtgtctcaggcaccgaagtagctgggattacaggcagtagccaccacgccggctaatttttgtatttttagtagagatggggtttcaccatgttggccaggctggtctcaaacttctgagctcaagttatccacctgcctcggcctcccaaagtgctgggattacaggcatgagccaccgtccccagccagaaagccgtgatttttaagctgatgctttgtaccatcagtgtgaggagtgatgctattgatccctgctgggcatgagcattagaagaaagttgagcagggacttaaaatggggatgtggagcactgtgccaatgtctttcaaatgggcttttaaaaattattttaacaggattatttggagaatcataaatgtttgagcctcagatacactcatagctaccatttactgagtacttgctatatgccaggcactataaaaactgctttaaatagacaatcttgtttaattgtaataacagtcatatgggattgttaccatcattcccatttaacagatgagaaaattaaggctcagagaggttgagtggtttgccctaggtcatatagcaggtcaaagctaatgctgaactatgaacacagttcctctgactgaaaatgtgcaaggctactaacgactaggtcctactggcttatgtattgaaaagtagatcaatgaactcattctggagctaaatgttgtctattactgtggattatccatgacataacccactcattatattccagtattggttaaaaggtaggagagaagtgatagtaaatttcatgggttcggcatatcttctgaccgacagaagacatggaaatgttttaaatgtttcttttcctttttttttttttttaaaaaaaaaacaaaaacaaataacactaaaagtttcaccaaacaagggttcataaaaggatcgtctctaaattgtgagtgtggtgagtgtgcatgctctgagcaaaaagagcctcccctttctgagggaattgtgaccctggaaaggaggagagcaggaacagctggccatctccccctgaaaggccagggcccccctctcaggcctctgggctccagctctggctgagggtgtgtttgtttggctgtgactctttcccttctgtttccctctcggtgtcatatttcatgagctccaggctcctgcctgtttcagcttgagcctctggctttcatcgctgcctccttggccaaagctgagtgagggcttgaaaaaaacactgattggatgcacatttagtggaggcgattgctggaccagcacctcaccaatccccagccccaaatgcaactgacagctacaccctcctggctggagcctaaaccagaggcccctttcctccctcctctccacccatacccttgctgtttgcccaactcttcctgctgaaatcagaggcagcttgtgcctcccagccttcttccctgcccccgctgtctgcccagccaccagcttcccctgggctggaaagacccccgcttgtctgactgtgctaatcctctgtttgaggttccagaacttcccaattgttgggcctgggttcctgtacttagctgcccagagtccacttctctgctgagatttctattatacaagagattcaaccagaaccctctccgtgggcctccatgcctctttttgctgaattccccattctcattctgcgtagggggtgggagttggtgggggtacatgcaccttgagtctaatcatgatcttactggggagagctcagtaggaaagtaataacatattcatttaaacaactttttctctgttaatctttttattgaacttcatagaattaatggataaagactattggttagagtgcgtctttcttagacgagatggagttagagacacttaaaaaaaaataaggcttgccactgcaggagtgcacagagcacctcaactattggagcccaggtgatctcttcagtgggtcataaaatctgagtcataagaacctcatggcaaagaaaacttgaaactgcaaagtctcacatagtcatttgctgaaaactgaagtgtcccaacaaatgtcgggttagacctactttgagaaacacattccaatatgagatcgaacctgacaattttgcatgctaacctggactgtttcttattagagcaaaggggatgggctttttgtttgctttgggtgtatttgtttttgctgccaaagtgttgtaatgtcatgattatttaatatgtatgaggcctagttgtgtactagggagagtcaaaatacatttactacgaaatgagaccagctccagttgtttaaacagctccagttgtaataataagagctaagacttgatgccaagcactgtttctaggtattaacttattgagtcctcatgattactcctcacgatggtcctcttggaaaggatcctatttttctatgagaaaactgaggcttgagtgttaaggaacttgcttaaactcacacagttagtaaaggtcagcttttagatttaaagccaggcaccctcattctagagcttgtggctcaaccactgagctatactgcttgttagggttgttggtggagtgatagtagaagtagatgggctagagtttttcatttctaaccctaaaaatctatagctattaacactgaagacagcaactgccaattaaataaatcctcaacaagactgagaagagaatctgctaatctgttggtcactaatgtctgcagtttatctgcttatctatctgcagcaaaactgtcttagaacactttgctgaatgaaattgaacatggaaagctgactgaagggaaaacagagaaggtgggatagttgagaagggagtaagatcagacaaatggcaatgctctgtgggatactgcgtccaagcagaacagtcaagggattcagttctcagaagctgttcaggtagacgccctccttaccagagtcggttagcctcttgctgtatgcacacttgaggctgctcaaagcgcgagggaggcatggtctgtgctcattccaggcatccaaagcaccagggaggcatgatctgtgttcattccaggtgtcttatctcgctgccacttccaggcctgcacattataggcaatatatttactacactctcccttctcctttattttttacttctggatgtgccatggtgaatatttttcaggcaaatggggggaatcgtttccatttcaagctgggttgaaatctagcactatgattagggttgtgctaacctctgcctgcctctcccctaactcctgctgtgtataggtgggcatggctcaagcatcctcagggctgggagaaggttgcatcaggaatgtttctaccaacagaagctggccagtgggaggcttgtaggcactttgtaatttaccattctcttcttgaactatgcagcagtctgaggggctgtacagaggattcttcccagtcattcccattgctagctttggaggccttctcccacaattcatagcctcctagtaatgtgctttattcctaaagcccagtccttggggtttttgaagaaaaggaaggcagatcagcatgccttccctagtctgaaattaccctgtttgactcatatagtgtggagctttataatctgtaatccaaaattgggattgtctatactataaggatattctctgggacttacgcttatttaaccaaggttgtctgcaatgggaagctcccatgacgggagattcaggagaaggctggcataggcttctaacttacaccagtgctccctgatgcctgtgaatgtggggagagggcaaggagattttgagaacagataagagacatttgaatttctcaatgccttctgaaaacctgtgtgcagagttgaattgaaacttaccttgttagcattataaatctgaacactttccttgctaggccacaatgacttaataatatcgtctaaaggatctatgttcactctgcttgcactgatttacatctcctttttccaattctgcgtagtctctggacacttctacttccaaatatcacctgtttaaggaatagcacttaccttgtcttgtactgtgaacccaaatttctgtgaaaaatggactgtagcagttgttccagtttgagattgctgagtgtcatgaacattggttttgaagagtatggagtgttgttggaggacagctcgaggctaaatgtggttgtgcaatatggtttctacacactgtccagcaggtggttggatacagttatgccattctctgcttcttgtttgttgtcttcaaaacatgaaaaaataaaagcaaaatatagaatatcttcgatgaattcagcttctcttaatctcacttttatctcctttctgtaagacttagtctattatttccgaatatgccatcaattttatccaagtgaaaattcagttttagttttaaaacacacagatataaaaataagatgcaaagttctacagtaaaattcttagacataaacactgagatttttggattcacaaataaatagtttagataacactcagaaagatcttttcctcctaattagcttctattgtcacctcttcctaagttgatatgtagctcaatttgttaggaaatggatttcccatgcatgccctaactataatcataagcatctgcaactctgttttcaaacaaagcatctgcaactctattttcaaacaaaggtagttactcatgagagagcttctttaaactgcaatggaccacacagaggtggatgtctagcacatttacagtgaccatgatcctatctctcaccatttcttcttttcaatattgcaggattctaaccatatgactttcccacccctcacctgatgtttggcgacaatatcctggcttctactggcaacaccatcttttgctatttgggtaaatgtgctccttatcagccttggatcctacccaggctcagggccttgtgagtgcaatgtctattgggctattgtggaccccatgactatgacccagacactcagttttgtatgccacatcccttttcagggagctaggtcaaggacatcatgcaactcatttgcatgccatattgaagattcacacttgggggaatattttattctcaggcagctaagaccttgaaactccagcatagtatggagagtgctgagccttcagcatttttagcacatgatttcagccttggaaatctgatgtacttgcagacctctacacaagaggaggtatttgcatagaaacatgagcatgctggggctgggtcatccttttactacacatgttaaagcatacattgtaaccaaaattttggaagcaatgagaatctcttactctactattgggatttggggtcacagcaagactttggaagaggtattactgagaagatgcctctatgaggtgttactcaaagtcattaattacttacagggctctacgagaatggcatagttcatgtcttaaaaccgcttatagctactggttgagacagaaaaggaaactatgtgctgtgtgattaaaccggtgttttcttttttgcattctgtcttctacatgtgttgtggtgaaatgaaactttaccacattcagcagtgctcaggagaaacattgagcagtgttggtatatatttcaatggcattcaaaaccctgataaataatttaggacttggggagatctgggtatgggaagaagaactgaaaaaaaaaaaaagcagcggtaatttactaatatatgtttgtaggttaaaacactttttatagctgaccgtagtagatagaatcattctttacaactattaagtggtattaaataggttgacccaactcccttggaaaagtgattaattttgtcttccagacctgacttctgaagctcaaagttggtttaaacagttcagctgtagtagaggatagcctgatatcctagttttgccacagtatctgggccagatggcatttgcagtaaatggaaggtaacaatgatcagctctggtatttacgtgtgtaggtgatatggtcatgtgggagtgttcataggcttacaagccatatggctcttggccataaactattgctaggtaaggctttgactctgtatcagtatgaataaagtagctctttcagctcatgagtatccatttgctttgtgtcaggctgatgtcaagttaacctgcttttgcactctggtgaacagacacatagattattaaaactgaaagtgatctaaaaagttatctaaaccaatatcctacatgaagaaggatcctccctacagcctcacaagtaagatgattagtcagcctctacttgaatatttccagtagtggggagctcataacctcacaaagaagcacagcctgtttttggatggctctaatttttagggtgttccctcttatttttgatgaaaatctgcctctctgtaacttccttagtcatgactggagttctgttgtatgagctgaatccttttatttcagaatagggcatcacatatttgaagaccaacattaagtcccagtgtagttttcttttttctgcatgaaacattcgaaggtctttcagtaaatccccttgttttcttggtagggagtcactcatcaccacttttctcttcccactggagctgtattaagctccttgaaactttgcatcctggagatacagctttctagtcacaaagcccaatttaccttctctgagaagagtctagttctttttattagttttagttgtacagtttgggattctcctttttctcctctttgtcttatttttcttcccagcttcctcctcacgtggcgttgttgtgcataaagttctgaatcatatttttcatctttgttcgttgcaattattgtcactctgtcttccttcttggattatttctttcattctccttagaaaatttttgaattctcccatcagctggagaaaaggtatcttttaccttctcctccatcttatactgactatgcaagcagcttatacttaggtcccatgcaagcagtgacttcagaaaaaacaagaataccaacaatgtatcatctcctattgttggctcttggttttgaatagatattccctacccaactagattcatgtgtgcgactctgagtataggtcattcatcgaatgtctgttactgctagagtctttgagtatgtagtctgttgatgtgaacctaaatgtaattggtgttacatgcagtttaaatgtcaccctatttcaacctcatgattctcaatctttatgccaatagctacagtatatttattgtctaccataggatctaattacataagctttggtactgctcgttgtccagaaggatcataatgttagagaggacatgtcttcctcacattatgaaggactaagaaacagaggctcagggagaatatttggctcatccaagattacaccattagttcagcagctggtcagatgctgtttccgataagccactcagctagctaactcccttggcttcaatagagaaagtgacttaaactgtggcatttctggtcttttatactctctctctctctctgtgtgtgtgtatatacattttttcttctttatcacctagcatattttctgatatgtaataagttctcaataaatgctggttaatgaatatttcaagccatcctttccttttggaagttgggaacatgtgtaaaggaagaagactagattgagtgataaagcataaaatataactaggaaagtcatagcttgggatagagagtatatgcagtttgttcagaagtatataaggcattgtgctatgtgccacgatgcctatacagaacgtatagcctagttcctgatatcagtgagtttataatgagataaacgtattatatttggcattgtgaaaatgagataaaaatagagataagactgaatcatatggaaaaaattagtttccagttcaagagaatgttatcaacatcaatgaggagttcagagaagggaaggtaatgaagagcctgctattatgctattgttctcatcagaagaggggtgagtgtgagggaggaagagaggatagatggaagatgagaagagggtgtgtgccagagcactgttgtccatttagtgccagccctgtgtggcaaataggacacaaacctccaattggcttaagttcctgaggtagaagagattaagaatgttaaaaagggaacaaaatttattgagcacctactataggtgaattcatgaatatttcttgatcacctgtctgtggaaggcactgtgttaggtgttagagataaagagagatactatcttcaccttcaagggcaggccaagcagtgtgctaggaacctcacaaaaggaggtgctgaagtcacataagctccccttatgtagttattccagttcctggttttcacgtctaatggatttttccccatagcttctccccctccacccaaccccagcctttccagagtgtgtctgtcttcccaaaatgagtttgatactttgtgcgcatgccgggatccccatgggattgatgacatcatacgccattggctcctattgcacacaagagaggagacagatctgcacattcctgcagttaatgctgagtagaatcttggcagaggtggtggcatccttcatttgactttagaccttcagcctcccttttaaagccctggctcacacagttattgagaagccttatcctgcaaggaacctacagcttaggaaagagttgcccatgtgtctttgctatcaaacaaaagatattggcaaatcttttatcgattttctattctggcagaggtaccatttattatggggtagatgggatatagataaagcatctccctgcccctaatccctgccttgctgagataaatgcctgttccattccccaatcaccagaaaatgccttggagcaatggagtctaacagcctgagagttgtaaaggggcagcaaagccacttctgcaggaagagagtgtgcatgaaccttattcattgtccatgtgtggagttgcttcatgttcatgctcttcaccctgatttgacacataccaacatcaaataactatctactctaccccatttggatactataataaaaaaaagatagtccagttaccttataaacaacagaaatttatttctcattgtcctggaggctaggacgtccaagatcaaggtgctggcagattcagggtctggttagggcccactgcctggtttatggatggcatgttctcactgtgtcctcacatggtagaagcagtgaggcatctctgcggggtctcttttaaaaggaccctgaaagagggtgccaccctcatgacctaatcacttctcaaaggccctacttcctaatactatcacattgagggttagaatttcaatataggaattttgggggaacacacacatccagtctatagcactatctgataaggcttctgaatagtcctgggccattttacataacgggggtttactaaggactctcaacagcatagctcttgcttcaaggggttttccatgcggggcctgccagaatcccctgaagatttgcccttttgcttttgggagaatcattgagagaaaaaggacctggctcctgtgcttttcgcatgctcacccactccggcccttctgattaatgtttgctgttctgctttgcagatgcctcccaggacccagagggagactgtagcctcatttctgtggagacctttggctggactctcctggctctcccagaggtgagagaccgtggttcctgtagcctcaggcttggcaccagctcatctctggtggatccaggattccagatatccaatctcactacagccagggcctctttgtcccagtgtgaccttgtgggctgtccccctgactgcgtcttaacagcccctgccattggtgattttcattccagctacgagccaatggatccctgaaagcgactgtgtgggcttctctcaccatgtcgctctggcctcagcctggcggtgtgctcctctgtggtctggatggggatgatgaactcgggctgcccgttgtttttgttttgtgatatttaaagcagccgaagctctcattactgtaatacagtatgtgcctgggctaaagggggagcagcattccttctggatcagggggcaactctattctgttgtggtacacccgctggagtgtttagaaccacggctggtagatttacagtgccagggctgacaggggccttggaactcctccattttcattcattccagcctcgttgttggaatgaagagggagctgagcccattctgggtatgggacgattgcttaggccctggggtgatgagtggcagatctgggactagaactcaggcccagaggccagcttactgtcatctggctaagtttctgcttctgttctcttcacttgttcaagatccttctgaggccctgaaccaaatgaggaaaattcatgtaaatcttagcacactgcctgatacataataagtgctccataaacgtttatcagtgctctcataagccctgagacatgcaaaatattcttgcccttcagggacttacagtcttgaggaggagataaaaatttcacacatacacactaacacaattaaggagcaatttaagtcactaaatggttatctgctaagttttggggaataggtgcagtggatcacgcaagagaggagacagattattgtggcctagaagaagtgccatggtgaagataagagcataatgtgtatgacatctgtgtatgacatcttttcaactcctggcagtgagatgaacaggtcagcagccattcctggacactgcagagccctcaggccatccactcatctacccagcacattcactgattatctcccaactctgtgctctgcataagaatgtaaggaagaccatgacaagaccctttcctcaagcctagccagggagacagacatgcataaagatactaccactgaaaaattctacattcatatgtgttcatatcctcaaagcatcgtctgagcccacaggtgggtaggcaagtcagataggagcaagagtttgaaggaaagcatacatttacctggtgaaaaggggcaactcacaagccataagctcttgtgcaaaggggctggtaaatgtgagtcttctgcaggagaggtggagttgctgggaggttagacccaagcaagggcattctgagaatgagattgagaagcctctgaggccagcatggggcaagcccttggtgtcacacttggccctggcaatgtggtatttttaacctgggccagaaagtggagaggagcgggcctggtaggatagagaggagggctctttacttatcaagagtaggtaccagatgctggtgactcaaggggaagcttcctgagtggagatggagcctataggtgtttaatcgcctggaacaaacatattttctgcactgcttggttcagaggctgcaagttaaagtaacacagaagagaatgtccggccagcaatgtgaaggaagcatgaaatggaaagggttagaagctgaacttctcttgatcaatgactttattatcttggcaaggattgcagaaactgtaggtgctgagggactgacttgtttggaggaaggggtagggaccaggaaaagaatcccagacacttggtgctaatccaactgctgaatgaggctttcaggctctgggattcaggcaggaactcctgggccatattcttcctaggtatggggctagagagccttcaatcttagtgtctgtatgtccctgggccaatctgctttgttctaccatgcctaacatcagaaaaaaaggggtagattaagtttagagccactgctctgtgtctccatcctgcttctttttcctaaggcaattgagccttacaaggccttctaagtccctatgaggtctacagctgtcagggattggtgaggatggagaacaaaccagtctgttctgaattcaactcttgctttctttctccctctcacaattgaaggtcttcctgagcctttgcctctttcaacagctggatgttgagactgcaatttttcatgattgcttgttttgtattttttcttcatggtctttcctaaagtctgttattcatccaggtccacttatacatcttctaatctattgcaccaaccctgcagccatggcctggcatgaagctgcttgctcattgtcttgttggtttttccaaatgctcacaggcgctagtcatgtaaatctcctcctggcaagaaaaaaagactgactttttgttgttgttgtgttgccccaggtgattcagccagtcctgggctcacaatagatgctaaacatacgattgccacctcgactgctgatctttttcttcctatacaccattctattcataccgctattcaaaaattgatatttataagcacttactatatcccaggaatggtactgtaagttctttatatgcattattccatttaattttaatagtgataccattttctacttttaaccagcttatactttctacactgatagaaaagtgtccctaaacccacagactagttagtacctggctgttttagaagttcctcactcatgacatttctgaagttatcactacaggatatggttgcaaaggcctgggaggagaaatcctttctgtctctgatggtttcagagaaggtgagaggtctctgtctctttgtggtaaaaacaccagggtaggccttgatctcctgagtcttgagtatgttaagggaaagacactaagattgctctgccaaaagggcagacagaccctgcctggtgtctgggaagttgagcccaagtttctctccaaggagggtctcctgcagggatcaggaaggagggtctattggcatcacacatgatctcttctgggttcaggaggggttcctatagctagatgagatagaattgattgatgtctcagtgatgcttcaggccatgttgattgggcctgcactaaaagtaagcagcccttcagagccatgtgctctcaagaggcagcacagccataaccgcaagagtaggatggtcctggtggaaatggcacaatcaaaacaagctcctgggccttgtggctttgagtggctgaactggaaggttcttgaggtatgagcactctcactcacggtattgatcaagcagcgtaatcacatcactgcccccacagaagtggctgccactcagttctcctcagcccaggctgatttctgctctgctggttcataggaaactgcttgggtctttcatgactgctgaagcccaaggcactttccccagaggcagcatcactcacaggatggaccaaatgaaatgtcctggtcaaaggcaggaagtttgtattgttgttcttgcctattttactatcatgtaaatacctgccaaccaacctacacatattctctgagtacttactgagtacttactatataggtgttaatggatacagaaataagagtatggctaggggtggcatgctttttgcccctaacttgcaaatttattgagaacatgatgccaggcacagtgaaaaccaaagagaaatacaaataaatggtaacatttatgagacaggtactaggttctagacacttcttacatgttaactcatttcatccttacaacattcctgtgggcaggtgccattattactcccatttttacaggtgagaagacagaggtgccaaggttcaagtgtgtgcccaggtgcatgacactggtgagaggtgggagacaggactcaaacccagcaagcctggtctcagacaaggtgactcataaggagcagcaagggaggtaggaggcagaacattgagtgcaggggctcagagggtggagggaagtaacttcaatctggtttaaagaaaccagttatcagagacagacagggcctaaagaaggtatgggtggctcagagttttaggaaggaaaaacaggaagttgggctaatagggatagcgtgataagagaacaagtgctaggctggaataccaggggcctggccttgcctgtgagcagctgctgcccctggggaggtcactttgctttttgggctgccttatttttatcacctccaattggagagaattgagaaagatgagctttcaggtcccttcaggtttttaccgtatggttctatgattttgagggctggcatgtttccttggttgcttccaaaagcctctgaccacagtccctcaggctgaccctcttgtgcccagtaatgtggaaagatgaccttctgctcaccagcacatgcttccaagggctgcggagcctgggacagaaggtacggtgggaaagaaaatgagaggagctggttgggaaagatactcacatgcagaaaagtttccagcaagtcagaggtgagagtaaaagatccaaatgaaaagctagagattgctagggctcaccaaggttgaataacttgtccagggtcttagcagactgagggatactggatgataacacttctaaaatactgttttgtatctggaaaatgctctgccttcagtttgcattttctctccttcttcctcccagtaatcaaatgaagacgttagatttgacatttccagtgtgtacagtacagacaggaaactaggtgaatgaagtaatgcagtcaatgttctgtgactccattctgcccctggaagagggatgttttctataatagtcatgtgactcaacatcttcttgtcttcttagaaaggagtgagagaataagatagccatctagcactttcccccctcacctctcctacaaactctagcatctcattttacagaaggaaaggctgagatggaggggagcaaagtagtcttataacaaaggcagaagtggagcttgctatttcatccagtgtgggtcacctcaggtcacctggggcacatcctatgtgcccagatacttacggaaggggtcattctgggcctttggctccacactgaggggctgcattttgagaatcacgaggttgggactcccagaggaaagttgagagttaggaaaacttcaacaaatcctcaggaatagaaacagaacatgagatgagaatgtttgggacagctctgctgtttgtttctgtgtatgtgtttgagggcccatctcttgccaaaaccaagctcatttctgcatatttgtttgcttaatatgaaatactccaaaactgctcttcatatttgtttaatctgaaatgaaaatgactcagcagagaggaaaaacaagatttaaatgccctgaatggcccctgaattaaaatacatagccctaaatcatgggggtgttcttctccccaccaaatcttaatcttcaacacacacaaatgcaagtgccacacacagtcatgcacacacacacacacacacacacaaacattgtatttgcctgccccaacttgacctcagtccctttatctcttttccccttcatactccagcctttccagggtcctacctttcctgcaggggaggtgcatttgagcttaggtggagaggcctggcctgggctacaggccacagatgattttcctggagggccagcacttcctctccagtccagatcacaggctcagtgtcaagatccctgggggaaatctgaattttcattcttcagcaaagtcgaggccacctcagatagtccctagcttttggatctggaaaaatggactccgtggagagaatggctgtctaccaaatcagacatgtcttgctttttacacaagctgtattcctgaaaagttgggtataaactggatcttggtatgttgcatcaattttgaatgtactgaaaagatttgctattcaaaggaacccagcactggattcttttgtcaagggatgaattactttgtaatggctactcatctagtgatttatgagtttggtaagtagatggaatatttttatatactgaatgttattttaaatgtactgtgtgggattttttattcaaagttacccggcattgaatccttttgcgaagaactattctgtagtgtagataaacatttcatgatttatgagtttggtaactttaggcatttcttaaagtgggatatacccctagttctgcttcagagaaaaagttgttttttgcaatgatcagacttggagaaaaaagagttctaccatatttgagttatggtcactcctgaggggcttaggaagaatggaggtactcaaactttccattttgttggagcaaaagatccaggagttgcctgctcttcttactttccatattatcactggggtggaaatgatggaggtatttttccaaagaaatgtagttcactattatagctacatttcaaaggtgtttctcttcatatctatatcatttgaatatatatttatatatatatacacacacatacatatatacacacacatgcacatatgtttatacacacacatgcacacatgtacgtatatacatatataatctatcatgtgtatttagatctaaagcaaagacattgcagtagggcttgtgttttgaaccactgaagggctgctgtttccaccagtccagagtgctggggcttgctctgagatcaccaggggtataaaccaggcaagaggagaacttaacttcctgctcactctttctcacttggcaggtcaaaaatcatttcagcacttatctcccaaggttcctagctgtgtccccataccatcctatctgagcactagtgtgaagcttgttttgggaaatgatctgattgctaaggcagttggaaaagagaaatatggtgtcatgtgtgtacaaccaagagctgatctaggatgcccacatattcctggctcatccatgagccacatattcattgaagttcttataggtaggagcaaaccctgcctataagaaccctacatggactggaactgtgtcaggcagaatgttcagataacttaccctttcaccatgatttggccctgaatgtgtctcagaaaaaggcttttagaagctcacccaagtacagagataatttgtgagacatttaacctctcagactcttgcttttttctttcctggagagctgctaatttctagttgtggctgccacactcctgtctgcctgatcttccattttacttcctggtttcctggtggctttgacacatggcctgtccagatcccagtgggggcagtcctgagatggagagctggtggtcttttgtcagatctgggaagtcctgagccatgacttcctttgaaatcaatttggaatgtccatccagcttggctagggaagaggattttgactgtgaagagggaagtgggttctttactacaaaggacatattctctctgagccacatgctccttgatgttctttggtaaatattgggctgtggtcctagaaacactgaccttggagtcaggcgaactgggatccagttcttactctgtggtcttctaacttagtgacccaagcaagtcaaaattaatctcatttcgagatagagatatgcaagatccttgaccttcaatgactcatggtcaggcttgagagaaagtcaggtaaagaagccaactctaattcagcacaatgaatgggaagcaccagccagaccaggtaaaacagcctcaattgagggtgaagtgacttagggccgtacttttctattgtcaaaaggagatgataatttctctccacaggattgtggtgaggctcaatgatgtaatgcatctataagtaactgataaagttcaggaattctaaaatagaaacaggcagtaattctcaactgttttcttcttccactctattcatgtgcaagatgtgctaagacatttcccaatacaacaagtgattcttgaagtataggacgtgttccccccacacctccaactctcggaaatgcacagaaagtgtccttgagattctgatagcctgcttccaggaaaaatgttttgtttggttttgtcagaaaagctaatataaatgacattaacaaggaacacattttccttgttgaaaatcaaaacattacaaataaggctaaagtctccctttgatcaccattcacaatctcctctgacaaatacagcagtccatctcctaactctgtcttggagggaaccactgctgtcagcatggtgtttaatcttccagatcttatatatatataaatgtacatgagtgtgtgtctatcataaaaatatatagtgtgctttacataaactttgcaaccttcttgttcacctaaaaacatgtcatagacttcaaccgttgtaactgtgagtagctctaatgcattcattgttactattgcatagcatttcacagtaggaatattctatagttaataacattatcctactggtagacatttttctaagtttttgttgttaaaaaatatattgcaaagcacttttttgtgcatgcctcattgtgtacacacacaagtctttctttagggtaaataagaataaatgggatatagaaattatggtatatgtatttttattgaaattatcttctaatttatatatccagcagcagagtatgagagtatgcatttgccatattattgccaaagtttatattatcacactttaaaattttgccagtctgataggtaaaattggcattcaactactgctttaatgtttgtctttgtgactacttgagaggttgaatacttttagatgtttacagcattatattgtctcccctgttgaatgctttttatttacttggcccatttttctagtggcttttaaaaaatgatttatagagattattaatactagaagttatttcattatacaatttcaaatatttatcttagccagttgtttacatgttatgtttatgatgtcttttggtcttaaagaagttttgaattttggtggaaatttttattattcttttcatttctggattttgctttccatgtctcatttgtgcaggccttccttatctttagctcatagcaaatttttctagattttccttgaaatattcttatggttccatctttacattttgggctcatttttgtgaggtgtagatataccttcatttgcttttgaaaaggctactaaagcatctgaaacttcttcaccaagtttaaatacccaccttctcatgtagtacatttccatttattcatgagtcttttctgggttgttcattctcttcagtgttctgcttatctatttctataccaattgcatactcagagaggcctttgctggccaccttacctagaacagctctcattccctttctgttacattactctattttattttcttccctgtacatatgtttctttaaaattcttcttcatttacttgttttcttatgtactataagttccatgttggcaggaaccttctttgccttttttactgatgtgcttatcacctgtaatagcacctaatagatatttacaaaatagttgctgaatgaatgaatgaaggccaatggcttgaccaggggtgtttgcattttgagttttatttcttgaggcttaaataaattgtcaaaggggtttgtactactaactaaataagtgggtagagaagggctttcctagcagctccttgacatgcttccatgtatacttttgagttctgttcacatgtcacattgtttaaatattgaacccttggaaagactcattcgaaggtgcagaaaagggtgattctgctcacaataagctttagagatacttccttttagggtatggaatttagaatgaccagatgtagtcactgaatatatggctcaaggcaatcattaattcattctgcaaatacttatcaggcactctggtagtgttgagactacaacaacgaataaaatgaacatggagcttgtgtgtgttgggggggaatacaaattaaacaatcacagcaatgaatatataatgagaaactatgatcatttctatatagaaacattatgtttttagagcatgtaacaatcaaggggatgagagaatattttgctgagaaagtgaccatttagtagagatttgaactaggcaaagagaggagagaaacttcttggcggaggtccttaggcaaaagaaaatggaagaaaaagaaaagaagctccagtgtgactgaggtggagaggatgaggagaagggcagctctggtgaggtaggtggagcccagatcaaaggatgatatagtgtgatgatgagcaaaaacaaaagaaggaacaacaaaaacaacaaaaacccatgtggattttgaagtaacacaagccttaggttcacatatgagtttggtcacctatcaggtgtgtaacctgattagctttaacctctttctccttagcttccttgttgttgaaaacaaacctcattgagttactgtgaatattgtaagagatggtctctgattcgtagtagaagtacatggtataggtataatacttctaggtgctttacagtgctctgtttgttagctgacagtcatctaattttaggcaaaacagaaaaataattattgcttttggagattcgcagcttgaagcccggcaacagtttcaaaaagtaaattagtcaacattttttgaacacttagtaggtttggcttagttcagttaaaaaccatttttgagcacatactttgtgcacgatgtaaagtaatactttggcaatataagaatgaaccattttgaagttaatgattaaatggataattttataacaatgttgtgaaggatccagtagagttaaattaagcatgtgttttggtgaaggaaagaaaggaaatgatgtgtgggagacattctttgcagaaggaattattggggaaggttatggaggggaggaagttacggccagtaacccatgagagaggtgccacaggagagagagagaattctaggactgtcctgcaaaagactgctaggagagggcggtgagccaagtcagtcctgggcctcagcacttactggatggctgcttacaaagagctcgggtctctctggaaggacatcctggattatggtcatgagttagtgctcaactatagccaagaccaatgtctccaggattcacctgtgtgtttctttctctgggcatgtttatttagggacttatttatggaaatagtgttcccgttgctggaagtggctaggaacactgagacatgtattttatcttatccaaatcaattgctatgaaactatgctcatcaccctttgtagttgtagatcacatacccctcagcccctcactatggggccatttaaatcttccgtgttttatttgctttggatccatcctcttcagtcaaaaccatctgactacattgcttttttttttttttaacccctctgggtgtgtcagtattatactgcttagaaattgtcttagaaagcttctgtttcctgaaaaagaaaactccttactcatgtcatcctctgatttactccatccctgttattgcctattaaagtcttgtccatccttcaagaacctgatcagatatttatttctccatgaagccttccttaatcactccagcttaagggaatttcttctctctttataatattgtgtcacatactatttctaatattgcatccaatgcttgcttgattattagtgttactcagagggaattttttaaaaatcactttgtattctagaacagtttttttttttttgtctcactctgtcgcccaggctggagtgcagtggcacaatctcggctcactgcaacctccacctcctgggttcaagtgattctcatgccttagcctcccaagtagctgggattacaggcacccaccaccaagcctcgctaatttttgtatttctaacagagacggggtttcaccatgatggccaggctggtcttgaactcctgacctcaggtgatccacccgcctcggccttccaaagttctgggattacaggcgtgagccactgtgcctggctttctagaacagttttatatttacataatcattgtgaagctagtacagggaatccttgtatatcccacatccagtttcccctattattatcatcttatattaacatagtacatttgtcaaaatgtatgaactgatatagatacattattattagctaaagtccattctttattctgatttcctcagtttcccctaatgtcctttgtctggatataacattacacttagttatcatatctccttaggcaccctgagctgcgatagtttctcagactttcttgtttttaatgaccttgacagttttgaggattactcatcaggaactttatagaatttcccccaactgagacttttctggtgatttttttataagtagactgaggtaataggtttttgggaggaagtccacagaggtaaagtgtcattttcatcacatcatatcaagaacacatactatcaatatgacttatcaatgttgatgttaaccttgattacctgtcttgaggaagtgtttgtcagatttctccactgaaaagtgaccctttttctttctctgtttttacactgtacttcttgggacaaagtaactatgtgcaacttactcttaaggagctggggaagggagatagtaatgcttcattttcttaagagcagattatctacataaattatttggaattcttttgcattggaaatgtgcatattctccccatttgtttattcaatcattaatttatagcagcatgaactcatggatatttattttattctttggtttataattcaatactgctgtttttgaggggaggaactcattaagttggctactgtgtccctttgtcataccccatcatctttttgtgtgtacattttctcaatttctggcactaaaagatactccaagtccatcttgtttatagtctgctccattcccagaatcagccatttttctgaggaatcctgtctccttttattgaagaatgttattagaaatcaagatctgagcactaggtttgctcattgctactgggatgtcattgcctctaggccttttcagcggatggaacatatgtgtgtatactaacccaggcatatacacatatctataaatatttccatatgtaactatttgtatccttattaagctaaacataagttcatactgatgtctccaaatctaatctattatcatagattagatattatgaatcattttggggaaacctgaaaatacagaatcccaggtatcactccaaagataatgaatcgggataaatattgaacttatatgttttgaaaggcaaacattaaaagtaaatgcttctcttggttgaatattggaatcaatatcaagattatgaaaacatcagtttacatgataaatataagttttactttaccattattcaccatttgggtaagtatttatcttaggaaaacttcgtgtgtctgactatacttttgctaatttaaatttcatgagtgtgcaatctgatagagtttgaaaattattatattaggtgattattggatgtgccattcaactcccaaagtctgtgattcgaagtcccatatataaaaacaaacactgcaggaacacaaaattaattgtgagaattgtactcattcatgttggcagtatctgcctcactcatttcctctccttctctttctgttttcttgcattattggttggtggcagactccagttccaacaccatcttctgagatgatcctgattcccagaatgctcttggtgctgttcctgctgctgcctatcttgagttctgcaaaagctcaggttaatccaggtaacatggctattactcagctatatgctagaagaccagcagaatgtttaaacccatcaatgttcaatggtgggtctaaaagctgccaagagggactacaaagctctttctttttaaatctccatggtgaaatatgactaaaataggaagaaaaatgaatatactttatatatatgtattttaatacttacaacctgttgaatattgtaaaatattttcttatatagagtaggggtgcagtaagagggcattttaaaaaatgggaggtggcagaagcaaccatttgcttctgcatcttctgagaaaaacaggacagaatttttagatgtcttggagaacttcttcaggttggtttaccagttgttttgggctgtcttagactttgattttacttggatgtcctgttatgcttttgggatcctggtcctgtgggatctcaggcaggttctctttcctctaggatgtggccatgctaaaaatagataggttaggagaatcttttgagcccaaatttgtgggattattttgtattacatgcatttttaaagtttaaatggaagtaaataattgtattatttattacacaataatgctgcttaacaacctatccaaagctcaatgtctttaaacgagcatttatttggctcctagctggacttgtttggactgttctctgttctgtgttgatttactcaagcataactggaagtcagctggctattggctcatctaggatggatgtggcactgatgaatggggcaactttgctgtgttctgtttcatcctcctgcagactaacctgggtatgttttcctggaaattgcacaggaacaagaccagaagccagaatactcaaacatttttcaagccactgctgaaatcatgtttactaagtctcattggccaaagcaattcatgtggccaagcccagagtcagagtgggagagcacaaaaaattagatggtaaaggtctgggatgcaggtattggagaagaattggagtcattttttttttcattttgctacaaatatgaacatggaaaagtatacagcttaaatgttcaattttatgaattcataaactgaacacatctaaacagtacctggattaagaaacagaactataccagcactttagaagctctcttcatgctcccttccagtaacttttctcaccaccccgcaaaggtagccattatcctgctttctagcaacatagattagttttgcccatttttgtactttatataaatggaattagatgatgcataaatactctttgtgtctggcttctttcactcaacattttgtttatgaaattcatcctactgttgcatgcagttgtcaactattcattttcattgttgtatattactttgtttgaacattttatttagccaatctactgtagatgggaatttgaataatttctagtttgggcccattatgaacaaaactcctataattattcttatataaaacttttggtagagataagtactcagttcctttgagtatacacttagaagtggaacttcatatgtgtagcatatgatatactattctgcataataccaaaaattttttcaagtactttaccattttaccatcccatagcagtatatgcaagttccagttgttccatgctatattttgattcttgagggtgctttaattttgtcctcttcatagcataagggtacatttgtgaaaatgcttgctctcctcccttcataaaagttccatgtgcatgggtttttctttataccttcaataggaaatatgatcaaacatccttaaaatcaaagaattattggctgaaggagcccagtgccttgttactttctcgtaataagctcagctgttgcatctcagatcctaacttgggtaccattttttcctttttctgttctgtattcctctcaatcaattgttgatgtttggttgcctcctactacattcttcatgctctgagttctaaggaagagtgctgtgagtgcatggaatggtgggatgttttggtggtaagcatagtcatggagactggcatgccacgaggacatttaaatgactaaccaggagagctgatcttctgtgttagagtccacactgtggccctggagcaggaaatgggctatttggagacagcaaatagtcatcttaatttttttttctatttctggtgtcaggtatttttgttggctctttctgacagggaaagagaaatagacttcttgctttgcaaagacctttataggaaaacaggacatgttgaaggactaatccttctctctgccatttctttctattttaccaagtcaaaccagagatgagtgtttgaggcagatgagacattttcattcattatcagtgataaagagtctatcatgaatcctgaggctcatagaatgttatagcttgcacactgctgagcataaagtcagcatatgataaatgcatgttgatttaaggatgactcttcaggagtccttactggtgtcaactgaaagactgactataactgaaagtattgaaaggtaactgaaggcactgaaagactgagtgaattcttggccagttaggtttttcccacagaatggccacatgatataacaaatagaacttaagccaggagacctgagttataagcaaatccaatatgcaaccaattattaaattactgaaacattttagttggttattagctataacatattggttggttaatagtaactgagctaagcattaaactcaataaaataaaaataaaataataattagttgaagctcattgttgaagatcttacaatgactattggtcaataagccttcagtattagcatgatttagttgataacaaacattaaacatgatatgatatgaaatatcaatcttggtgtctcagcagataccaagagaggataaataatcttgtttacatttaaaaaaactctctagtatttgaaatcataaatgtctcacaggtgtcatccatggaggctgcagagtagtggtggtatgacagagatagttggctgaagcacgaaggcagcagagtttttggctcactgttctaaagtatctgagttttggcaaagcaggcagtcaggcagatggtgttagtggcatttccagtaatggcagtgttaaaggtagcattgtcaatggggcctggagcgtaggctacgcaagtctttgtgggaaatgctgacatgaaggtgtatatacatagtcctgaattgtgggcagagttctcagctatcttccagctgcaacagtgcaccaggaactggaacctaatcatcattaatccagtgggagaggttattggaagaattagaggcagtttcttatgtcaaaatcatggctcagaaataccatttagctagtgacatccaaatcaaacaaataatcatcccaataatttctgaaaatcatttatacaaatcaacagatgattggaatgttattagttctgatgaatgatttggagttaacttagaaaaaagtatttagcttaacttttgagtaacaaccctaattataatcctgacttggtcataaattaattgtgtgacagtgagggagttgttacgtgtctctttatacttccttaatattttcacttgtagtaagattaagttggattagataatctatgggaccctttctgctacaaaattactgtgatttttatgatgtgagaactttatagcccatactggaagatttcggcttggaagtatagcccctgaagttgcatggctgttttttgcaagaaagactacttgtttccaactccctaccacttcccaggctcagggatgtgaagtctgaatttcaggagaatcttgcctttggggctaagcacacaggaagtgactgataaatacttaaaaattttaaaccctaaaactctgcttagtggcaggtgaatgcagaaaccctgccccagcctaacctgcaggagagtcatagtgctacaagctaccctgctccagagcatcttttgctctagaggtggggccaagaggtagcatttcaggctgaagatatagcgtatgcaatggctgagaggagggtgaggaacatttggggctcctggtggaggataatgagtgagagagccagcggggctatgtaggagatccattcccctgtgggatccttgagtcaagttttcccttatttccagcttgggctgggactgccaaacttgataggagaactaagggcatctccatgggaaagagaccccacaatcatgcacaaaaatacggggctgcagtagttgtttgagtggacatcagtgtcaggctcccctaggggatataaaaccactgtttcagtggttagtggggaactggcaccttacgtttttccaggtaggaggatgaatagaactatcctgatgatcctgaaattctagcccagcagtctgaagccctgggacccacccagccaattagaggattgttgtgtataaaaaacacaggggtgcttgttcttattcccctgacttggcctgtgacaactgtttgtgctcaggaaagggagaaacatctcttcttctcagcaggcaaaccaggcctttaggatccatggtataaagctgaggcagggcagtgctggaacttcccattttcatgtcacactttcccctcataggaagcaggcaacttactaccagttcagagtcctggggtgggagtccccctttggtatccagaatgcttccactttgaaaaagagtggcaaagccattcagggtttgggattaggagaggacgagcttttctcctcctggccccaaatttattttaggttcaccactgtggtttttgttctttccagcatcaatcccacatgtcagtgagttcttagggtcaggcaactagaattctagactgttcatgttggaatggaccttagaaatatctaagtcactcttcctcactttacagatgaggaaactgggagtcaaagcaggtgagtgatttgcccatgctccacatttagctaatagttaagctaggacgaggacccagggctacctgtctcccaatcccaggtgacttctacctgggccctcagggagcaatgtgctgaagtgacctttatctaaaaatcacatatatccatgcagcctcatgctttcctttctgcaaccaacttccaatgtatatttatggggatgagatgtaattgagatttgagggacagcctgaggccaaagaatggagtcagacgaataggatatacagtgctcacacctagtctcatgctaaatgaggaaggctggagctagaagccctgcgggccaacttacccccacccagaaactgaagcaccagggatgctttggttcccttctgcaccaggttgtgcctttatcaccgctcccttgtcttccaccaagactgctatgtgttaattcacctacacatatttccaaattggaaactcatttttgtttccctggcttctcgtcattcgtgttcccagagatgtgctgagaaggtttatgtggcctcatctgttaacgagaaggtgatgctagtttcaggtttgtgaaaccaggcctgaggtactagtgttgtgatgtgtgtgtatgtgtgtgtgtaggtgggtggcgcgggggtgtagtgtgtgttagacagcctgaacaggccttgagaaaaagataaaaggccggcaaaagacctctctggttgaatttatcttaagtgagcaatgctagaagctgcccagattggctctttcttgcttgtgtgtttgttttttaagtctaggctgacgcctgagagtggcctttggcatccttcctgccagtaaaagagcctttctctgggtaaaacagaaactcatctgccccttgagccctcttggttgtgccaaatagggaaaaagagaatgcaaaactcaaagaatattcaatgaacacttaatatattctgggtaccattttaagtggtgtcaacaaatttaatcttcacaataatcttattagtattagtgttattatataatagtagtattattattccagttttacagaggagaaagtgaggccaagaaacattaggtaactcatagcaggttacagagaaagctaagtggcagaaccggcattcgactctgctccagcaagcatgctcttttcttctacttcttttttctttatcccgtttttcaaatttccaacaatgtatcagttaagagtttttcgcttgtttttttgtttgtttttggagagggcatgttgctctgtcacccaggctggagtgcagtggcatgaacatgactcactgcagcctcaacctcctgggctcaagccatcctcctgcctcagctccccaagtagctgggactacaggcatgcgccaccacacccaactagtttgggtactttttgtagagaaggggttttgccatgttggccagactggtcttgaactcctgacctcgccctcctaaagtgctgggattacaggcatgagccaccacacccggccacaagcatgctcttgacctctgtgctctactgcctttggagtgtgagactcaaggaatgtcagggcagaggaaacccagattcatggaccagccacgaatgggctacagagacccgtgaatcccctgaaattgcatcccaaacttaatgtgtgaagacaaaagtacatttgcaaaatgaaaaatgttttctattatcagatgctcaaaagactctgtgaccagttctagaaaagactaagaatggtggatttaatctaatcttgtacaaatgaggaaactgaggtttagggagataaagtgatgggaggaaacatgtttgaaaagactattagcagacctaaccaggctttgcctactcgctggacgagcatggtcagagttttgggttctctgaactgcagtcttctcacctatcactgatcgctgccttaagggctgttaggaagagtaagagaatatatgtaaagtacctagcatagtgtcaaacacacagaatgtgattaataaatgctggaacttctgtcctcttcctcaattttgtatattgtgctgtgataatggcagacttcattagtctttccattattctatactgtcctttatattttagtttaatcatttcattaattaattatttaacttaattactatactgtaaaaatatttcattttctttgagggcagacttcacctaattcctgggctttgtatcttgggataaaagggttccaaatacatctactgcatcatcacctttccatccaaagtagccaggtgaattcccggttcataccctaaaactttgccttcaccctgttgttttgcattctgaggcctagattcctagttgtaaaaggcagtcagaggagctaaaagtaatgcaagaaaaaacaaagctccactttttttctgttgtcagtagggatagaggcccagggagacctagtctccttgagtctaaactttggggccaggagcatgatcatgggactccaggaagagcttcacacaaagtcccttttctggacctctcagttttcacaaccacctgcagagctcagttttgctcagggctctcgtgtggaaagactaagagtctacagaagaacaacagtgttggcaggagcagacaaggagacagggaccctgcttaccatggaaactgggcgcactggggccattaggtccgtgcatcactgctgcttcacatatttgcttattaatgttttgttctgaaagctgacaagaactctaggggcttcaagcccataagatcaagacatacaatatagcgatataagtatgtaagaaacatagattgatacagatataaaataggaaaaggatatgaaacaaatataatatatatgataaaaattataaatattataataaatatattataaatattataatatttaatattattaatacattaaaatataaacatatatttatattttgtaaatataaacatatatttatattttgtaaatataaacatatatttatattttgtaaatataaacatatatttatattttgtaaatataaacatatatttatattttgtaaatataaacatatatttatattttgtaaatataaatataaatataaatatatatataaaatatgtataaaaataaacataataaatattataataaatatacacacatatatatgtgagtatatttatgtatgtatttatatatagatatatctatatttatgtgtgtatatttatgtaagtatatttatgtatgtatttatgtatatatagatatatctatatgttcacatgttacatgttatatagatatatctatctatatatagagttaaaaataaataaataaataaataaaaataaaaataaaaataaaaataaataaataaatacagagaagcctgggagtttccttgacttcctttttccccctccctcttcttattcatcaaacatttgttgattgcctatataagccaagcactgtaataggtgctggtcatgacgacacaacagattatcactacaccagagacaaagaccaaagtcataaaaacctctgaagcaggaagaaaaaaaaagttgcataaatttttttaacaactcatcacctcccacttaggctcataaaaaaacctcactgattttagtgtcttaacttctactttactgtgtatgtgtccaaactactgaaaaattctgtgagggctatcttgccacatccatactcttcagagacccacaggccaggaccaagagctaagtcgacaatcacactatatatatctatatatatatatatagatataatcacactatatatatctatatatatatagatataatcacactatatatatctatatatatctatatatagatataatcacactatatatatctatatatagatataatcacactatatatatctatatatagatataatcacactatatatatctatatatagatatatctatataaatatatagatagatatctctttatatatatatagatagatatatctttatatatatatagatagatatatctttatatatatacatacatagtccataaatatgtacataaatatgttcacattttacccaatcaggtcaaatctccaatgtcatgctagttgagatactgaaggtatgagagttagctggagctgaaagaatttgccaggccaggtaaaaagaggaagggaaagcttttgagctgaagaaaaggcacagaggcacaaatagaaaaacaagagtgaggatagtgattattgaggggtcatgaaggcaaaggtggggttaggatggcaccaaaagtaggaaccatataatcttgggatcctcagtatatgacaaatgttttatgatcaaaggccttgtcttcacctggtgttaacataatgctatgccatgctgtctttcccagagtgcaggttccttttgctatcacatttcaacaaatcctgggacaagcacattctaaaaattagacaagcaataatcctccctgggctctctgtccagattcttccccaacttggtgattcttgaccctagtgatcacatgataaacagggtgtgtgtgctggtagcagggtgtgatgaccacgtgatacggttactagacagactgtgacaatggagatcaagagatctagattctagttccagctctgtcactatctagctttgtgactttaggtaaatctctgcacctcactttgctcatttataacatggggtccataaactttgctctctgaacttcatagggttactgcaggggattgaaagagataatggaaataaatgggctttggaaaattacatgcaaatatcaaagactgtgatttgttacttttggaagaaaagaaaatgaaaataaacactatgaaacaacagtttctatcaagcagatgatgcaggaggaagaaagagaaaaaaactccattagtgatcattaaggtcccttgtggtccccaagaccgactcaagttgcttttggggaatggggcttctaacagtcctgaactctggccaccctaactctaaagggatgcaggaccctgtgctcaagccaagcatatccatttatatatatatatatatatattttttttttttttttttttccttgggagaatagtgtgattgttgacttagctcttggtcctggcctgtgggtctctgaagagtatggatgtggcaagataaccctcacagaatttttcagtggtttggacacatacacagtaaagtagaagttaagacactaaaatcagtgaggtttttttatgagcctaagtgggaggtgatgagttgttaaaaaaatttatgcaactttttttttcttcctgcttcagaggtttttatgactttggtctttgtctctggtgtagtgataatctgttgtgtcgtcatgaccagcacctattacagtgcttggcttatataggcaatcaacaaatgtttgatgaataagaagagggagggggaaaaaggaagtcaaggaaactcccaggcttttctgtatttatttatttatttttatttatatttatttatttatttttaaatggagtttcactcttattacccaggctggagtgcaatggcgcaatctcggctcactgcaacctccgcctcccaggttctagagattttcctgcctcagcctctcgagtagctgggattacaggcatgcaccaccacgcctggctaattttgtatttttagtagggacgaggtttctccatgttggtcaggctggtctcgaactcccgacctcaggtgatccacccaccttggcctcccaaagtgctgggattacggcgtaagccaccatgcctggcttttttttttttttttgcaaaaaaaaaaaaaaaaatctaaatgatgccatgtgagacttgatctcagaaagatgttgggaagctgggaaggaacccataggaatatcatccctttaaatgatgagatgctgagtatggtgtgagtaaattagaaggaagataatgaaccgaggccatttcagctgaagctaccaaagtgcagcaccaggtccagccttctagtgttagagaactgggagagcccatctccttgcagaggtagagcagcccgggactgcaggggagggtgaggccttcatgcttgttcctaaatgcctaaggtcttcgtttaggctacaagcggagcattttgattgttatacataaaggaaaatgtggttaaatttaattcaaatatatgtaaatatcttatgattggcatttcaagggaggaagtcagattcaatcttttggctactgtaacctatattaaagataggaagtatgcaatgatgtgtactgtctatgtacaggtattgctaacttgagaaatgtattggcatgggaggagccctgggcttgcccataggacaaatccacctcgaaagcagagcagagtgtcttcattctgggtagctggtaggatgtaagcctgaattcttggtcttccagtgcttcttaaaaactcccacgtgctctctttcctcaccaggtcctgaactctaatctgtgtcctgtccgactctcaaaaaatcagctcagctcttcagagggcttctccttacattccccctccacacagccccagcatttggcacatgtgctgagtgagatacactgcatgctcgagggataccaggtctccctcaaaaactctgctaattttgtcccgtagagaccgtctgctagtgccaaacccggagtcggcctcctgcccctgctccaaatgggcaaatggctgaaagtggctacagaagttccctcacctctctgagattctcccttctctgaagtcttggtctctgcattctcattgcctcagaaacaatcagattccttcaagtagatgatttatgaattttatttagctcttccagttacttttagagggagcactaattactgcacactactccatcccacctagaaacagagatattaataaaaagtgaatttatactttattgccactgtgattcatgttaactaatcatgttttactttttgacttgacttctaggaagctcagagccaaagttgaaacccatcatcagccagtggtatagaaccaaatgtaatactctttctgtattaaccttagctctagcttatctaattgttcctattttctttttcctttatccaaatttcttcacttatttatttatttatttttatcttatgcaactttggaagccgactccaaactttactgagtgagtcaaagtaaaaataattaaaaataaataatacctaactttattgaatattagtgctctaagtgcttgacataattaactcatatattccttatggcattcctataaacaagtgcaattactaccatgaaattgagaggctgaaagcttaagtaacctttctaaggtcataaaaccttttaattgtttaaggaagagtgaatgtactattttaaacaaatagttctctcttctcctcttagatatcatttattgagccccattacattctataaagtatgctaacttctttgtatacattatgttaaccttggcttggcaggattatgaaagatgaagaaaccgaagttcatagaggtttggtaactggtagtggggtcccataattcagaagtggcagagccaagtcttaatataaactttccatgattccaaaccgtggcctcagttttcttcttcactcctgatctgcatagctacccagtttcctcttcagcttaccttcttgttggggaaaggagatactatttactatgaaagtttcactgtctttgttaaccaggaagaagaattcattatctgatccctatgttagtatcctgaaacccactacagcttggggactgctctcctggggctctgcaagaattgtttctggaaagtattttgggcttccaggaaaactgcaatcctaaaggtctattcctaaggggaatttcaacttgtgcaagaggtctgggtgaccattatacccaaagaatagccctgtaggctgaagaaagaaacccaaataatctttcttggcccccctgtggaatcccattgtgtcaatatttatctgcacaaaggaccagtctgaaacagcctgctctgtgaagcttgtgggaagcagggcctcagtgacagtttctttaagtggactaccttgtcctttcagaaactggaagaactagaccatggtagcctagggttggaggaggaagaaccagggatcaggagacctgaatttcagtcctggttaccctagccctctgtgtgaacttgagtaagtcacttcacctttctgggcctcagaggttctgatatttaacacggagacattagagggattggcttcttaaatttgcttctgggctccaacgttttatgattgcagatgtccctttagattgtagactggcttgagaccgctgaccccaataatgcccctcagtcagtcttgtctgggcccagagaggcccaggtgtcaggtctctgcacctcaggcctcatgtgggccatgtgtgtgttttcctggaagctgcatataggacactcattgacggggagcccgtggtctggagctagtagtgagatggtaaacattatggaacaagcagccctttcaggctctcagccttggcaggatagtatgaaaaataattcttgggaagctggggactggtggcagctgcttctcctcagcctgcctgccaggccctaccagagcttggagggctggagctccctgctgggcctgccacagcctgtgctggtagttttccactctgggaaactggaaaagtgaattggcttctctgtccgggagattggtgggtagcggaagcatcagaaaaccgctaagacaactcagcaggaaaaaccaggagacacttctttgctgcagggtctcttgcttcccttgccattcccagctttttcatgcttctttacagttcatgatagaacaaagacagactggtgggatttgatgaacgaggaagtggaactgggggaaagcaaggagacctgacatttagggcttgggccaacttggcagttctgagtcttgactattggctgagatcccttccacagaaggagtttacccaaaataggcacattcaatgggaaaaccacactggtacagctcagaagtgccacgttggttgccctgggcttttcctggttccaaagattcagtaggatgagaaaggtcatccaagatcatcttgtccattttcctgtgccttttctctaaggcccttgggcatactgagtcactgagaaactttgcctattttcttaatgtgactattgctgatttactaagttcttatctctgaattgtctatcctcatccttatattactttgtcacaatttctagacctccatcctaactttcgttgtctggagattgtgtgcaatacttgtagccctctctgccttttcatctacttatttatttgccaaacgtgtgttaagcatctcatgggtgctgtgtgttggcaggtactgagggggaaaaggaagaatctgacatgattactattctcaaagttgctcacaatttcaacaaggaggtaaccaagcacaagagtaacagaaaatctccgttggagtttgttacttaatagagctcgcctacacaccatcatcactttaatcccataccacgttttagtattttccatagcttcgtcacattatctgaatagaaagagccagtaatagctactgtcaaatacataatcaaattgtgcctatttgattatgaaaaatctattttcttttttctgtctcccctaccggaatgtaagatccatgagacaaattattttatctgtcttgcttactactgtatcttcagaagaacacccgatacacagcaaaaacttatttattaaataaatacatacacatttgtaaaagaaatacatttgtgaactcaatacatgcaggtaaagataggttgcaataaaatatgtcatgactcagacttacaaggaagtttcctgtatctcctgtctgctaaaacaccattagccaaggctacccttgaccaaactcccaggactttgtttttaagccttgtaaagtgatgaacaacagaaaacacttcctttatcacttttcaatagacgtttattgagcacttggttaatgccagacatcctactagaaattggagatacaacagaggaagatagatatgatccttgccctcataacacatgctgtttagtgggcagaccaaaattaaacaattatttacattacaagtctaaaaactgttatgaacgaaaaccagtttgttataagagcatataatagaaattcctaacttagctggggacttgggggaattccttgggggagtgactggctgacagctgaaggatgagcaggagctagtgagtgaaggagggaggatgcacatcccaggtaaagggagcatcatgcacagagaccttgaggctggaagatactttgtgcattcaggaactgaaataaggtcagcgtgcttggtagagagcaaagaacagggaatagccagagatgaggccagagagtaggctgagacccaatcgtgtggacctcaagggtcacattttcttaagaagaatgaaaacctgttagaaggttcatgacagaataaagttttaggaagctaatttgggctattgtgtggagaagggatgatagaggaacaacgaagaagagctagaaggcattatagtggctcagatgggaggtcatggaggttgcgcactgcatgggaagaatagaggagagaaacagctggactcaactgcaggaggtaggatttgtagaacttgctaatggactggatggttctcaaaggccaagcttacttctcattccttgactgccgcctgttgagagtaacatcttacctatcattcctggactcttcctctccaagaattctattttggtctccaggcagaggttgactcagggagagcctttccagttttcatcaatgtcattgccactctgctgtccaccacacagttgacctaaaccctctgtatgctggaagagctggacgagtcgaggaagaggggagcgctgacatgtgtaacaagttatttacatgaaatgaagcctcatgtcctcccctacttcctctagttctcaagcttgagtctgcattagggtcatctagagtagtggttaatacactgtttgctaccccctcccagcaaccccaccagagtttctgattcattaggtcaaatggagactgataattagcgttgctaatgagtttccaggtgatgctgatgctgctggtcctggaagcatattttgaggatcacagctctaaatggtaactgaaatgcaatcacaatacatagatcaaagagctttcaggaaggaaactggcactcctttgacaccacatagcagagtatcctatatggatctacctccacatctgttatataggaaaattcctgaatgggttcagttaggacacaaaatataaagggtttctatgcctaggaaatataatttaactgaaatgtgtcataaaagcagctgcagcagcagtagctctgataaaactccttagttgccattctcagaatgagcagtacgttagaaggaaagttatttgcaacaatatcatgattcacctcatgtgacccacattccctatttctgctttactttagatattccaagaagcagaggctctcattgcattcatggcctagtgtttagagatgcattaaagccagggatgaaagcccagtgggacggtcagtgtggctttctctggtgcccagcatggtcctagagaatcattacacgtccaggctgaagggacctgggagcagtggctccagagcctggctacacagcacagtcacctggtggactgtaaaaatatgcaggttactgggctcagcttcaggtataccaaagcaaaatctctaacaggaggctcacaaacatgtattctaaaacctctccaggcttttctaatgctattggtccatggactggctttgggaatcactgccttacagaaagcctaatagaactctcttgctttccacatgaagaaacagaccgaaagagagccaggagcttgctcagatcccacatggtataagtggtagaaccgggagtggatgcgaagtcttgattttcaagggttgtgtgctcagtggaattacaggctttagagccaagttctaagatgagttagtatttactcaaggaatggcctttgcagttaaaacttacctgtagaatgtgtgattagtgggaaacatgaaatattgggtggaaaatgcttatcatattgcctgacacttggtaaatgcttctaaatggatgtcatcattactgcattttactgaatttaagcaactcacgactctaagatgcatcattactttatgtgcctctaagaaagaaagaaaaactactgccagttaaactatgacactatttgcttgcgaagtgcatccagatttcagagatgtcagtacgtgaaagaatgggcagtgtggtatttcacttctcttttctcaactctatgaagattcttactttactgaattagacacttaacagtacatgaaaattcctgaaggagaagtatacttagtgtgtttgaggaacaacaaggaggccagtgtggctgatggggaaagtggggtaaggacaaggtccaagacagccaggggatgtctgattccatgtcttcactattgtgaatagtgtgaacagaagagtttcatgatatgactttcatttcttttatgactacatagtattccatgctgtatatgtaccacattttcttttcttttctcctttgctttttctttctttcttttttttcgtttctttttttttattacagttttattttttatttattttttttggaataatttttttttttattatactttaagttttagggtacatgtgcacattgtgcaggttagttacatatgtatacatgtgccatgctggtgcgctgcacccactaacgtgtcatctagcattaggtatctctcccaatgctatccctcccccctcccccgaccccaccacagtccccagagtgtgatattccccttcctgtgtccatgtgatctcattgttcaattcccacctatgagtgagaatatgcggtgtttgggtttttgttcttgcaatagtttactgagaatgatgttttccaatttcatccatgtccctacaaaggacatgaactcatcattttttatggctgcatagtattccatggtgtatatgtgccacattttcttaatccagtctaacattgttggacatttgggttggttccaagtctttgctattgtgaataatgccgcaataaacatacgtgtgcatgtgtctttatagcagcatgatttatagtcatttgggtatatacccagtaatgggatggctgggtcaaatggtatttctagttctagatccctgaggaatcgccacactgacttccacaatggttgaactagtttacagtcccaccaacagtgtaaaagtgttcctatttctccacatcctctccagcacctgttgtttcctgactttttaatgattgccattctaactggtgtgagatgatatctcatagtggttttgatttgcatttctctgatggccagtgataatgagcattttttcatgtgttttttggctgcataaatgtcttcttttgagaagtgtccgttcatgacaaacccacagccaatatcatactgaatgggcaaaaactggaagcattccctttgaaaactggcacaagacagggatgccctctctcaccgctcctattcaacattgtgttggaagttctggccagggcaatcaggcaggagaaggaaataaagggtattcaattaggaaaagaggaagtcaaattgtccctgtttgcagacgacatgattgtttatctagaaaaccccattgtctcagcccaaaatctccttaagctgataagcaacttcagcaaagtctcaggatacaaaatcaatgtacaaaaatcacaagcattcttatacaccaacaacagacaaacagagagccaaatcatgagtgaactcccattcacaattgcttcaaagagaataaaatacctaggaatccaacttacaagggatgtgaaggacctcttcaaggagaactacaaaccactgctcaaggaaataaaagaggacacaaacaaatggaagaacattccatgctcatgggtaggaagaatcaatatcgtgaaaatggccatactgcccaaggtaatttacagattcaatgccatccccatcaagctaccaatgactttcttcacagaattggaaaaaactactttcaagttcatatggaaccaaaaaagagcccgcatcgccaagtcaatcctaagtcaaaagaacaaagctggaggcatcacactacctgacttcaaactatactacaaggctacagtaaccaaaacagcatggtactggtaccaaaacagagatatagatcaatggaacagaacagagccctcagaaataatgccgcatatctacaactatctgatctttgacaaacctgagaaaaacaagcaatggggaaaggattccctatttaataaatggtgctgggaaaactggctagccatatgtagaaagctgaaactggatcccttccttacaccttatacaaaaatcaattcaagatggattaaagatttaaacgttagacctaaaaccataaaaaccctagaagaaaacctaggcattaccattcaggacataggcgtgggcaagggcttcatgtccaaaacaccaaaagcaatggcaacaaaagccaaaattgacaaatgggatctaattaaactaaagagcttctgcacagcaaaagaaactaccatcagagtgaacaggcaacctacaacatgggagaaaattttcgcaacctactcatctgacaaagggctaatatccagaatctacgatgaactcaaacaaatttacaagaaaaaaacaaacaaccccatcaaaaagtgggcaaaggacatgaacagacacttctcgtttctttttttttgagatggagtctctctctgtcgcccaggctggagtgcagtggtgtgatcactgcacctccgcctcccagattcaagcaattttcctgcttcagcctcctgagtaactgggattacatgggcacaccaccatgcctggctaatttttgtatttttgatggagacagggttttaccatgttggccagtctggtctcaaactcctgacctcaagtgatccgcccacctgggctgcccaaagtgctgggattacaggcgtgagccaccatgcctggcccacattttctttatcgaatccactattgatgggcacctaggctgatttaatgtctttgctattgtgaatagtgtgagcggaagaatttcatgatttgatttacattctaaaagatacatgggaaaaggtggacaaagggagatcagttaggaaattattgcactattcctggcaatggaagacagtgaattagcttattatgatagtaaaatatgtgagaagaagtaggtgggatatgggaatatttttagggtagccagtagaatcttctctcagtggatggactgaatacagggtattgaaggagtcaagaatggcctcaagatttttggcttgagtcgttgaaagaatggaacctgaaaaaaaaaaaaaagactgaaggatgagctttggagggagtctgtattttactcaatgttatctttattccttatttacatctatctctaaagtttacctctttttttaaataaatatttttaaatacctattttctccccaatatgcactgagaaataaaaatgaataagatacagtggctttattcccctcaaaattttgccacctgcaggggagataggactcacacgtggtacattacaaagcagtatgtatctaatagtataagaaagatatttaaaatgtgagaaatcagagaaaggaggcattcattgtaattggccctatcctcccctcaaaatgcttgcttttgttgagtacaagttcattacattggaaaaggagaatgctagcataataactttaactagttttttcactttgggtaaactgcctccttgctgtacctcaaaccacctccacaacaagcatgctttttcctcaagtttacctttgcatttgctgttccccttgcataaaccatcatccctgcaagagtcacctggttgctgtcttccttcactcaggtctctgctccgagtcaccttatctaagaagcctaccttgatttctttatataaaagaatgcctattccttttgcatactttttcttcacagcacttgccatcttctctcacattatatatttatttgctttattggctgtttccccacatgagaatgtaaactcagtgacaaaaggcactttgttttgtttaccactgtattcccgcaaggccaatgaattgcttaacgaattatttaataaatataggaattaaaataaaccatgggtttggaaagcaataagcaaatggggttggagataggactggactctgaacacagcgttggtttcagaagagagagaagacactagagaacagctctctgactaagctacatgcctctgtggcagcctggaatcttgggacacacggcttgcaccaggccactcttttggttaaagcaaaggttaaagtctggtgtattgggacaaactttggatagagatacagaatgtgatctacgtcaatccctactacttaatagctgtgggccttctgccagtttcctcatacaggatgagtatcccttatctaaaatgcttgggaccagaagtgtttcagatttcagaattcttggactttggaatataatataatataatataatataacataacataatacaatacaatacaatataatataatataatataatataatataatatagtataatgtaatgtaatgtaatataatataatataatataatataatataatataatataatataatataatataaatttacccaggtgagcatcccaaatccacaaatccaaaatccgaaatgctctaatgagcatttcctttgaacgtcatgctggtgttcaaaaagcatcagattttggattttagatttttggatttgagatactcaacctgtatatattttgagagtaatagtgtgtactctgccaactacatagggttattgcaagggtaaagcaaagataagccatgggacagcactttgcaaactgttaagaattctattatcagggtcaagatggcaatcagggacactatgacatggactacagtcaaaagatccaggaatgcctgccttggacagctagatcttctccccaggaggtgcctgagggagacatacacacaggtgacagtcacaaagggtaagtgaagttctacattattagtagctgggcttgggtcctaaatgccaatgtgagcgttctgataaactgacctgggcatgtagcccaggttaaaggcctccagaagcctctctttattcattaagtcactggtgacaaggactaaaacacttagcacactcagcgacatgtaagatcagtgttgaggagggattagagcaggcccctgagagggccattttctttgtgtgattttcaaaaagtacattgatctcatccattggaaattttggccccattagcatcctgtgttagtgtttcctcatccttactcttcccttcaatttcacttctcagaaagtggaatttgagaatttgttgcttcatccccaaacagttcagatttgcccttaagattcaagcataatgattacctgtggcacacattacctctactggagaaattatacttttgataagaataggcaaagtgatattacattcatatgttcatctcttgattcaaaactgacttggaaatcatagtggatggtgtgttaggctgttcttgcattgttataaatacatacccaagactggtcaatttataagaaaagaggcttaattagctcataattctgcaggctgcacaagcatggcattggaatctgtttggcttctgaggaggcctcagggagcttataatcatcgtggacggtgaagtgggagcaggcatgtcacatggcgaaagcaggagccagacagagagagtggggtggcggggaagggactgcacactcttaaatgaccagatcccctgtgaacttagagcgagagctcacttatcaccaagggcatggcccaagccattcatgagagatcttcccccatgatccaaacaccctacctcctctcccacccaccagcccccacctccagcattggggattacttttcagtatgagatttgggtgggcacaaatatccaaactatatctgatggtgtattaatccattttcatgctgctgataaagacatacccaagactgggaagaaaaaggggtttaattggatttacagttccacatagccggggaggcctcagaatcatggcacgaggcgaaaggcacttcttacatggcagcagcaagagaaaatgaagaagaagcaaaagcagaaacccctgataaacccatcagatctcgtgagacttattcactattacaaggatagcacgggaaagacgggcaggcccccataattcagttacctccccctaggtccctcccacaacatgtgggaactctgggagatacaattcaagttgagacttggtggggacacagccaaaccatatcagatggtgaacatagaagtgttcctgtgggtatatggccatgtttcttgccaaaacttcctgcatatgattctggttaattgcagtttctggaagtatcagctaatccttggcctaaagctatctttcccttttttagggtgagataagactccaggagttctccttggtatgatacaagcagaagggccctcttgccttcagttcttcatggttgtagtggatatcctccttcttcaagcccatgatgttccttagggaaggtagttctgctgtttctgtgccaagcctgggcattatgctcacgtgaaacctttttcccttgatttttgctacttctccagggcacttcctgggaatggggcttggtacctattaggactataaatttgcctctctctgacccctccaagctgagagaagtctcgcctttctccctgccacctctactccaccctgcagtccctttctgagggcaggctttctaggaagttctttgtcttcatgtagtttcttttttcttccctgtaaacataaatgtcccctagggtgaatgaacataaaggcctggccacaggctttgaaaaaggaagtgataatacacaaaaatcttcaaaattatctttctccagagattatttcaaaaacagttttattgaagtacaatagacatacaatagactgcacacattaaaaatgcacaagttggccagttttgacttacatataaacctgtgaaatcatcaccataatcaagataatgaccacatccatcactaccaaaagttgcttgtgtccctttatgattcctctggccgctcctccttcccccaggaaacaactgatctctttctgtcactatagattaacttgtttttgttttctaaagttacatataaatggaagcatacagtatgtgcttttttggtctgactttttttattaagcataattgttttgaaatttatccatgttgttgtagcatgcatcaatagttcattttattgctgaatagcaaggcatgatctagggtaggacaagtgaagtgcctagggttaaaatgcagtcagttccttatgatgataatcataatgatgatgactgtaaaaacatttaatgagacctgctctctgaacaagtttttaagtgtaatataccgtatcgttaagtataggcacaatgttgtacagtggatctctagaacgtattaatcttgtataaccgaactttatatccctcgaatatgaattcctcatttccctttcctcccaattcctggcaaccatcattctactttgtttctatgatttaggccatttttgatatgtaacgtatgtggaatcaggcaatatttacccttctatggctgggttatttcacttagaattatttctaccgggttcaaccatttagtcaaaaatgttaggatttctttctttcttcttttttgttcttttcattattattttttattatcattatactttaagttctggggtacatgtgcataatgtgcaggtttgttacataggtatacacgtgccatggtggtttgctgcacccatcaaaccatcatctacattaggtatttctcctaatgctgtccctcccctagccccccacccaatttctttcttttttaaagctgaataagattccattgtaggtgtatcccacattttctgtatctacttatctgctgatagtcatttgtgttgtttccatgtcttggcttttgtgaatggtgctgcaatgaacatggaagggcagatatctcttcaagatgctgatttagatcctcttgggtatataccagaagtgggactgctggagcatatggtagtcctatttttaattttttgaggagcctccatactgactgcatcattttacattcccactaacagtttataagggttccagtttctctacatccttgccaacatttgttatcttttgattttgttgatgatagtcatcctgacatgtataaggtgatatctcattatggttttaatttgcatttccctaatgattagtgatgttgaacaccttttcgtgtaacttggccatttgtatgtcttctttgaagaaatgtctattcaacttctttgaccactttaaaatcatattttttgtttcctatcaagttgtatgagttccctatatatcttggatattaaccttcaaatatataatttgcaaatattttctctcattccaaaggtcttttcactttgttcattgtttcctttgctgtgcggaagtttttgttgttgttgttcaattgtagttccgcctgtttttgcttttgttgcttatgtgtttggtatcatatccaagaaatcattgcttagaccaatgtttttttcatgtatcttcttccaggagttttatacttttagatatcatgtttaaatctttaatccattttgagttgatttttgggtacaatgtatgataatagtttaattttattatcttgcatgtggatatccagttttcccaacaccatttattaatgagatttttttttttgcccattgtttatttttgacactcttgttgaagatcagttgacctgtgtgggtgacttccaggctctctattctgtcctattggtctatatgtctgttttttcaggtaccatactgttttaagtaactttctaaaatattttgaaattaggacgtgtgatacttctgactgatttcttctttttcaacattgctttggatattttgaaactttttgtggttccatataaattttagggtttaaaattatttcaaaataatttctgtaacaaatgtcactgagattttgaaatgcaatcagttgtgaatccgtttcaattgttcttttttttcttacaatggtttctatttttctgctttgtcaaatgcctgataattttttatagtatgggacacacttacaccttaaaactttttgttagatggctgaataggaacagctccagtctacagctcccagtgtgagcaacgcagaagatgggtgatttctgcatttccagctgaggtactgggttcatctcactgggacttgtcggaaagtgggtgcagcccacagagtgtgagctgaagcagggtggggcatcgcctcacccaggaagtgcaagtggttggggaattccctttcctagccaagggaagctgtgacagatggtacctggaaaatcgggacactcccagcctaatactgcgcttttccaatggtcttagcaaacggcacaccaggagattatatcctgcgcctggcttggagggtcccacgcccacggagccttgctcactgctagcacaccagtccgagatcgaactacaaggtggcagcgaggctgggggaggggcctctgccattgctgaggcttgagtaggtaaacaaagaagccgggaaggtcgaactgggtggtacccatcacagctcaaccaggcctgcctgcctctgtagacgccacctctgtgggcagggcgtagctgaacaaaaggcagcagaaacttctgcagacttaaacgtccctgtctgacagctttgaagagagtggtggttctcccagcatggagtttgagatctgagaatggacagcctgcctcatcaagtgggtccctgacccccgagtagcctaactgggagacacctcccagtaggggcctacagacacctcatacagctgggtgcccctctgagatgaagcttccagaggaaggatcaggcagcaacatttgctgttttgcaatatttgctgttttgcaatatttgctgttctgcagcctgcactggtgatacccaggcaaacagggtctggagtggacctccagcaaactccaacagacctgcagatgagggtcctgactgttagaaggaaaactaacaaagagaaaggaatagcatcaacatcaacaaaaaggacatccacaccaaagccccatctgtaggtcaccatcatcaaagactaaaggtagataaaaccacaaagatggggagaaaccagagcagaaaagctgaaaattctaaaaatcagagcacctcttctcctccaaaggaacacagctcctcaagagcaatggaacaaggatggacggagaatgactttgacaagatgacagaagtaggcttaaaaatatcagtaataacaaacttctccaaggaagtttggaggatgttcaaacccatcgcaaagaagctaaaaaccttgaaaaaagattagacgaatggctaactagaataaacagtgtagagaagaccttaagtgacctggtggagctgaaaaccatggcacgagaactacgtgatgcatgcacaagcttcagtagccaatttgatcaagtggaagttcaagtgaatgaaatgaagcgagaagagaagtttagagaaaaaagagtaaaaaaaaatgaacaaagcctccaagaaatatgagactgtgtgaaaagatcaaatctacatctgactggtgtacctgaaagtgacggggagaatggaaccaagttggaaaacactcttcagggtattatccaggagaacttccccaacctagcaaggcaggccaacattcaaattcaagaaatacagagaacgccacaaagatactcctcgagaagagcaaccccaagacacataattgtcagattcaccaaggttgaaataaaggaaaaaacgttaagggtagccagagagaaaggtcaggttacccacaaagggaagcccatcagcctaatagcggatctctcagcagaaactttacaagccagaagagagtaaaggccaatattcaacgttcttaaagaaaagaatttttaacccagaatttcatatccagccaaactaagcttcataagtgaaggagaaataaaatcctttacagacaagcaaatgctgagagattttgtcaccaccaggcctgccctacaagagctcctgaaggaagtgctaaacatggaaaggaaaaaccagtatcagccactgcaaaaacatgccaaattgtaaacaccatcgatgctaggaagaaactgcatcaactaatgagcaaaataaccagctaacatcataatgacaggatcaaattcacatgtaacaatattaaccttaaatgtaaatgggctaaatgctccaattaaaagacacagactggcaagttggataaagagtcaagacccatcagtgtgctgtattcaggagacccatctcatgtgcagagacacacataggctcaaaataaagggatggaggaagatccaccaagcaaatggaaaacaaaaaaaggcaggggttgcaatcctagtctctgataaaacagactttaaaccagcaaggatcaaaagagacaaagaaggccattacataatggtaaagggatcaattcaacaagaagagctaactatcctaaatatatatgcacccaatacaggagcacccaaattcataaagcaagtccttaaagacctagaaacaaagagacttagactcccacagaatcataatgggagattttaacaccccactgtcaacattagacagatcaacaagacagaaagttaacaaggatatccaggacttgaactcagctctgcaccaagtggacctaatagacatctacagaactctccactacaaatcagcagcatatacattcttctcagcaccacatcatacttattccaaaattgaccacatagttggaagtaaagcactcctcagcaaatgtaaaagaacagaaactataacaaactctgtctcagaccacagtgcaatcaaattagaactcaggattaagaaactcactcaaaactgctcaactacatggaaactgaacaacctgctcctgaatgactactgggtacataatgaaatgaaggcagaaataaagatgttctttgaaaccaatgagaacaaagacacaacataccagaatctctgggacacattcaaagcagtgcatagagggaaatttatagcactaaatgcccacaagagaaagcagaaaagatctaaaattgacactctaacatcacaattaaaagaactagagaagcaagagcaaacacattcaaaagctagcagaaggcaagaaataactaagatcagagcagaactgaaggagatagagacacaaaaaacccttcaaaaaatcaatgaatccaggagctggttttttgaaaagatcaacaaaattgatagaccgctagcaagactaacaaagaagaaaggagagaagaatcaaatagatacaataaaaaatgataaaggagttatcaccactgatcccacagaattacaaactatcatcagagaatactataaacacctctatgcaaataaactagaaaatctagaagaaatggataaattcctggacatatacaccctcccaagactaaaccaggaagaagtcgaatccctgaatagaccaataacaggctctgaaattgcggcaataattaatagcctaccaaccaaaaaaagtccaggaccagatggatgcacagctgaattctaccagaggtacaaagaatagctggtaccattccttctgaaactattccagtcaatagaaatacagggaatcctccctaactcattttataaggccagcatcatcctgaaaccaaagactagcagagacacaacaacaacaaaaaagagaattttagaccaatatccctgatgaacattcatgcaaaaatcctaaataaaatactggcaaactgaatccagcagacaacaaaaagcttatccaccacaatcaagttggcttcatccctgggatgcaaggctgcttcaacatatgcaaatcaataaacctaatccgtcatataaacagaaccaaagacaaaaaccacatgattatctcaatagatgcagaaaaggccttcaacaaaattcaacagcccttcatgctaaaagctctcagtaaactaggtattgatggtaagagctatttatgacaaacgcacagccaatatcatactgaatgggcaaaaactggaagcattccctttgaaaactggcacaagacagggatgccctctctcaccactcctattcaacatagtttggatgttctggccagggcaatcaggcaggagaaagaaataaagggtatttaattaggaaaagaggaagtcaaattgtccctgtttgcagatgacatgattgtatatttagaaaaccccatcatctcagccccaaatctccttaagctgatcagcaacttcagcaaagtctcaggatacaaaatcaatgtgcaaaaaatcacaagcattcctatacaccaataagagacaaacagagagccaaatcatgagtgaactcccattcacaattgcttcaaagagaataaaatacctaggaatccaacttacaagggatgtgaaggacctcttcaaggagaactacaaaccactgctcaacaaagtaaaagaggacacaaacaaatggaagaacattccatgctcgtgggtaggaagaatcaatatcgtggaaatggccatactgcccaaggtaatttatagattcaatgccatcccccatcaagctaccaatgactttcttcacagaattggaaaaaactactttaaagttcatatggaaccaaaaaagagcccgcattgccaagacaatcctaagccaaaagaacaaagctggaggcatcacactacttgacttcaaactatactacaaggctacagtaaccaaaacagcatggtactggtaccaaaacagagatatagaccaatggaacagaacacagccctcagaaataataccacacatctacaaccatctgatctttgacaaacctgacaaaaacaagcaatggggaaaggattccctatttaataaatggtgctgggaaaactggctagccatacgtagaaagctgaaattcgatcccttccttacaccttatacaaaaattaattcaagatggatcaaagacttaaatgttagacccaaaaccataaaaaccctagaagaaaacctaggcaataccattaaggacataggcatgggcaaggacttcatgactaaaacaccaaaaacaatggcaacaaaagccaaaattgacaaatgggatctaattaaactaaagagcttctgcacagcaaaagaaactaccatcagagtgaacaggcaacctacagaataggagaaaatttttgcaatgtacccatctgacaaagggctaatatccagagtgtacaaagaacttaaacatttataagaaaaaaaatcaaacaaccccatcaaaaaatgggcaaagaatatgaatagaaatgtctcaaaagaagatatttatgcagccaacagatacatgaaaaaatgctcatcaccactggtcatcagagaaatgcaaatcaaaaccacaatgagataccatctcacaccagttagaatggcaatcattaaaaagtcaggaaacaacaggtgctggagaggatgtggagaaataggaatgcttttacgctgttggtgggagtgtaaactagttaaaccattgtggaagacagtgtggcgattcctcaaagatctagaagtagaaataccatttgacccagcaatcccattactgggtatacacccaaaggattataaatcatgctgctataaagacacatgcacatgtatgtttattgtggcgctattcacaatagcaaagacttggaatcaacccaaatgtccatcaatgatagactggattaagaaaatgtggcacatatacaccatggaatactatgcagccataaaaaaggatgagttcttgtcctttgtagggacatggataaagatagaaaccatcatttgagcaaactatcgcaaggactgaaggccaagcaccgcatgttctcactcatgagtgggaattgaacagtgagaacacctggacacagggcggagaacatcacacactggggcctgtcgtggggtgaggggacgggggaggaatggcattaagagaaatacctattgtaaatgacgagttaatgggtgcagcacaccaacatggcacatgtatatatgtgacaaacctgcacattgtgcacatgtaccctacaacttaaagtataataaaaaaaaaagagaaaagaaaaaaaaaaacttttgttgcttatccgaaatttaaatttaactaggtatactctattttatctggcaatcaggtgtcctgagactctagcttcctttacttctctggactcccatttttgtctcctcaactcaggaaattctccaggctctgcctgagttcccactcattgtgttgtatcctggacacactctcatgccagtaagctgatgccaccgtaggggtcaacttttttgtttcctgactctcagattgttgtccttcgttgtcagatgctcattatcttaaaacataatttttcatatattttgtcctttttggttgtttcacactggagagcaaatctggtctctgttactccgtctttggttgaaagtggaagtctgtatccagaagttattgtttatagccaggagccagaacatggttctaaccagggccaaaaatgtgtgtttgatcccttcataggtgagtgtgtagtttctttatagtttttatgcaattaactactgaaaaaaataattctttgggtcataaaggcgcctggtgattatgagggttcctcactactgtcaggaaattgattagaagtaaacatcttctaataagagaatgggatgggccactggggttattaccaagtacaaagcataaattggcacattacattgtattacattgattgtcagagtttgaaccaaaatatagatttggctgggggtcaaatctcggaggcccaaattgtatttggagtcagggccaggaagacaagtctgatagagtcagggtgatcaaactggggccatagaggaatttaggaagatgtaaattctcttattccttgttcaatattcagtgatattcttcctagggggcttggaaataaaaataaaaccatgtcctctcttttctctttggtttctcttggtctagctatatgccgctatcctctgggcatgtcaggaggccagattccagatgaggacatcacagcttccagtcagtggtcagagtccacagctgccaaatatggaaggtgaggatggttacatcaagaaagcccatgttctggggttgggcagatttcctgggcacagattcctgaccctaggggctggggaaggtggtgttattggcaggaactgttgagaaatgaaggacagacagcaagtgggcctgtcctgctctgtatgttttcagggagagaatttaggacttagccacatgtactggtctggcagccccatctcaaccacagaggccccagggccacattacccacagtgaatgggttcattgataggaagtggatttgctttccctgactttctcattgtgagctgctgcaggaggcaggcaacagtggcacctatgggaaggtgcagattatgtaggacactgggagttagcatccactcctcttctcagtgggtctatgaaacatcactcactgcaaagcatcactcactgccaagcatcaagacactgaggcctccaacaagttctccacctctctcaaggatctcttacacagaagggccatccttgccaacagacagagtgtggcagtttcctggggcgattgatttcaggggtcttgtacatcaataaactccctactgctctactggttggacccaatactctacctggaatcttattattttgtgaagtattgattttattaaaatggaattacccataagaaaatgaatcctgatgaacctttccccttaatttcttagtgtatgaaagactagagtgatggtaggtggaattggaagggagcaacaaatgaatgggtaatatctgtgagaaaagggagcaatccaagggagaggaaaagtggtagggagttctcaaagtaaactttataataatttcacaattttgctcagtggtagctcagcctgaaggtaataaaatgaaaccagattatttactacttccttgacatgctcttccccctcatcctccccatgtgtttctatggctccttgctggtctgcaatgcccatcctgctgcattgcataacccacactggagaccctactatccctcctccctattgccataacttgatgtccaagcaaagggtggctagctttgttaggctgagtttgaaagagggaagggaaatatgaaatgactcatgcgggaacagagagtaggaagagttttatttctctttatgcttctaaatcaggatgggaagtgaaggctatgtgtgatctgaaggcctcagctcactgtctttcagggtctcatggtactccagggaaagggatctgaccacaaatgggtactgtggtggcagtgaaaactgtggcaagaacccaaaatgtttataaggacagcctgctctctcccctcagtacagggcagctgcttgcctgtgaaccagtaaacagctctgtggtttcatggttgctccctctctccccaaccctcacctctcaaggctggactcagaagaaggggatggagcctggtgccctgagattccagtggaacctgatgacctgaaggagtttctgcagattgacttgcacaccctccattttatcactctggtggggacccaggggcgccatgcaggaggtcatggcatcgagtttgcccccatgtacaagatcaattacagtcgggatggcactcgctggatctcttggcggaaccgtcatgggaaacaggtaggaagaagagacatccagatcctggatgtccaagaccatattttgacttaggctaggagaagaagggtacaggttttctgtgtggatatgtgtgtccacagaccaggcatgcccttgtaaatgtgtgacccagggtgagggaggcagggaaggaatatcaaggctgtggggaaagcagagtagatgcattctgctcctcgaattaagaagagagagtccatcaaaaacgtggtggggtgaagaaaagtgagcatgatttaataccacctcttcactcattctcttctctctcctcaggtgctggatggaaatagtaacccctatgacattttcctaaaggacttggagccgcccattgtagccagatttgtccggttcattccagtcaccgaccactccatgaatgtgtgtatgagagtggagctttacggctgtgtctggctaggtaggtcactagcccaggaagcctatagactttattaaaaactccaacttctgggaaatgaaggcaatcaaatcagaaagggatgggatcagttactcctggaatggtgatgccctcttgggaagaatagagacagaagcattgctcattaacccagggcttagggccccacactgagtcatgcattcagagtcattacgttgactgccatggaggggcactcctccaaagtcttccctcggtgtccagatggagtcctgctggacacgctgtgcaagcttatacccttgaaactcacatagttccctgaggtaatgggcctgagcagtaggcactcacttggctgtgtttcctttgcagatggcttggtgtcttacaatgctccagctgggcagcagtttgtactccctggaggttccatcatttatctgaatgattctgtctatgatggagctgttggatacaggtaaatcctgggaaactttattagaatgggaaattggccactaagaaagaataatattttatcatgtcttgggatcaataatcaatcaaccaatcagtatttatttagttcttgtacaaggcatttggaaataatttagatgaaggaatacacatgacctttatttccagggaacttaaagcccggtttgggaagacaagttaattacccagaaaacaatcaattacacaaagtaatggctaaagtttgtgatatggctctaagtataatagccatatttttgaccctcaaaacaggacatgtagtctgacacaaatattgacctacttatggaaacaaagggccagagaattgaagtaataagtataatactctgggcaagtcaagaagtcagaaagaatagaccttatacatataaatgctttgaaatttgtaaaaaggggactagtaagacttacaatagacaaggaaagttctaggttaagatgagaattgtagcagaggaaggtaggtagaaggtagcagaagaaaggaagcagggctgaaggcaagactgacctggctatagtagaagctggagttgagaagaacagaatggaacaatggataagcctgaagtggatcaaaggagtgccatggcaaagaagtgtgaccagatatagtaggaacttagggttgggtacaggatgctcccacctatactgtttcacttcaagcctttaagccttgccattcttctagcccacactaacacttttctctctaagcttggtctgcatctgcaaagtgagcctgggagagaattcagtccatcgtgaagaccagaccagatgatggaggttgacagggctcgagagaaggagatactagtgagtctcaggaagggagtgtggaattacagccttctactggcttaggtgtggagaatgaactattgccctctagctgccatcccctgggtgaagacctgattcatccactcttctactcctagtcacttcctttccatcttcttaatcactgttctttcctttttgcttaaacggtcttggcataatttcgctcagtcacaccccaacaggcatgtattcaaggcacagaggaaatcagagatcaaccgaattcagtttaatttaataagcctttgttaatcaactgttactatatacaaggaatttggccaggcatgttaggtattcaaaggtaatggagtcattgatcctacctttaaagtgctcacaatttggagtaggggctaaaacagaatataagttactatgattcaagtatatgagcaagagatagcctatgactgctctggggttcaaaggaaaaagtaaactatagtaggaaagcacaaaaatggggatgaaaacatctggatttcatataataaaagttacttctgtttgctacaaggcttaagggattaaaatgtgtgtgaaaagcatttcgtaagataaattgctatgcacatataagttgttatctgattatcatttttctgactgaaggaccagtaaagatatggtagaacagatgaaatctgaactgggtcccaaagaatgggtagtactttcacaggtgcagaatcttgaaatggaattttaggcagagggaataatagcatgaggaaaaaagaatcatggttataaagtttaggggactgtctgggagaaatcaacagtttatttaaccacgggccatatttatgtggcaaagtagtgcaggagaagcaaaacaaagcagattatgccatattttgaaggaacctgaagtcaaagccaaaaggagcaagaagtggaggaggaggaagaggagaaattgctgttcttattcttcataaacattatcattaatgtaatgagtcattgaagatttttaaagctgaggaaggacatgattggagctgtgctttagacagattaatcaagcagcatgcaaaggttagattggaatggaatgaggaggctatgaggaacattttaaaactcttagttctgccaagtaaaaagaattaatgaccaaggccataaccgtgactgtggggaatgaggaaaagatattcatttaggatgtttgaaatctgattggatgtatgaggcaaaacagtagggtgagaaaaagggtcagatgaagtttgacagtctaagtgactgaaacaatggggatgacatttatttattcgacaaatatattttgagtgcttaccttgcgccaagcattttccattactatgaagagaagtataatttatggaaaagggaaaccaaggagaaagacttagttcagtaggggatgatgatggatttagtttggagtgtaggtctgtgagactgagaagacattcagtagagaaataaggaaggtagccggaattatggctcttaactccaggggaaagataaaaaaaattacaaaaatgtagacatcattggctttcatttaataattgaagtaatgaaatatctggtggaggtggctgagtgaagagatcctctcagccactgagagatgacatcagagtctcaggaaatagtcatattagcaaaagttactttttaaatttaaaacaatttcaagaataatatatgcttactggtgattttaataactctaaagtatataaatattgaacatttattttcttatcccttcttcacttgatttaattttgaccaagggggaactgaacaggcattccttttaatttctgttgcttttcataaaactttcctgggatttatttttctgaggataatgggaaatatatttattgcaagtaaacttacgttctcctagctttctgatctgtagagagaagaaaaagatggcaaaaccttggaagggagatccaggctctggtcactgtggataaggccagtcaaattttataatttaccaaacattttcaatgattaaatatattttaaaaggctggcataatcacccttagtatttttttattttttgcgattcacaaattttacatattattgatctagctctaaacctcaagggtcacaccaattattgcttgagggtgagtatcccaatctcgtcatttgggaaatttgtgtcatatctgccagagcttgagatgcagagcttgaggaaagagaagttccacatgatggtttttgctctgtccctccataaaaagaaggaaggagcctcttcgtgttctctaagtagtcaaataagcatacatgcagttatattccatccagcagtcaggcttctggaaaactcagcctttaaaacagagcctcttactcagaagtcaaaaaagcctgctaagctagaacacaaaactaaatccaatacctgggattctcatgaaatccttgcatcttacttcctgggtctagtatcctacaaatttaattagaattaaatagaaattattatttaaatttagagcttgtattttcccccttagtttaatatcaaactgggttgttggatatgtggaatagaagagagtgtgactggattctctgaaattgattcactgaacaatgacaatatgtagttaaaggagagtcagcaccaagctctggaaacatttatatgatagtggggcaagtgctactatgtatggtagcattcattctatgcatttatccatttcctcatttactctatgaattagttcatcaaatgcatttgataatattaagtcattatgtgaagacatattcagtatataagaataggcaaggtgcaataaattatagaaagcttttcatattaaataagacattgtttaaaagttttactactaaaggagtaagcatcaaatattttataaaaattactaatatgaaattcttagttctccattgatgcaagataaacgagtcaatactataatgcaaatctgattatttacaatccttcaattccaagataataagctcatacaaaatctggagtgaagatgccgggtaaaagctcttccacgaatgtgtggttaactcagatttctctctccttttcctcctcttctcctggcctgagcagcatgacagaagggctaggccaattgaccgatggtgtgtctggcctggacgatttcacccagacccatgaataccacgtgtggcccggctatgactatgtgggctggcggaacgagagtgccaccaatggctacattgagatcatgtttgaatttgaccgcatcaggaatttcactaccatgaaggtcagtggggtcgggtgtggtggaacttctttaaggaggcacaaatcatagtgtggtagagaaaaggcatgctagaaaaaagtctaggctgatgccagttcaatgacatattctgttactaactagctaaatgcatttcacaagtcacttcatctctaagggcgtgattctccatttgtgtgtaagggagttagaataggtcagtgagctctcttttttttgttgttttgacactaaaggtgacatatccattaagccaataacacagtgtccagggcccacagatttttaagacgcataaaaatgctctaatttcttttaatatcaggtgaaaaaaataaatttttagggtcaaagattatctttttaccagcacagttgtgtgtgtgtgtgtgtgtgtgtatacacacacaactatatatatatacacaatgatatatatatatacacaactacatatatataaccatatatacatatacaactatatatatacatatacaactatatatgtatatacatatacaactatatatatgtatatacatatacaactagatatatgtatatacatatacaactagatatatgtatatacatatacaactagatatatgtatatacatatacaactagatatatatatgtagttggtgttctgcagtcttctgaatttttccttctaggaacctcacagtggcagtgatagttggtcaggccttataaaacctgggctgcaaccctggttacctgtatgcactgtctgcccttggccacctcacttcatgttgctggactgcagttttctcatctgttaaatgaggactgcaccagcatcttctcagcccttccttgccttgaactctctcgagtctataatcctctcagccgcagttgccgtctaccctgattcgtgtgtgtatctatacacatagatacatacacacatatgtgagaatatgtgtattctcatttagaaatgagatttctaaaaaaaaaaatgaaattgttttagattgtacactattttgggtttctcacctagccctgtgaaaagaagaagactggctctgaaatgtacctaggaggaagcaggatggcagtcttcctcttacctcagttcagaatagctcgaatcagggtagacggcaactactgagttggctggcactgtgtctccatgcaccttagcagggccaacctatcactcacatgcctctttctctaccaggtccactgcaacaacatgtttgctaaaggtgtgaagatctttaaggaggtacagtgctacttccgctctgaagccagtgagtgggaacctaatgccatttccttcccccttgtcctggatgacgtcaaccccagtgctcggtttgtcacggtgcctctccaccaccgaatggccagtgccatcaagtgtcaataccattttgcagatacctggatgatgttcagtgagatcaccttccaatcaggtagggagctcaggtcctctttgggaagtgggagcaaggtgatgaaggaggaatgcacatgcccagaacttctcattagcaggtctctgagaggagtgggattgtacaggcagcttctcattgacggatacggtgaatcctttgtgtgactagttttaactgtggaggggatgggatgagaatggaagtgaacaaaatatgcacgtaactcttcttagaaagaatgtttttaaatgagagtacagtgtgttaaaaattttatataatttaaggtagttaacgagtgcgctgttaaggaaaagcacacctaagcattactgagatatttaaatgaaaatttctaaatatacacaaaagtaaagagaacaataaaccactcatcactcagctttactaatcattgatattttgccatatttgtttcacccattccttccttttggctgtagcattttaaagcaaatatgagatactacttgatttcattagcaaataattggactgcatctaagaaaatagcatcattttcataggtataatgccatgataacatctaacaacctttattattaaataatttcttaataccacccaatatcctgtccatattcaagtatgactaactgtccatcaatgtcttaattcagttgactttatcaaataaggatcaaaataaggatctgttggtgagtttctttattctatttgctctgtgtctcttttaatctaaaaaattccttccatttttatttctttttaaatggattctggcttggctgatggctttctgtggtgtcattttacttgagcttctgttctctgtcattcctaatgactggtgcttacatctacaggttaatttgattccagttcaatatttatttttgtcaagaattctttataagcattctatatatctcagtaatgctgtatattttatgctgaacttcatcatggggatgtaatgctagatcctctcactttttgtgatactaagattgatttctggttcctcatgaactttttccctaagttttatcctccatcaataaccactgtctgaattatttatttcactagggttgctaaatgacgattttctaattcttttattttttctgcatttcttagctgaatttcttccgaatagagtaactattcttcatcatgcaccagtttactcagaaatcacattgaaagagcagcatacgtgacttatcttcccctttaattgttaattttcagagtaatgacttgataccgtagcaaccctcaataatgtctaattaattttggtttttacccttatttttttggtatcattataaactcattgctttttatcaatttaatgcttaatcgattgcagttattattattagtagtagtatgtttatttttagacagagtctcgctctgtcacccaggctggaatgcagtggtgtgatcttggctcactgcaacccccgcctcccgggatcgagtgattcttctgcctcagcctcccaagtagctgggattacaggtgcctgccactgcgcctggctagtttttctatgtttagtagagatagggtttcgccatgttggccaggctggtctcgaactcctgacctcaagtgatccgcctgccttggcctcccaaagtgctgggattacaggcatgagccaccgtgtctggccattattctttttaatactcaagttgtgctgtctttgactagagtttgcatttttttttttttgagacggtatcttgctctgttgcccaggctggagtactatcttgagtcattgcaacctccacctcccaggttcaagtgattctcctgcctcagcttcccaaatagctgggattacaggtgcctgctaccacgcccggcttttttttttttttttttttttttttttttttttgcatttttagtaaagacggggtttcaccatgctggccaggctggtctcgaactcccaacctcaggcgatccagccgcctaggcctcccaaagtgctgggattacagatgtgagccactgcacccagcctagagtttgcatttttaagggggctctttgctcttttgatctgaccctagaagcctttgataactttcttgttttccgaaagaacaaggtatttcaagctcattttgaacatgtacagcacccgacgtggaatcaaccatttcaagaaatcttgattccttttagtaggaaatggtatttagaaaacacaaactgggtagtagggatgctcattactaataggttgtcattgtttcttggatttttcggtggaagaaagcaatgaaatatgtatatttaaaaagaaagattgtgagtttacattgttacttccaattcaaattaaagataaggtttttatttaaagttgattttatacgttcatctctattatttatgctaaatatcatgtttcctaacaatgttaacagcattttcttcatcctattattcaaaaagcaataccaatattattactagcaacgtaactattgaacattaagatttcttagcaattctcttttctttgtcctgagaatatatcctactaagaatgtgcagtcaaagcactatgttctaaggtcagttgggtaacagtgggataattcttttctgtatatagttatatcaccagtgtggtatacagttagggtaacagtgggataattcttttctgtatgtagttatgtcaccaatgtgatatacagttaggttcattgtattccatttgtttcaacctttagggattccttttaaactttaaacactacttttgattgaacagtaactgcagcaaatagtgatttaacttactacagccagaaactgtgccaaatcttgaaaagttaaaaggtgtttagaacattgttcataccattaaatttaaatgggaagatgaaagatacagaatgctttaaaaaaaaaaaaaaaaaaagaaatgtccaaagcaatatgaacaataaatggtcaggaggagagaggcactagcgtgggtttgtcatagacagcatcaaaggaatgagacttgtactgggcctggaagaaaagtccaggtgtaaaataacataaaagagaggaagagactaatttaaagataaaccacactttgggaggccaaggcaggaggattgcttgtattcaagagtttgagactagcctaggcaacatggcgaaatcctgtctctataaaaaacacaaaaattagctgggtgtggtggcacgtgcttgcagtcccagctacttgggaggctgaggtgggaggatcacctgagccctggaggcagagcttgcagtgggtcgagattgcaccactgcactccagcctgggtgacagagtgagaccctgtttaaaaaaaaaaaaaaagaaagaaaagaaaaataaatcagaagaacccatcctttcagatttgatttttaagggaaaaaaatttcaagatggtttgcttattaagatgtactgataagaaaatagagcatatttttaggaaaacaggtttggtgtttaaatgccttctgtgctaatgatttaatctaagagtaagttgattgattgtttcatctgaatactgagagtagaaatcaagatgctcaaagtcagtgccacttacactgtaagtgttaactgggggacaaatagattcccacccatcctcagggattctcctggcatagtaactggtacacttattatagctaattatagctatgaaccatggtttttactcctggggtctcttgagctttaaatccaatgcataataatattagttttcaccggagcctgacagccgaactccgaaagcacatgcagaggccagatacctccttatttatataataatattaagaagaagaaaaattaggatacctggaagaaatgtctcttagaaaggaaatacatattctaattcttgacccccttgattagacaaatcagagggaaaaactctggcaaagctgccaacatcaatctggcaaatacgcttttgtggtttagtctcaaaagctgtaaaatcacagaaaaagacactccaatgtcagtaaatatctataaagattaagccttaattcataaattgaagggctaggccgatgaggcatagtggagactcttttataaacaatctaatatccttgaaggaaaaagcatcttaacactatgtctgtcccttgcccatttacccgctatattctgtctatattttcactgaatttgggtcctgcttcttatgctttatgacaatgtgtggtacagccctttgaatcactgtttcttaaacttttttgtaccatagcatctagtatgtaatatgtgaaacaaaaattttacaaaggaaaacttgcttttactatttagataaatggtgattttttattcaacgtatttatgattttatctttttaaaagactgatgacaactcactaaattgatcttgtaatgtgctaggtcacaatatgccttcagagaaaacactagctgtctgtcttctccctggctctgactcacccttgttttataacagatgctgcaatgtacaacaactctgaagccctgcccacctctcctatggcacccacaacctatggtatatgtgattcctaattacacaaattaatttgaagggacttactgggggatgaagaagggtggagagttgcaaagccctggctgtgtgggaggctttacaccagttggctttggatgaagagtagccctggaaaggtaggactgtctacctccaagttatggatccaaatatactctcttcactatggattcatgtgcttcttcagctgaggcagagtctggagttgtcctaatttctccatgaaagtttgggaatttggggtcagaaacagggaaagggacattcctgggtcagacccatagtgggtatttctaaggaggggtggaaatcaaagaaacaaaatgctgatatctccaattggagataaatatgccatgtatgcattgctttaggcagtcattggtgacactagccagcaatgtgggaaacatgtgggattgaatgtgtccaaagaggactttcagctaccttggcatgtctcaaagaatgcagagagtgaaactggttcctcacctgtttttcatgaggtgtgattaagggactacagactcaggccataataatacagagacaaaattttgggaagaatagaaaaactcaccattactctgtctgacacatggagagggggagactactgtcttatggaagagggaaataggataggggaacaaagtaataaacagattgggcgtggtggctcacacctgtaatcccagcactttgggaggcagaggcaggcagatcatgaggtcaggagttcgagaccagactggccaacatggagaaaccccatctctactaaagatacaaaaattagccgggcgtagtggcgcatgcctgtaatcccagctactcaggaggctgaggcagaattgcttgaacctgggagggggaggtttcagtgagccaagatcatgccattgcactccatcctgagggacagaacaagactctatctcaggaaaaaaaaaaagtaataaaacagtagcaagaaaacaaaacagtagcaagagcaagaataagcagaagtattaaggtggcatcttccataattatcctcaaggaacagggtctacctccatgtttccagttcagtccctcatacttttacttgacctgtgagatgattgtattctctgccttctctccctggtcacagatccaatgcttaaagttgatgacagcaacactcggatcctgattggctgcttggtggccatcatctttatcctcctggccatcattgtcatcatcctctggaggcagttctggcagaaaatgctggagaaggtgaggaggtgcagaatggtcatgatataagaaactgctcctttctttcttaagccactgttgtcccaggagtaaaaggcaaattgcaaacatttattaatggttggaattaactgaggctaccaagaaacataggaatgaagccagaatagaattagctaagtctattttctcatttttagagtggagatgttggaaccttcctaacgttcctcggaaatgcagaaaactcttcttaatacattgaatctccattcaggcattttccttgaagattctgattcactggattttgggtagagtccaggcatccatatttaaaaaaaaatttaacaagtgcttctgatgcacattcgaggttaagaattactctcctaatgccaagctgaaatttctgataatgctgttgaagttccttctcatctttttcactttgcttgtctgtttggtgtgtgtgtgtgtgtgtgtgtgtgtagaaaaacatccagcttcattaatattcaagccaagtttctcactattctatttctacttttgtgtacttgaaggttgtgattatgtatccctctgagtccctcttcagactctgtctatgccaaatgatctgaataactttttacattgtctaacactttacaggaagcagaatttttcctcatgcataattttatatacacctcattgagtaataactcataggcattgttatgtttaactatttttctgatgagaaaatgtgatgtgcttaaggtcatacaactgatgtccagtcttctatgctttttccaattgttaatattgaaatgcattgatttctttcttcaaaactatattcatttcatcaaagatggaatatctatgacttgtcttggtttcttggaccaaatagcaactcccttggaccaaatagcaactcactgctgcttagtgtctgattcttttggggcctgctgacgactaagtgtttctgcctttggccatgatcacctctcctggtcaattagttcctctcaatagacatggactagtagaggccacaggaactctgagctgtggggctttgaactgcctcctgagggcagggaataggaaggaggagaaatcctgattgatttctgtgtttgggggtggggactcagaggagaccaatgcctgtgtggaacctctattccagaggagaggaaagggcaccatgagaatgggcttgagtctctagagctttctagatgcaggatgggagaaaaatggctcaaatcaggggtaaggaggagcaatcctgatgagtagcctgcaattccttctgatctgtgccaccctcaggttcctgagatggttgatgtttgttttaaggtttttaggaaggaatatttcatggaagagaaggtctccttgcttcccacaagtatgtctaccagtctgaaaacacttaaagctttcaattcgcaaatagcaacagaagactgaaatacagaatccacagagactcactcgctgtcacgagtatgtctcaaggcatgaatgaggcaaatatcaaaatttttcctcctttagaatgctggaaaacactagtgtttaatgaggtattccagagtgagggtggtggtgaactgaaggttcattgaactgcttgaagaggatatgtgaccttcttaaatagtctgttaggaccacattttagccaagggggaaagtctgtgttctctgctatatgagctctttttctctttatttgagccacaatttaccatacttctctgagtctttattctgaggcctgttggaatatcttcatgggctaagagagaaatgttggaatctccaggtaaaaggtagagcaaacattttgcccttgaatatttaacttggtcctccaagaaattctacccctgtacatcctgagtaagatgactcaaggtgctctggaatgacacccagtgtttcttcctgggaacaaaattttatgtggaaaatcattaagtacacacatacattctaagaacattacttaacatagctgtagactgtatgtagcattatttgtaggataattttggtggtgtcctcaacattccttctttgagagatttaacccacatatattgagtacctactttgttctgagcttcatgcttagtactggggatattactgcaacaaaagaccttcagtctagtggaaaagtgcacatctaagtttcgccattgagcaccaaagctgtgtttgttggagtggagcattttacatgtttaaacccaaatagtcacatacatgcaaatgctggcatttgccttttgatggagcaggcaggttatattagataagataccacagaagtagttgctttgttgttctccctcccttattaggtgtaagtcacattgttatctctggacacccagggctttcctgtcccatgttgtagccattttatttttggttagtgaaaatatgggtcagtggtgggtattatcctaatctagggtatcaaaatgatcaagtagaactactgattcatcatgttatagcacatgcattaagttaataaacaatttatgtctattccaaaaccaagtagttaaagggtaagccaggaaaacccatcatttaataaaacatagaaaactctataagattgagatctttggctactgatgggttcttatagcaacagggagataatcttttttttttaagtgtttcagaaagcacatcatagaaattagaagatcaaattctaccttgaagaaatgaaggattattctaagttcctacaacacaggcatttgtggaaccagactgcattcctagcacgtgcagtgttgctggggttaaacagtagtaaagagttatttcatttgagtgggagagctgagtttaagaagaggaggcattgaccatctcttttgtgccaacatgcctttctccttgctcttctcttccaggcttctcggaggatgctggatgatgaaatgacagtcagcctttccctgccaagtgattctagcatgttcaacaataaccgctcctcatcacctagtgaacaagggtccaactcgacttacgatcgcatctttccccttcgccctgactaccaggagccatccaggctgatacgaaaactcccagaatttgctccaggggaggaggagtcaggtgaggatgatgtggtgggcagggtgtcaagggagaaacctcagcaagcatcaggtaggtatgacacgcctgctcccagttcattgcatctatttttagtctctgctaacctcctgagaagtccacattctctttctagatttggtctgccgctgctcctggcctaatttgagcaactctcctttgctactgaatataagatgtgtggagggacccacataccagaaaagaaagaaaaaaataataaaacatgtgaattaggtgttgacaccagaagaacctaaacagtccaaccagtctaacctcattttacatgtcgggaaagtgagaaagtccagatagagtactcacccaacaccaaatttcatgagtgggtaaaggcaggactagatttttacctggagaaataaataaataaatgaagctaaagacattccaaaattcccagtggtgtagccatttaaataactaaaataaataactacttgagttatctattttttgtgaatttctctttggtaaacgtttattagagtaatatgagattttattatgagagtaaaacatttctcaccttttctcaataaaagcattgaaataaaacaataaaacaggtaaaacagtaagtagtgtcagttgattcaaatttcgatgtctttcaaaaaatgatgcagagtcatatcagaagggaagctggagtcacctctttagctcagagcaacttttctataagatcatcaacctgagggacccgagtcagtagaaaagaacttgtagtgttcaggagagaggagctaggcctgagctggatgtagaagcagacaggactaaattcaagagcataggattttataggaaggagcctgaaggggtcttttcaaaggataaaaggaaacttgcatctattttattattcaatggatagaagacatgaaagagcatgctaaattcaagtaatttcacagagacagcaagaataaaggatataaactaatttatttcttggggtgaatggaagtaatttacctatttcctaagtctaaaacatcccccacttcatattttaaggcttttttaagttagaatatgtcttaagctagatcatatgtctttaatctgaaagttttttatacctaaaatcagtttttaagtcaataacagtgtcttaaaattaaggaaataagttattaaaccttcaacctttaatattcccaccctgatataccatgagccttcctatagcttcaccacacaattccacaagtttagccacagaatttgttaatgatcatgtattatgaggaaaagaatgagaaataaaatgatgttctacattctgtaggccacaagaaaatctctagaggaagcaaaaccattttccaagtaagaatgtcatgaagcaggttaggctttcacaggggcatgttttagccctcctctcagagttccttcctgaagagatctccaaagacactccacggaatgagggctcgttgcccttgtcttcccaggctgcagcggtgttgtgaagccagtccagcccagtggccctgagggggtgccccactatgcagaggctgacatagtgaacctccaaggagtgacaggaggcaacacatactcagtgcctgccgtcaccatggacctgctctcaggaaaagatgtggctgtggaggagttccccaggaaactcctaactttcaaagagaagctgggagaaggacagtttggggaggtgagttgattctttgattcccttatagctcgaagaaggtggttggataaaaatgatcagtagaacaaagagtcccttccagaggtggattcacaacagaatgtctcttccatttgtctctccttgcattgtcctctggatttcagtattgggtcaacctaatctttgtcaaatagctgtggagttcctgggacttctgatttctatataggagtttttaaggcaggcaagtcactagacttcagatatcttgaaaaacattcaatattttcaaaaatgtttacaatagattatggagggtgggatccagaagatgtgatcatcttttatgaactgtccaggaacattctgctactcaatagccactttgtttttttcccctttaatgggagttatatgtaaaatggtcaaaaacaacctcgcccctgcctttggtcccagaatcagccactagggaatgaatcaccaactaagataaggaggagtactcttttcatttgccctcagagtgatgcatgcattattaaacttttcattcttgcatcagtcacatgaaccttctgggagctcaaagcaatgttttgaattctaataggaactcttcaccactgccgtctaaactccaaataaaacatttggtttcctaagacatgttattggttttcagtgtggatctcatgttctctccttagataggtctggtgttgcaagaggttgagggacccatgttatctgttcatggtgtgacatgtactcattctgtcccctgggttgaaaacccacatctgttatactgttactaatagacaggagtttcttataatgctaaaccctatactaagggattattttaggaaattgccttacgttttacatgatccagtgactaatgaatcgaagttcaagcatttgtaataaaagacattttatattgggctatgctgtaatataatattgttattgattcattcattcacttagtgttccaagcaatgtgtatttctaaggcaggagagtggcacattagctgggtactttaccattgttttaaatcttatcaattatttgaatcatagatatgttacacatatcttcttattggtcttttgatcattttgcctgagttgtaagagttagtttatctccaggaaatgcccagcaagagtactgagacatcttcaggagaaatgatgatgctgagactagatgacttttgtctaggttcatctctgtgaagtggagggaatggaaaaattcaaagacaaagattttgccctagatgtcagtgccaaccagcctgtcctggtggctgtgaaaatgctccgagcagatgccaacaagaatgccaggtctgtggtctacattttgaattttcctttaggtatttcatctttaggaccaggaatactcctggatacttctgagcaattttttcttttgagatgggaaggtcagtgagctgcctcccatttccactgttatcctttttcttattccgatggggtcggcagtcctcatctttttctccacctctctcaaacacaaaggtacattttccattgtacttgccacatatttacttcctaaccccctgtgcacaagcactgtacttgttcccaacatatacaactgtctaaatgtgtacttctttggtctttatacacagacatactcctgcatgtcattacctcctcttgacaaagtcttcagaatcacacatgactttcttgctaagcctcttccagtctccttttttcacatttctatttattttctcatcccttttttctcttttatgctccttttcttctatttgagcaaccctcaaaatgagaagctacctctatttggaaaattatctatgaacctcaaagcaaaaggatccacagttctctagcagttttccaaactggctaataatctcttggatctttttctacataaattgcagtttccagccacacttcattgtctgacagcctttccattacaataatggtgagttaatcctcacccagagagacaagctggttgaaagctggctgtatgtgtcccagagaaatctccacacctggataacatatgcattttcccatttgtgttgtcttgatttgtctcactgatattcatagtgaaaaaaagtttattattcttattttccaaattatcataaattccaagaatggtgatagacttcattaaaagtcttgcaatggacaagatgtaagataaagaagagagaaaggtgaggaaatgaaactggaggctttagaaatttaactgataatttcaatctttaagatactggtaagaataaaaagtgacattctctgggtcttatagagagacgaagtatttcttatattaatcttagcacatgattggagaaagtggcatgaggggaaacaaaaccaaaccaaaccacaggacataggatatgacaaagcctttctccgttgttccgatcggtgaagtttgccattcctccacctgtgtccttagcaatgatggatggccatgactgcaaaccctcccaagccatggaaacccctggtttgagacggaagggggaatgaaagaggggaggtgttgcatcaggacggcattgattccagtggtttatattgacgtagtatgacttccagtccaggattcctagcaaactcttggagggcttataactcatctgctccaacagttttgggaatgtgggctagaggcctcactaacaaaatcttgctactttatgacccaagggtgtctgtcaccatgtactcaaacaattattagtcttggtcaaatgaatacttcttttgacatgattaccaccacagcctttaaagagctctgttttcgacaggctactaaatacatgttgcaactgactgatggttcgtactgcattaagaaaagtcagtatgagaaaataaagagtaatcagataagccaaagatggttgttcacatcatacaaagtttcttcactagtaatagagtgactccatggctttaaaaaaaaaaaggtaaatatcctcgtgcacttaagatatgattttcagtgaaacattttactctgtagagtggtttttagcagcctatttttgattcagcaaatattaatcactttctgtgtggcagggattttgttagatgtgagggatagaaatgtgaataagtcatggatcttgttctcaaaaacattacaattgaataagggcccatgatatttcaggaggaatagaatgagacagatccaggtgtcaatttctctgtcctctcaaaagttatccaaagggaaacaagatttggcataatgtccaggaataggccttggtgtgcattcttctctctcttgattctgactctggcaacttctgagtttatctatgtctgtatcctcccaaggaatgattttcttaaggagataaagatcatgtctcggctcaaggacccaaacatcatccatctattagctgtgtgtatcactgatgaccctctctgtatgatcactgaatacatggagaatggagatctcaatcagtttctttcccgccacgagccccctaattcttcctccagcgatgtacgcactgtcaggtaaacaagccaggtcttccttctcctccctgtggtcatgagagtaacctgggatctgaaaatagggagcagtgagccttaaagtgtatcaatgttctgggatggtgggggaagtcagtgtgcagggaataatggagcagctgccctttggggaaacgcaagggattcatcaagagtagagaaagaatgttgagctttcaaccctagtttgttgataccattttagaatgtgtacctttcacatcttcctgtttccataggctaccttctgtcttcttgtctatttcctcagttacaccaatctgaagtttatggctacccaaattgcctctggcatgaagtacctttcctctcttaattttgttcaccgagatctggccacacgaaactgtttagtgggtaagaactacacaatcaagatagctgactttggaatgagcaggaacctgtacagtggtgactattaccggatccagggccgggcagtgctccctatccgctggatgtcttgggagagtatcttgctggtaagttctcagcattttaaagccctgtctaacaactggcttgtgggctcacatgcatgacacgtggagacaaacctgagacagcaggaggcaaactcaatagactgtagtattttctctgatttgaaattattttctttgtgtactaattcttattatttaatgcttgcctatttctgctaaaaaattaacacacataaaaatttagggagagaagttaaaaagtataagagatttattatctttgtttctctttatcatttctacctagtgattgttcttaatttaagatattaaaaaccttatcatttaaagaaatgttacctatacaaaatattttcttctccattagtttcataagcatgtttctcataattacatagactaattcctataattgtatttcaatacttttcaacatgttctttttaagttcatcattctttgctttataatttttatttgattcttgatattccataccataagtgagtaatttttcccaaatatctctattagaggtatattttctgtccatgcatacctgagactttttattgttgattttataaccactcagctgatttatagactcattagactatacacttttacttcctacaatgccatgtacatgttattttatcttttttcttgtgtgacattgcagagaaaagtctgagaccaatttggttttgttcatttatgattaatctgcttatttcctgctaatattcttataggatttgtaaattaattttgaaataaaaaatgtatagttattcccttgcactcaccaggataaccactatcaatactttggtatattttcttagaggatttttttctatacatatattttttctatgcatgcaattttttttctgtgcatgcatttatatacatatgtacatatatgtaatttatattacataattgggatgacactatgccatacaattctctatctctatttttaacttaacattttattatctgcataatattccatgtgtagatatatactataacttaataatgcctctataatttgatatttaagtactttccaatttcctgctattatgaatgatgctgtgatgtacaccagtttacataaatccttataaagatctttttcacctatatatgtgaattgctatattttacccatttctaatgggatagttaggcattactctccctaaaggtattatatggtgttcaaaacaatatattagactgacattcagaggaccttggttcaaatccagtttttccactactaatggtcttattaaccagaagaatttgggaaacctctcctgtttcatttttctgatctaaaaaataaggataactggcatggtggtatgtacctgtagtcccagctactcaggaggctgaggcaggaggatgaaaatctgggctgcgctgcgctatgacaattgggtgtcctcactaagtctggcattaatatggtcacccctaggagcagtggaccaccaggttgcctaaagagggatgagccagcccaggtcagaaacagaggaggtcaaaactcccgtgttgatcagtaatgagatcaaacgtgtgactggccattgcactccaggctgggcaacataatgagaccccatttctcaaaggaaaaaatatttaataataaataatatcatccacttcacagtgtggttgtctgtattgagtagaaaatgtgagtagtcaatgcatgctatttacacctgaatctcattgctgtcacttgttaaagtctatctttcaacactgtgattatcactgaactggtaaatgagagtcctggattcactgcaggcacttaaactagattcctctatctctaacataaaaaccattgacttcccattcagattttgcctttctcaggagcattttcccaaggctaccctagagttgaaaggttgacctaacactcagttgcagagtcaaatagcttatggctgcgtttttttcagctcttggatctcatccccagagaaacagaaccaagctgagatcatgagaatgaaagaatgggctgtttctaaatactccatgcacatcttggcattttcagaattccttgcctgtggtgggggaaggggtatagctgcagattatgaaatttaacagggtgttgttgtgcacaggttattctgatttcccattcttttctttacttaaatagggcaagttcactacagcaagtgatgtgtgggcctttggggttactttgtgggagactttcaccttttgtcaagaacagccctattcccagctgtcagatgaacaggttattgagaatactggagagttcttccgagaccaagggaggcaggtaagaactgttggggatgaatggatgtggacctgtgtaccttgaaggatggagaatggcaagtcctgccttagcaggagtgggccgagatggaagacagactatccaggtgttagtctttgtcactaactatccagatgatgtgaaagaccagtatcctccccaggcatccatacactttgctttatctatgtgtcaactcattgactcttggagagcataaagggtcatgtcaggtttctccccagctcaaaggtagcaggaaacaaagtcctatctctcatgatttatctatttcttgatctagaccatgtggtttttcttctgggtcaaaaaataaaagtgtaaaagggatgtattagcattcattaaaaatatagcttagtataagaaatggggttggttttgactatctagcaatgtttctagacttggatgtctgaaaatgggcagatatatcctaaacttgttgctcttggaaggcatctctgggcccagtattgtgacatctcaggactcagggaaagatgagttcccaagctccccaggagtctcaattcctagccaagatactccaagcttttttttgggtggcttagatttaaaattcctgtgagatctggaatttaaagcttgccagtaactacagcaccgcacttccccaaaggggcctggcaacagcatacccttggattatggtatctttaccaggaaaaggataatagctgggggaaggatcttgcagacaataaaaagtggatcttctgtggcttgaacagatccaagcaagccaaagatagataaggtattgacaagagataatacattatgcatattaaaaataagagaggggtctgagaatttaattgtatcttgatactctgtaaatattttggcagcagggagtctaaattagctatcttggttatgaggcaatttgccttcttactatagtcaaaggaaaatttactcctgagtacatgagataagtgagtgggccaaagaaaaatgttgttttctgcctctgccatgatcggctcagccaagatgaacttcaatatgggttgcccataaatggaagatttggtctctttttggttgtttcatcttttgcatgaaggtagggaccacataatggcccatcaaaaaattctgctgcagacaactgcagaagacaaatggaacagcttagaaaagggctgatatgattcagaactttcacgagtaggaaaaatggacactacacccatttcagttatcaagttcaagaaagtgggcagggggcaaatcaaaccatgatgcaaagatacttccctttcccccgtctttgtaatattctctctctctctctcttttgttttcctttatttttgttcccaaagacttacctccctcaaccagccatttgtcctgactctgtgtataagctgatgctcagctgctggagaagagatacgaagaaccgtccctcattccaagaaatccaccttctgctccttcaacaaggcgacgagtgatgctgtcagtgcctggccatgttcctacggctcaggtcctccctacaagacctaccactcacccatgcctatgccactccatctggacatttaatgaaactgagagacagaggcttgtttgctttgccctcttttcctggtcacccccactccctacccctgactcatatacacttttttttttttttacattaaagaactaaaaaaggaaaaaaaaaagcctagggcagatacaatctagtaaaagaaaatctttgatataccaaagtgttggataacaaaggctagaaaattcagataatttataaaggttaactatacttgtgcttataaatgtgcagattctacaatatttttccatgtcattctaaaagaatcttcagaaagaaaaacttgaagaatactaatgtcttgggaaacatgagattaagtttagggaaaacacttgatagatgtggagaatctgaggactcagaattcagcaactaatcacaggtggttttctaatttggcctctggacatgtctcactgtttgtatttctctctcctgtcaaagtgaatgatatattcttgaaaacccccaatttcttgaaatgggtgttctgttcattcatgggcaggggtcaggattgaagttcatatatgaaacaactggggatgtagataggaaagaatgtctgctgcaagagtgtatgaagggggattgtcatttacaaaaaaaaagtacctcatggatggaaggattcatgaatagataatggacataggaaaggaggtcaatggaggacacataacagacatgctatccaccatttatttgtgattttgtaagagggttctcttctttgtcttgttcagatattttcatgtgtgtgttttagtgagaatctgagtttttaatcagtaaagtctgatgttttgatatcttgatgttttgatggtagactcttgagttcatcttgtccaaatcttctagcattttcaaggatgaagcctctgtgggatctttgggcttggggctgaatttctcaggcataaatacctaatggccttgtctaagagggaatagatctgttctgagtgtccccaaaaaagttgtcctaggaactgatgtggagaagttacagggagactgatttccattccttattggggaaaacgaagcactcagaacatacaaggataaatgggctgccaccagaggtgaggagtctcttgtcactggagaggttaagatagaggctcaagaacaatgcaaggaaaatggaggttttcaaacacaaagtggatggtggtatgagacaatgtttaatgtccttctaactccgagagtccttgattctggagaggcacaggatgaacatctgttgctactgctgagtatacacactcttgcctctgagatggcgtgaccagcagaaaagaaagctcagggctgtggcttcagaattcatggaaacagagccactgtcaagaaggaatctgctcagagcagattctgagttttcacactccacaaatcctcagatttagtgggaagctggaaaaaggaactcttaattccaattgaggagaaacaagaaaacattacaaatcagtttcccaagctgagaaggattagccttgaccccttgggtctgcctctgttgccctcaccagtttaccttctacaacagtttctcaggaacatgtgtatttccccattcagctttcagcattgctccacgccacagcataagcatagatcccaagtccacaggctccattttgcaggtcatcttctgatcctagcaaatgtcctttccccatagttgtcctatgcctttgggctttagtctatcccaggactaactgtggagaaatcattggtttgagagtcaagagagcattggtttgggagctttaatcctctttctgcttcacactaagtgtgtcatcttggctaaatcacttggtctttctgcattttgttttcttatttataggatgaggaaattagattaaatggttttgaggtcctttcttgttctgatatgtccagtactcactggaaaattggatctataactgatgggtttagtaatctggtcatttcttgctctgaaaattgtagtcagcaaaagagatcatggaagaaatcactgtaatggtagtaatagtaacacatgccatttgtattgtgccttaggtttaccaggtgtttccaaatacattagcatatttgatatgtgcaggactagataccttgggacctgccacactccactttcaagatatgtattagcttcattagaattaaagggacttgaactcaggacctgcagcctattcttctttatccacatgtctctggtagggctacatccagatcacaccatgacttcttatagagcaagagaaaataatattattatatcttcctttgcctaaaatctctccacttattcttttttatgattctgcaccagttcactgggttattctatgattccatattttttttaaaaaaaatcatatttaaaatgaacttacaatgtctgaattttcctggccttgagtcacagaagtaatatgtttcagatggctgcccaatatgtattatcatgtaatacatatctgtgtccttttctgggatgaggaaggcttcaacttctggcactgagaactttgtattacagacacaggtttagtttctagcttagtcatgcctttagagtttagtagcacaaatccatgcaacccaacagaatacatggtgagggcctagtatgtagaatttgaaagtagttcaaatttgaattagaagaatgaagctaggacttatttggaaaaggagatagaaaaaaaatgatcagaaactgtggggccttattacctttgcagtaagttatcttcttcatgatatatgtgaattattttatgtgcagattgtgttttgggattgtcagatctaaacttatattcttgctggctaatgtgctgatagccaggtctgaaacttgatgtgctatccagacacatatgatcagaaaagatctagagtgcaaagaggtgcctgaggagcaaaatgtggttttaatgttgtggaaagatcacttgcaagtatataagactgtataaagaagaggactgtgtgcaagtggggtgaaaaaaaaggatacgtgaatgtgcatatgactgaatagggaggaaggtcagggctagaaaggaggctacataaaaaggggcaatggagaatgcacaggaaagacacaggggaaggtcaagtcgagcaaggtagaaacaggagtagctagagccattgggaatccattttgaaacaagaaggagttttgaaagggaataggaaagtaagtgtcttgaagtaaaagataaatatggatggagaaagaagaaattctggatgatagagatgataaaaatatttattaagaaatgaagtcaggttcagtgtatgaaatggaaaggaatttttcagaattttaagaaaggggaagttcctcttggaaaagatatagcaaccatcggggaatgaccttttcatttcagaagtggatgaggaaggtggtgtgagcatcaggtatattctggaccatttcaagtgctggtgagaagaaaggaactctttgcctgaactgggcttggttttccaagtgctgctttggaaatgaagacccagagatgcagagcttatggtagttcataaatcttcatgttctattatctttcatctgccaataaagttcattttcaataatgtccaccattgctgtgcccagaataaccacaggcaaacatcaaaacaatacgcataagttagacaagattaaatcttgtctgatatctgcacaaacagatatgcaccatgttggaaacatgtgttttcctagtcccatccaggcttcccacaagaaagccatgatgtgggtctaaaccatatgttttgagtaaaggagaatagaagaaggggagtgtccgcaaaatggaaagagatgaagatgttccaaggaagtatgctgaaacagaacagtgaatgttttgcccaaaactacaaaaataaaagaaaaaaagaaaattgcaatacatggctactaagtctttgatcataagtcgaatttatagacctggaatttgccatcctagtctttcctttttagtaagacttctgtcctctggcagtgcatatggtaggtctctaatgtttcttcatctccaggaagatgcagatccttatttttgctgggaaatccttctaaatagaaatgtaacatttttataaaaacagattaatgtgtttttcacttagtaaatgttttcaagagctgaattgagaaggaaagagactggagtggttaatggtgatttgatttctggcattctgagttttctgctacaattagctgcattacttggtgccaaagagcagtggggaattgttgagttgctgtatcctttaaaaaaaaacaaaaaacttgttattttgaaagaacttaaggctcacaagatgttacaaaaatagtagagtggccttaccctagatccagttttccccatttataacatttcacttagtccattttcggaaccagaaaattaacattggcataatgctattaactaaactacagaccttttttcaatttcgccagtttttccacacatattcatttagttgctggatacttttaattcttgctgatttgtaaactggccttgcttggatacaacaggaaagatactatctggataaagttctacagttttagagagactattaacacattaatgtgttcctttgtcatgagcaataccctgcctacactgcttctaaattttctgatttgtttggctgtttggcatctgaaacaatccaagacaaacttagaaagattaggcaacacaaaacacagtaagacctgttcatagcttgttgtctagaaaaccaggtagcaggatattctagatgcttcctgctgcttctacgtgagtaggattagcactggggacaaaataaggagtttagagtaaaccagtatttcagtcaagagttagttggcacttagttaatggcactggaaatagcttgtggagagaatagaatacaatggtatagactcctaatgtttgataaaatactattttcagagtggtagagaggttttatttgcctaaatagccgttattaaatggaataacaaccacattagaccaaattaattgcaaacacagcggcaacctggggagaagttgaaactccagttttgtggattacagttttgagttttatgattgacatttttaagtcccctatttaaggggtcaagattataacaatgtgtgtcttactaagtttctaggtcattgtgagcacttgataaatatttgctgaatgttgtttttttgaatgaacataagatagaaacaaaaacttctcatccagttaactagagtgaatgtagggagaattgttttgcttgtaacatggagagtttattttcaagtgaggaaagagaaaaaaattactcagacttgttcctggtgaagtgcattctctgtttgtatactttttgatggagaaattgatctatagaactgcttaattttttgaggcatttagacagcaatgaaaggtagttctccacaggacaccgaatcaaaaggagagaccagactctggcctcatacccagcctatttgaaacaagctatctagtttctcctgcagacaccttgtcaacaacatgcaacagtgtcaggtgccttgcaggaaaataatctgagtcccaagctagcctgtgctcatccacaatcacaatgaacatgtcaaggaagaatttgcagagactcaagggaagcacaatgggataaggtaatcactttcagtgaaaaactgttttcttgaaaacaggcttggacacaattgaaagctggcttcctgcaaacacaccaagagtctgtaatctagcctatccattatatgtcctttattattcatgatatcctattcttctaccttgttgcctggtaactttttctgaggactgagtttctgcagcgatgtggtgcactcttcctgtgatgaggaaacatctgggcccccttctgcaggctttggaagatgatgtgtcttgtcaaggggtaaagggcaaatggatttaatttctgcttaaaactatcatagacgttccaaatagaatatgtaaaatttctctgtattagaaaaagaaacgtgataccaattgtatattttcttttctttatttattctctgtaagtctgtcagatgataaattgtaaataacaatgattaaagagtcatgctactgatggatctccctttctgtataaacagtgccagttctgggctttgtaacctttgctctttatagtctttcattcctggggaagtgatggggcatgggcccagagctggggtgtatgtggtatggacacctgtttgtggggctttccagcaaaggattatttaaatagacctctaacatatgagttgactgtttattgggaagaaagcatcttggtctctgacatatccaaacatacgagacactgggattttacgtcctcacattaattagtccagttctggggaatccagtctagaattaactggtgatcccttatcgttatggttacagacttgtcttgtttgatacacagaaatcctttttaaatccaaatatagtctgtctcagactacctgcacatgcacaaaccaaaaaaaactatgaaaaccagaatttagactcagtcattatactagagattagaatgaaacgaccccaaacaacccatttcttacctggtctctgagaataagtttatacttttagttttctgagaatatttctcagaatatgtgagttttctgagcacatttttcagcatggggtatggtagataaatcacagggccaaggtttggcagggatagatgggatcattgtgtaccctattgttcttctgatttccaggagaacagaatgagcccatgcaaaacataaacttatgatgattaaaaaaaacacacctatccattcactcatcaataaaaacatattatgatggttatcaagctgtgtcctatgagtgataaaatatttgtaaaatataaaattaaatggcatctattttgaactcta

SEQ ID NO: 301 - DNA, 68128 bp, Homo sapiens
  source 1..68128: mol_type = genomic DNA; note = NC_000010.11:94545778-94613905 HELLS [organism=Homo sapiens] [GeneID=3070] [chromosome=10]
attttcccgcgaaggagaagcgcgcttttttccctggcgggggatttggctagaaggctgggccggcagcggttgtgaggagttagctcgcggcattgcaggctctgagaggaggggacccggttcccgggtgagtgtccaggcatgccagcggaacggcccgcgggcagcggcggtgagtgaggaaaaccttttgggcgcgggtggcagcctgcggggctgaggtgggcaagcatggaggctgcggcggagtttcggggagggagccgaccccgggcagggactgaggaggaaaggagggttgggaaactgcaacggtgagtggaggacaccccggaatcgcacgtattagcatgccggtgaagatttcacataggcaactgcattttcccgagcatcccgagttgtaaactgtggtccaggcgacttgtagacattgtgaagacttacggtgtcttctgagaggtgatgctggcgtcccctcggtcttcagcttttgctccagtgcatctcgggtgggagaaaggctgtttcttgttggagttgagtagttggtaatttttttaaaactgcaatttgaaagctttctcccccgtcaggctcggaggctccagcaatggttgaacaactggacactgctgtgattaccccggccatgctagaagaggaagaacagcttgaagctgctggactagagagagagcggaagatgctggaaaaggtaatttaggcatcaggttcgtcgtcgtgaaagcctgtggtaacctcggctttaacccggaggtgtggtttgtgttctttgctttcctatttagtgggctttttaataactgaaagaaaacagctttattacttgtcttttttgtatgtttacagatattgcctttgagaatcctttcgcaagtgctttgaatggtgtgtttctatgagatgtagtcttggtagtcccatcacttttaaatgagcatttcagattgcttgtttagccatgaaaagtctttcaaagtccatagtgagttttttcgtttgtcatccttatttcctttaaaaattaccttaaatgtatgtctcatggcaaacaggaatcgctaaaacctgcagaagtaatgtactagactgagggcaggagaagttagcatcaatcaaaggctgggctggaatccaagtctaatgatttccttatactgtagtgctgttttccacctaagtgatcaacttgctgtttgtttttcttttggtttcatggcctgtgtattgctacataagattctttagctaaaaatgtgccgtactttttcaatgacaagttgctgtagttttcttgtagagagcattttgtaagttactaaaaacagtttttaacctgaaaaattcttgtttattctaaagccccaccctgctgcttgattcatatgcaagaaaaagaatgatcgttgactcttaagtactgcctagtacgtggttttcttgtgctttattaatttattaaactctaccgatattatgatataggttattttttgttattttcatttacaaatgaagaaactgagggagaagggcacatagtaagtgttgaagtcaaatttcaactcaggctgcctgcagaatttctgtccttaataatagtgaattaactcatgattataaaactacttaagttggaaaataatgcattccaaaaacgagtaatgaggccgttggttccctgttatgtcaacaataatttttttgtcagcattgttaatacttcttgaacatttattaggagtcatgcattgttttgaatgctttatatgtatttactcattgaatcctcaactattctgtaaagtagatgttcattattactattactgctattaaacttactagtttaattactagtataaacaattgctattattgaactacacaaccaaataggttttattagtcatcttattttacagatgaggaaactgaggcacatagaggttgtttgggtgccacagttggtaaatggcagagctaacattccagtgtaggccatgtggttctagaatgcacattttttaactaccatgctatagttccactccagtaatactccttccgttattactgatgatctctggttgactataaccagttaaggtaatatattaacaaattttctttaagtaacatcaatactttttgcttcagggtagatgtgaattaacagaattgagaggtctgacctgaaccaccttttctcattctttgaattttcatagtactttattacacagaatttaccatgaccaaataagtaatgataaatacttcatactactttttgattctttctcactttgtttcttgagggtgcatcacttgctgttttgtttttgtaggctttgcacctggcacatagtaggcaatcagtaagtgcttattgaatagctaacgatgataaaatggtattttataatatacaagattatatacatatactaaatatacttattagctatataaccagatgaattataaagtataaattctggggcaagtgcccagaatggaatcaactgaagaagtctaagagggatgtgataattttgtcttgagtaatgtatcttcagttttatcttgtttcttcatatacccattatgagtgttgggtagggaaatagcatttaaagaaagatatgcctgagatatgacaacagtacattttcagaaggtattattcattcaaggaagaaacacttcacatttaaaaaagataagtcaaatatgtagtattttatatatttgctgaggtcaaatgacctgctacttttaatgacatttttaagcttatgaacaaacattttgcagttagtcctaaatttaataattatgcatcatagaacctaaagagtaatttttaatccttccattaaaaaagtatatggctgttttcatggcctggcatggtggctcacgcttgtaatcccagcactttgggaggccgaggcgggtggatcacctgaggtcaggagttcgagaccagtttggccaacatggtgaaaccccgtctctactaaaaatataaaaattagccagatgtggtggcgcatacctgcagtcccaactactcaggaggctgaggcaggagaattgcttgaacccaggaggcagaggttgcagtgagccgagatggcatcactgcactccagcctgggtgacagagcaagattccgtctcaaaaaaaaaagtatgtagccgttttcaatcttaatataagtgtgtaatttgctaaaacattagtgttgtggtttcgtattacattgtcttgttatgtacagataaggaaagtttttgattattttttgcactggaccctcataaaaagtgattgcctagatgacactagaaaattctaagaaaagttttcagagtctctacctacttgagattaataaacatgtctttggaggccaaacaattaactatgcacaggtagagattccttttcttttgggagaatacagtctgtatgggcatgtatttagaagtacttaacagaggaagagctagcttaagttccttaatgagaagcatttggctttaggaaatcctaaggtttgtgaggaacctagaaaatgactttgacattcattggctacagttattttctttgacttttcacatgtatttccctttaaaagaagtcattgttagtctaggagatttgagtactgatagtgcctgtgaagtggaggagggggaatagttggagtcaggagatttcttggagaggtaaaaggatcatgatatgtgtaggctaaaatagaactcctcccaccccccaataaaaaatctgggattggtgttgggagagataatggggtagataatgaggaatttctgccctcggtgtccattggcatactctgtactgtagttacccagagttgtttcctgccaggcactcagtgcttttaatagatggagttgcaatttaccgtaatataatcatgaaattgataaataaagaaaaaacagtgataggaagatttgaaatacagaagaccaggtttaaggattaaccacttacatggtattattttaatattaattgtatattatttttttccatgatggcatcttaaagctttagtgatttttatttttatttttatttttttgagacagagtttcactcttgttgcccaggctagagtgcaatggcgcagtctcggctcactgcaacctctgcctccggggttcaagcaattctcctgcctcagcctcctgagtagttgggattacaggcatgtgccgccaagcctggctaattttgtatttttagtagagatggggtttctccatgttggtcaggctggtctcgaactcccaacctcaggtgatccgcccgtcttgacctcctaaagtgctgggattacaggcattagccaccatgcccagctgatttttttttttaggaaaaatttttccaggagcaccaggcaagtatttaggttttttttgcttgtttgtttgttttgagacggagtctccctctgtcacccaggctggagtgcagtggcgtgatcttggctcactgcgaccttcacctgccgggtttaagcgattcttctgcctcagcctcccaagtagctaggactacaggcgcgtgccaccacgcccagctaattttttttgtatttttagtaaagacggggtttcaacatattggccggcctggtctcaaactcctgacatcgtgatctgccttcctcgacctcccaaagtgccaggattacaggcgtgagccaccatgcctggctgtatttagttgttttaaaaatatgtgctggccaggcgcggtggctcatgcctgtaatcccagcactttgggaggctgaggcggggcagatcgcttgagcccaggggttaagaccagcctgggtaacagggtgaaaccccatctctacaaaaaattaaaaaactagccggcatggtggcacgcgcctatagtcctagctactcaagagggtgaggcaggaggattatcgcttgagcctgggaggcgcaggttgcattgagccgagatctcaccactgcactccagcctgggtgatagagcgagaccctgtctcagaaaaaagaaaaagtgctaattctgtacaggatttaaggtatcaactatatctaagttaaacccacgttattttaactgaacttaaattttaaaagttaaaaatttaagaatccatatattgtgtaagtaattttcatctccctgttttcatattcacctcagtagttgcgtattgtaaccacagtagtatactggtaatagtaaaagaaattctgtcctaaaagaactgaaaattgagttcaagatattaagaattatctgtgtaggtgggattatgggtgatttatatattttttgacatttagtttttctgtaatgagtatgcattacttttgttaggtccattcttagaatcttactgtagtcactgattttataatagaaatatattttgatgccgggtacggtggctcacacctataatcccagcactttgggaggctgaggcaggtggaccacgaggtcagttcaagagcagcctggccaagatggtgaaagcccgtctctactaaaaatacaaaaattagcggggtgtggtggcaggtgcctctagtcccagctatactggggaggctgaggcaggtaattgcttgaacccgggaggcggaggcagaggtgagccaggattgtgccactgcactccagcctgggcaacagagtgagactccatctcaaaaaagaaaaagaaatatattttgaaagaaagctatagtgatgatgtaatagctaggaaaatgtaaggcaatataaaatgatatcttagagatattgataagctggagcagcaaaactacccaagtgctagggcattatttagagtataaaaatgaattcatacccccatttcttttcttttttttttttgagatggagtctcgctctgttgcccaggctgaagtgcagtggcgcgatctcggctcactgcaagctctgccttccgggttcacgccattctcctgcctcagcctcccaagtagctgggactacaggcgcctgcaaccacacgcggctaattttttgtatttttagtagagacagggtttcaccgtgttagccaggacagtctcaatctcctgacctcgggatccgcccgcctcagcctcccaaagtgctgggattacaggcgtgagccaccgcgcccagcctcatatcccccatttcaaacacgctgtaaacaatgctcaattactttcctcttaagttgaaaccaccaattactggggaaaggggcagttagattttattggttgactttgtgtttttactaatccttgttgaaaagtagaggaattggtttagttgagaaaacaaaatactaaaaaatctgccactagactttttaagtcaagagtttgtataaaatgaaacatatctactatctaatctataaaatttagaatctttttaattctaaagttaacttaagtgtgatttttagtgctgttgctgaggccagtgttgcttaaagcaggaacttctacagtaattgacaaaacttgagtttttctgctctcatttatccatccttcagacccctcagatgtcatctatttcctgaaatctgacttctccagttttagtaattcttacaatttttcaggatttagatagtactgtacagtttactgctatgtatatgtctttaatacttgttgttttcagatattacactaatgtctcatctgtagtataaatcagactttctgtcttctaccagttacataatttatataattgttgcagtacatgtttgttgatttactaggctggattcatgttacagaattggtaatcttggttgggcatggtggcacatgcctgtaatcccagtactttgggaggacaaggcagacgaatctcttgagtttaggagttggagacctgccttagcaatatggtgaaaccctgtctttacaaaaaaaaaaaatacaaaaaattaacagggcatggtggcatctgcctagagtcccagctacttgggaggctgaggtgggagggtggtttgagcccgggatttggaggctgcagtaagccacaattgcaccaattacagcatgagaccatgccttaaaaaacggggtgggggtgttaatcttggctagatgtctgttttgattgttaggatgaattgtgttggtagtatttttctaaaatgttctatccaaatcaacttgtttattaatctcaaatagggagagactctgaaaacttgtcttagaattctctagtgtcacctaggcaatcactttttatgagggtcaagtgcaaaattaatcaaaaattttccttatctgtacataacaaggtaatataataacacggaaccacaacatcaatgttttagcaaattacacatacctttttttttttttccggacggagtctcactctgtcacccaggctggagtgcagtggtgccatctcagctcactgcaacctccgcttcccgggtttaagcaattctcctgcctcagcctcctgagtagctgggactacaggcatgcgccaccacgtcctgctaatttttatagttttagtagagatggggtttcaccattttggccaggatggtctcaaactcctgacctcaggtgatccaccctcctcggcctcccaaagtgctgggattacaggcgtgagccaccgtgcctggccccaatttttttttttttttttttggtacggagttttgctcttgtttggagtgcagtggcatgatctcggctcactgcagcctctgcctcccccgggttcaagcgattctcctgcctcagcctcccaagtagctgggattacaggcatgcaccaccacgcctggctaattttgtatttttagtagagatggggtttctccatgttggtccggctggtctcgaacccccgacctcaggtgatccgcctgctttggcctcccaaagtgctgggattacaggtgtgagtcaccgcacccggccttcaattgttttttaaatggaccttccaactcagtagtgccagaaaccatgtgttcaatatttgaaattataatattttgatatacgaattgcatctatcagattgcctgttaaacccaaaaactattttttttttaacagttatttgttccagtttttggtttgaaagtgtttggtttaaaaaatgttattttagccatttttattaaactttatgccaaaaaaattaaggtatgtcagaaagtgttcataattatggaaattttctctttggataggctcgcatgtcttgggatagagagtcgacagaaattcggtaccgtagacttcaacatttgcttgaaaaaagcaatatatactccaaatttttattgacgaaaatggaacagcaacaattagaggtatgtatatgtaactgactacaagtgaaagcttaaaaaaatttaaaaatagctttattgaagtgtatattatatacagtaaaatggacagattttaagtgtacggtttgctgagttttgactagtaaatatatagatctgtgtaaccaccagcacaatcaagatacagtgcacttccatgaactccaaaaaattgtcttgtgctgacagtaatccccatggctggtgtccagcaactactgatttgctttctgtcactatagaccagtattgttttttcctagaaaattgtataaatgaaatcatggtattgtgctagtgagtaaatagttggtcttcatcaccatttcctggtatacaactcttgaaatccttggaatcttcaaagtaatagtgtttttttttttgtttttttttttttaatgctaatgatcaatggctagctgcccttaggtagcttcaggatgggagcctaagaaagacaaaacctggattagagggttgggatttagcctcaccctcaactttgaggaaaagagactgaaagttaacttgttcaccagtggtcacgattgaatcaatcacgtctatgttatgaggtcttcattaaaaacccaaaagggctgggtgtggctcacatctgtaatcccagcactttggggagcctaggtgggtggattgcttgagcccagaagtttgagaccaggctgggtaatatggcaaaaccctatctctaatagaaaaattagctaggtaaggtggcatgtgcctctagtcccagctacttgggaggctgaggcaggaggttggcttgagccaaggagattgaggctgcagtgaactgtgatggcaccactgcattctagcctgggtgacagagcaagaccctgtctcaaaaataaaacaggctgggcgcagtggctcacgcctgtaatcccagcactttgggaggccaaggcagacagatcacttgagcccaggagttcgacaccagcctgagtaacatagtgaaaacccgtctctaccaaaaatataaaaattagccggtcatggtggtgtgtgcctgtaagcccagctactcagaaggctgaggcaggaggatcgcttgaacccaggaggcggaggttgcagtgagccgagattgcacccctggactccagcctggatgacagagtgagaccctgcctcaaaaataaataaataaaaaaaaccccaaaaggggacagggtttggagaacttctggatagctgaacacatggaggttcctggagaggatggcgcatccagaaaaggcatggaagctctgcgcttctttctccataccttgttctatacatctctttctctggtgttcctctgaatatgttgtaatctttctttctttctttcttttttttggagacagagtcttactctgttgcccaggctggtgtgcagtgcaccatctcagctcactgcaacctctgactcctgggttcaagcagccctcccacctcggcctcccgagtagctgggactacaggagcacaccattatgtctgtcttatttttgtattttttgtagagacagttttgccatgttgccgaggcttgtctggaactcctgggctcaagtgatctgcttaccctggcctcccaaagtgctgggattacaggggtgagccactgcgcctggactgtcatattctttataataaaccaataaactttaatgtttctttgagttctgtaagctcctctagcaaattagtcaaacccaaagaggggcttgtgggaaccctgatttatagctattcagtaagaagcacaggtaaggcgacttgggccttgcgattggcatctggaactggtagttaaaagtcttggggactgaaccctcaacctatggggtatggtgctttcaccccgtagatagtgtcagaattgaattacaatagaggacacccagctggtgtcactgcagaaatgcttgtttggtgtatagggaaaacccccacacattgggtcacagaagtcttttgtgttgattgttgagtgtgtagggagaaactgagtttgtttttttctcaatattcttgcacatatgcactctttgtcttgttacttttgctcagtgtatttttgagattcattcatgtcatgtttttctgtaggttattttttttattcctgagaaggattccattaagaaatgtcgttattggggtgtaattgacatacactaaactgcacatatttaaaatgtacaattccctaagtttgatatatggatatacttgtgaagacataacaatcatgatagtggacatacccactgattccaaaaaattctttctgcttatttataattcttctcgcccgtccctaccccatgttctatccacagatagccaattgatctgttttctgttattataggttcatttgcattttctgttggtgatgggttcttttagctttcatatgtctgaatgtcttcacttaccttcatttttgaaatacgtttttactgggtaaagaattttttttctttagtactttatttcttggagtactttaaagatgtttcactgtctcctagcttatgttgtttctgaaaagtgaaagtcctgataatgtctatatgtctgtaagcaatttgactgcctccctcaatcccattacctttcagacctgtctccagatgtgtttcctgtcttgggcttttgcccttgctattttatgcctggaaccttcttcctctaaataactgcatggcttaacttcatcttcaagccctgacttaaatggtttctagatgagacctgccctcacaattttaagaaagttgctaacacacctgattctctttaccttgttctgttcttcccattgcacttttcatctgatatacatcatttattgtatttattgtttgtctttccactagactgttatgaagatttaaaaacttgtgcaaattgagagaatacagtaagtcccggtgtccccatcacccacatttaaaaattatcaatttaaattttgctgtatttgtcaaatctcctttttcctttgtttgaaacccttttattacttttttatggtaaagtaaaacaaatggaaaaacaaatattcaacttaatgagttacacagcatctacccctttcatcacctcttggaaatggtttgaatttttggtgtctttaaaaaatttgtaagagtatgtctagaatagcttttagtctaggaataagttgatcccttttctgagcactctacttgatgccctttatattaagaggactttctactttggctgagagaatgtgaggtataccttattatgcctgaccccttggaacatgagaggttccacctgcttctttctggtgactcttctcctggccttggttaccatgcacttaccagtactcagcctgagagagagataacagctgcctttgtgcagctttgtcctctctggtacttgaccctgggaatgctactgctcttaagttttggattctgtctcctcaacacaaagagactgttgggctctgtttggatttttctccattatttgtactttaaaattgtatcaggcagtaagctgggcagtcagaagattaaccttgtttccgttttgtcagtgtttacagtccgttactgcatgttgtctgaaaaccattgtttaataaattttatctggattttagttgtttaaggcaggaggctaaatctgtcccattagtccataaaggcttgaagtacaagttcctccctggtttttaattatgatagaccttagtttctcattgtaaacataagttatttgagaattgatatgcgttttttttttaaatgttgcactttccacttgtgacataagaaaaaattgtcttacaggaacagaagaagaaagaaaaattggagagaaaaaaggagtctttaaaagttaaaaaggtaatatagccagccggaatattttttatgtcatttaaatattgaagaaatacttttgtattcttctgacttttttgatcatctgtttaattttaagtttctttagtgataaacctaactttgttacaagcaatgcagaaacatgtaaaatctgttcctcactatttaagaaatggagaaagagccaaagtatggtccactttagtttcttattctatggattattttggacgttggcaaaatttgactttcttaattggaaagaatctgcaaatttaaacttcaaggcattttgtaagtggccaccttctttgaaacctgtaatgaagttttgctagtgaaaagagaaataatttattgaatacatactgtgggtcaggtgtgctatcatgtcttctcttactctattttttttttcttttttgagacggggactcgctctgtcacccaggctggagtgcagtggcgcaatctcggctcactgcaagctctgcctcccgggttcacgccattctcctgtctcagcctcccgagtagctgggactacaggcgcccgccaccatgcctggctaattttttgtattttcagtagagacagagttttactgtgttagccacgatggtctccatctcctgaccttgtgatctgcccacctcggcctcccaaagtgctcagattacaggcatgagccaccacgcccagcctgttttcccttactctcacaacagttctttttaggtagaggtacttttttcccccattttacataaataggctgatgcaaggagataaagaacaatcatattcaaggattctatatttgtgaattcgcctactcacttacatttatttgtaaccccagagtcaagattcctgacaccgtcatggtcatttttggatatgcttatgttcagagcagcaaagaattttagtcctccaatacatatgttccaagctcagctcaaacatgggttgctgttctttgttttctgctaccatatgtatgtcaagcatatatccttttcatggtctttatttagcaccataacttttgcgtttttttgtgctttttcatggtgattttgctgttaaaatggcccccaactattgtaccaaagtgctgtctagtgtttctaagtacaaaaaggctgtgccatatggagaaagtatgtcttgggtaagcttcattgaggcatgaggtacagtgctgttggccctgagttcgatatttatttatttattttattttattttattttatttttttgagacagagtcttgctctgtcgcccaggctggagtgcagtggtgcaatcttagctcactgctacctccacctcctgggttcaagcaattcttctgcctcagcctcccgagtagctgggactacaggtgcgcgccaccatgcctggctaatttttgtatttttagtagagacagggtttcaccatattgggtgggctggtttcgaattcctgacctcatgatccacccgcctcagcctcccaaagtgctaggattacaggcgagagccactgcacccagctggccctgagttcaatattaatcaacatatatattaaataagatatctttaaaaacagaaacacaaataaaacagggttgtgtatcgtttggttgaaaatgtcataaccagagtcagagacccaagcttgtatttttcctaggggcaataagtcaatagtcatagtgattttatcgaaccacaagtactgcagataatgagagctgactctaatttgctgaaaattacggatttgaacccaggattagtttaagagcttctacttagcttctgtgctaaactgccttttatttatttattttttttttgagacggagtctcgttctgtcacccaggctgggatgcagtggcgtgatttcggctcactgcaacctctgtctcctgggttgaagcaattctctgcctcagcctcccaagtagctgggattacaagcacctgccagcacacccggctaatttttgtatttttagaagagacagggtttcaccatcttggccaggctggtcttgaactcctgatcttgtgatccacttgccttggccacccaaagtgctgagattaagtccagttatttgattcttagactagttaatggtgatgttaaaatgcctgataaagtattttgcagactgttttgcaacaaaacccattatttaaaactggtaatactgctaggtgtggtggctcacgcctataatcccaacactttgggaggctgaggcagatggattccttgaggcaaggagttcgagaccagcctggtcaacatgatgagaccctgtctctgctaaaaatacaaaaaattagctgggcgtggtggtgtgtgcctgtagtcccagctgcttgggaggttgaggcacgagtattacttgaaccacggtaggcagaggttgcagtgggccaagattgcatcaccgcactctagtctgggccacagagggagactctgttcctaaataaataaataaataaatacataaaactggtaatactgagtcactgagagagagagtattaaaaaataaaaatgggccaggcacggtggctcacgcctgcaatcccagcactttgggaggccaaggtgggccgatcatctgaggtcaagagctggagaccaacctggccaacatggtgaaacccagtctctactaaaaatacaaaaattagccaggcatgatggcgggtacctgtaatcccagctactcgggaggctgacacaggagaattgcttgaacctaggaggccgaggttgcagtgagctgagatcatgctactggactccagcctgggtgacagagcaagactctgtctcaaaaaaaaaaacaaaaaaacaaaaaaaaaaccctctgatccttgactcacttgctaatttcagagacttacctagggcttttcagatttttattttcatagagacagagcttcactatgttgcccaggctggtctcgaaccccttggcttaagctatcccccacacccacacccataccttggcctctgaaagtgctgggattacaggcatgagctagcacaactggccttacctaggggttttgaagaacatgtttttatttatatgacaattttactggcttagtcatttattccctgctctttaacctgttaatttaatatatccttcactttattccacctaactttttataccagggttttgatttttttcccctctgcttttttcataagggcgtcaactattttgaaacttaaaaaatttttttagaggtgatgtctcagtagcccaggctagagtccagtagcaccatagtagctcactacagctttgaactcctggggtcaagccatcttcccacctcagcctcctgagtagctgagactacaggtgcacaccaccatgctcagctaattttcgcattttttatagaggtggggatcttgctttgttgcccaagctggtcttgtactcctggcttcaagcaatcctactacctagtcctcctaaagtgctgggattataggtgtgagccactgcacctggccagaaactgtttcttaacatctcatttctcttaccttcctcactaataattttccattagtattctcttttatttctgctttgggttatatttaatgtatgaatttcattcacaatgaatattccttcaataccctacctattgaagggtattccttcaataccctaccctacaaaaatacctatttttgtatttttagtagagacagggtttcaccatgttagccaggatggtcgtgatctcctgacctcatgatctgcccgcctctgcctcccaaagtgctgggattacaggcttgagccaccgcgcccggccaagatgtacatggtatttctaaataaaaatgccaactatgggctgggtgcagtggctcaacgcctgtaatcccagcacttggggaggcctaggcgggcggatcacctgaggtcagaaattcaagactagctggccaacgtggtgaaaccccatctctactaaaaatacaaaaattagccgggcgtggtggcaggtgcctgtaatccccactactctggaggctgaagcaggggaatctcttgaacctggcaggcggaggttgcaatgagccgagattgtaccagtgcacactatcctgggcgacaagagtgaaactccgtctccaaaaaacaaacaaacgaaatgccaactatgtttaattttgaaatttctcttctaaatggaaaaaaatggacagaagtagagcccttgggaaaaagcagagattatgaacaagttatagtagggaaatacagaaaaatattacatgtaggtaagtataatagtgaaaaattgtggatgtggctcaattgcaggaaacatattttttctcaagttaatcagtgccttttaacgtataatactatgaaggtccttaataaaatcaatattctgaatccttgttttgtagggtaaaaattcaattgatgcaagtgaagagaagccaggtaaatatccttattctagttttgaagaatatgcgtttatatttctattttaattgctatcaaaaataaaatttttttttatagttatgaggaaaaaaagaggaagagaagatgaatcatacaatatttcagaggtcatgtcaaaagaggtaaaaataaaagggagagggcacctaacatttgatgttgagtaaaatgtaggttttaaaccaccttaaatctgtaaagattgaatattcaatatcacatgaaatatgttttgaatttaatattatatatcatttataggtgaagctgccaaaatgtttgaagctatctaccaacctacagtagacttgagactaatctgaaactaatgtcatctgaccttcatagacttttttttttttttgagatggagctctgtggtccatgctgccttgcagtgtcactatatctgctcactgcaacctccacctcgcgggttcaagcgattctcctgtctcagcctcccaagtagctgggataacaggtgccaaccaccacgcctggccaatttttgtattttcagtagagatggggtttcaccatgttggccaggctggtcttgaactcctgacttaaggtgatccgcccgcctcggtctcctaaaatgccacattacaggcgtgagccattgcgcccatcctcacttaagtggcaaataggcttacacctttaggttgttctggttttcttttctttctttcgtttccttcctttctagcttccttcttttttttcttcttttctttttttgaggcagggtatcactctgtgactcaagctggagtgcagtggcacaatcatggctcactgcagcctcgacctcatgggctcaagtgatcctcctacctcagccccctgagtagctgggactacaggtgtgtgacaccatgcacagctggctaatttttaaattttttgtagcaatgagatgtcatatgttgcctaggctgctcttgaactcctgggttcaaatgatctttttgcttcagcctcccaaactgctgagagtacaagtgtgagccagtgtgcccagctttttgttggttttcttttcttttttttttttttttgatgagacggagatttacccttgctgcccaggctggaatgcaatggtgcgatctaggcttaccgcatcctccgcttcccaggttcaagcaattctcctgcctcagcctcctgagtagctgggattacaggcatgtgccaccacacccggctaattttgtatttttagtggagatggggtttcagtgtgttgcccaggctgatcttgaactcctgacctcaggggatccacccgccttggcctccaaaagtgctgggattacaggcgtgagccactgcacccggcctttgctggttttcttatttgggttattacagataacagtaatagctttgactctacctattatcttgtgcttgttaagtacctagtggacttgtatagcattttgcaaggaactgtggaaacaacaggcatgggcatagagcttaaaattacatatatgttgcggagagttggggggaaagggtagggtagtaaagacactgtctgaccagagcagataagtatttcagggaaaaagatggtaccagctctttgttaaacgagtctgagcctggcctagtcagaaattgtcactataatttaactttttgtaacccctaaccttgtcttaagaactttattcttgttttttgttgaagacttttacgaaactgaaatcatatgctcttttctaaaaccagcttctttttttcatttctcactttttacttaaaaatatgaatgaattagagcatcttcagttctgacaaaccagttccttagcatgtttttaatgtgtcacattcttcctttttttttcttggagacagtcttgctctgtccctcaggctggagtgcagtggcgcgatctcggctcactgctacaagctccacctcccatattcaagcgattcttatgtctcagcttctgagaagctgggattacaggtacctatttgtatttttagtagagacagggttttgccatgttggccaggatggtcttgaactactgacctcaggtgatcctcacgcctttatctcccaaagtgctgcgattacaggcatgaggcaccactcctggccacattcttatatttaaaaaaaaaagcacaactctattgtctactgttgttcttttacctgaagttcaaactctagctcttcagaagaaaaatttacataatagttttccttttctctagggatgcaatgatagtttttcactgaaaaataatcgtcagggggccgggagcagtggctcacgcctgtaatcccagcattttgggaggctgaggcgggtggatcccgtgaggccaggagttcgaaacctgtctggccaacatggtgaaaccccgtctctactaaaaatataaaaattagctgggaatggtggcttgcgcctgtagtcctagctactcaggaggctgaggcaggagaatcacgaacctgggaggcagaggttgcagtgagctgagatgatgccactgcactccagcctgggcagcagagcaagactctgtctcaaaaaaaacaaagttagggtccactgaaattcattatggtatctattcaacttgcagtttaaaacacttttaggctgggcgtggtggctcatacctgtaaaccccggcgctttgggaggccaaggtgggaggatcacctgatgtcaagagttcgaggccagcctgaccagcatggagaaaccccatctctactaaaaatacaaaattagctgggcttggtggcacatgcctgtaattccagctacttgggcaggctgaggcaggagaattgcttgaaccccggaggcggaggttgcagtgagctgagatggcaccattgcactccagcctgggcaacaagagtgaaattccatctcaaaaaagaaaaaccacttttaatatgccatactgaagtttagccagtcatacagctgtttatttaatttgttaaatggttgtggaatatcggttttgggcaaactttgtcataggtggatgaaatccattagtaaagaaaggtaaatgctgtcttcaccttagcctgcatacagagagagatataggagtaagtagtcaatgaaattgaatttttttttttttgagacagtgtttctattaccctggctcgaatgcagctggcacaatctcagctcactgcagcctcaacctcccagactcaagtgatcctcgtatctcacactccccagtagcagggactacatgcctgtgccaccaggcctggctgatttttgtattttttgtagagatggggttttgtcatgttgtctaggctggcctcgaatttttgggctcctgcctcggcctcccagagtactgggattacaggtctgagccactgtgtccggttgggaattggatgtttatacaccatattagaggggctcttcactctggcatgcagttcctgaaccttttcatctatgaaaaggaaatgatatctgtgttgtgacttgaaggataaaagttaaattatttaaaggtgggattaatagggaaagagtaaagtacaggtaagatagtgggggaggtgttttaggaagaaataatagcattgaacaaatatccagggtcaagagagactggcagtttcaaaaaacttgaagtaaattatatttgcctccaatttgtatataagtgaaaagagtgatgaaggaaggatgaagctgtcgatgtaagcatggtcaggagtttaaggctgccataagtaaagtaggaagctattgaaagattttaagcaaatttccattttggtaaatcacttggctagtttattcagagatctgtgggcatagtagtttttctttctttctttttcttttctttttttttttttaagacagagtttcactgtgtggcccaggctggagtgcagtggtgatctcggctcactgcaacctccgtctcccagttcaagcaattctttcacctcagctccctgagtagtccagcgcctgggactacaggcacgtgccaccacgcctggctgtttttgtattttttcatagagaggtggtttcaccatcttggccaggctggtctcaaactcctgacccgaagtgatctgcttgcctctgccttccaaagtgctgggattacaggtgtgagccaccatgcctggtcccataccagttattctttcatttactgttacttctttcttctgtatatttactgaatttcctgctctcttttcctcttcgcctaactaaattctttccattgtttcattctcaccttacttgctgaagaatctctaaatctgtgaatgcatttggaggggtataacccaattgagtgttctgccactgtggaccctgctcctccaagttatcccttctgtttcttcaccttttccttcctcactgggtctttgcctttcaattatagatacattgtgttttcctgtctgcagaacaaaaatttttgatccagtctttctagattgccctgttttttattctttatttccaaggttttttttgagacacagttttgctcttgttgcccaggctggagtgcaatggcgccatctcggctcattgcaacctccggctcccaggttcaagcgattctcctgcctcagccttccgagtagctaggattacaggcatgtgccaccacgcctggcaaattttgtatttttagtagagacggggtttctccatgttggtcaggctggtctcgaactcccgatctcaggtgatccacccaccttggcccccaaagtgctgagattacaggcatgagccactgcaccggcctatttccaagctttttaagagtaggctggactggacatgatgcctgacacctgttatcccagcactttgggaggccagggtgagaggatcacttaagcccaggagtttaagactagtttgggcaacatggcgaaatcctgtctctacaaaaagaaatacagaaatagccaggtgtggtggtgcatgactttggtcccagctacacaggaggctgaggtgagaggatcacctgagcctggggaggtgaaggctgcagtgaggtgagattgcgccactgcactgcagcatgggcaagagaatgaaaccctggttttttttttttttttttttttggagagagagtctcgctctgtcgccaggctggaatgcagtgctgcgatcttgactcactgcaacctccgcctcccgggttcaagtgattctcctgcctcagcatcctgagtagctgggactacaggcacacgtcaccacgcccagctaatttttgtatttttagtagagatggagtttcaccattttggcctggatggtctagatctcttgaccttgtgatccatctgccttggcctcccaaagggctgggattacaggcgtgagccaccgcgcctggcccttttttttttttttttaaagagtagcctgtgcatatttccttacacattatgcagttgagcagttttacgcctaccagttgaatttattggtatctttgaaattgatacctagcacaaagcaaacaatttatcttttcctctcttccgaatcttgctcttttgttttctctttttttggtgttaatatcagaaccagtatctactgtgtcatctaaaacaatttaggaggttatctgaatttccttatatatctagatttttatcgatttctgtgagtcatttcatttgctgctactctggtgtttatgcccttactgtgccctatttatagtagtttcttaattgatttttataatcctagtctagctctcattgtcaagagtaccagattggtttttctgaaactcaaatataattactcataacctccattactttttatggtttcacaaggaattgcattttcttgtagaaaaatttgagaataaacaaaatacaaggaaatcacctgaaaagctgtcacacagataatcactaacattttggtatatgtatgttctttttctttgtattacggaaaatctcaaaaattacaaatgtttagaggatagtaaattgaatgtccacctttatcactttttttttttttgagatagagtttcactcttgttgcccaggctggagtgcagtggcatgatcttggctcacagcaacatccgcctctcaggttcaagcgattctcctgcctcatcctcccgagtagctgggattacaggcatgtgccatcatgctcggctaatttttagttttatcagagatggggtttctccatgttggtcaggctggtcttgaactcctgacctcaggtgacccgcccgcctcggcctcccaaagtgctgggattagaggcataagccaccacgcccagccaatcgctttttaattctgggatattttaacaaaaagctcagcaagactttttttttttcttaaggtggagtctcgcactgtcacctgggctggagtgcagtggcatgatctcggctcactacaacctttgcctcttgggttcaagtgagtctcctgtctcagcctcccaagtagctgggattacaagtgcccaccaccacgcccagctaattttttgtatttttagtagagacagggtttcaccatgttggccaggctggtctcaaactcctgaccttgtgatttgcctgacttggcctcccaaagtgctgggattacaggcttgagccaccatgcccggccaagactattttttagaaccataaccacaatacagttaccacacttttgaaagtcgatgggaattccttaatatttaaatttctcaataggctaatttttatttttagggatgggggcttgctgtattgacgagactggagtgcagtggctattcctgagtattgtcatagtgactacacctcaaacacctgggctcacatgatcctcctgcctcagtgtcccgagtagtagtgcagggactataggcacttaccgctgtgatctgcttagctcatacattttaaaaaaatagttggttcaaatcaggatccgaaaaagttacataaattgtgtttgattaatgcgtatcttgggtctcttttagatctagagtgtctctcatcttttttaagaaacattatttgttgaagaaaatgagtaattctgtataattccccacattctagactttactgattgtatccccatgatttctctgcctcttgtgtttcctgttaactatagtaactataagttaaatacggaagtttgtgattaaggtgtttttttatttttttttttatttttatttttttttgggagacaagatctttctctgttgcccagggtggagtgcagtggtgccatctcggctcattgaacctctgattgctgggctcaagcaatcctcccacctcatcctcctgagtagctgggactacaggcgtgtaccaccaagcccagccaacatttatattttttgtagagatgggatctcaccatgttgcccatgcttgatttttaataagaatacttcattggtggtatttatagattttgatttatttccaaattgttctttcaaaagtttcattttatctagtcattttacaggacagcttttatcagttcctggtataaaatccttttagcctcagccttataatatgaatatctatacatacataatacttcatacacacacgatatacatatattcccatgtatatatatgtgtgtgtgtcagccacttacatgtcctgttactcttctatgaatcttaaatttgatattgctgttttgaatctacttcatcccctatgccttctatattctctctgcttgaaatctaccctcactatcttgaatgatgaagcctggtgacaactttttagataattttatgtaagataattatttgctaagtcatccagtgacatactcgggtattgtttgtctccctaccagcagcatctagtaggtacttcaaaatcagagcactttattctgtatttttaattttttctgtctttgcctcttacccaggaatgcaaactcagatgtctatccacagaggcctaaagtgggctgtaacatggtttggcaaactttttctgtaaatagccagatagtaaatatttttagcttttgagtagttttgtgggcaactactcaaccctgtactctgctgttgttgcttgaaagcagccatagacaaaccgtaaacaagtgaggctgactttgttccaatttatcccatttctttgcttttaaaaaaatacctgtgtattcgcttagctggagttggtctacaggctgtagtttgctgaccccaggactagaggtttgttgccatgtgtgaatttgtacttaatctactcagattaaaagaaagaaaagctggaaaatcactgtatttgatgaaatatcccattgtataagtgttcccaaattagcctagaatgttatgaaatattatgagccagtaatgtctataggcttatttctgcctgaaggctactagttttatcttgagaatctcatcctcatttcctggcaaaatgagcacagaataaatgcttgttgaataaataaataaatgaacttcatacattattaatttgtttttgttttctcaaactactaggaaattttgtctgtggctaaaaaaaataaaaaggagaatgaggtaagaaatttataatgtaagattaagtttagaagtcatatttactcctcagttactagtcctttttctttaatcagcagtatacgttcttctcactattatcctgtttctttgctttaaaaaaaaatacctatgtattcacttcttccatatccaacattcttcttttttatgtatcaactttagttagttgttttattgcatgattcttgatgtataaatgttaatttatgggtctagcaatgttgcttttaacttgtgaatctggcagtgatacaagtgctcgtaaccatgtggatataaaccgtgaatcatcttatggaagctgtgagggatgccttaatcttgcttcagaccttaaagattttttaagtttcttaaaagttctgtttgagaaggcttgatttccgagccacctcttcacttagcccatttcatgtagagaggttccttgttatctgactttttattgttcaagtacttaaaattacaaggttgcctagggaagcaaaataatcatgacatgaaaatattcatgaatggatatgaacttcaggtagttaatttacatattaaagatttttaggcctttgggaaattaatgttatgtttataaaatgagagataatctatttggtcatataattttgtccaaaatttatattgtaaaagtgtcttggtttttattctttgttaagttattaaggactggtttatgggtgcagtttagttggatttttaaagatttagttagataaacatttagttggatttttaagataaagtctagatgtaatcttctgtaatttactatgggattttggcttcattttataacttacagtcagtaagaaatagttgttaagtatggtattttaatgaatttcgacacttgcatacacttgtgtaaccaccatccaaatcaaggtatagaacatttccattgtaaagggatctcttctatgtctttccacccccaaacccagaggaggccactttttacaccttttataggatggcttattatttcctttccactcaacatgtctgtgatactcatttatgttgttgagcatattagtaaccggtttcttcttattgactagtattctgttgaatgaatgttacaattttctcatccatccccttattgatgggcatttgggttgtttgcagtttgtgacttttatgagtaaggttgctatgataatttgcacacaagtccatgtgtagacatgttttcatactttctgcctgtgtacctgggaatggtattgttgtgttacgtggcaaatgtgtgttcataagaaagtacagattttcccccccaaagtaaacacatcattttattctctcgccagcaatgtttgaaaactccagcttacattattgtcagcatttgatagtctttttaatttcagccattttattagatgagaaatggtaacttgtgtggtttttaacttgcattttcctaattactactgaagtagagtatatttttatgttctttgataactatgttttctttctttttttttcttttttgagatggagtgtcactctgtcgcccaggctggagtgcaatggcacgatctcggctcactgtaaactctgcctcccaggttcaagcgattctcctgcctcagcctcccaagtagctgggacaacaggctcatgccaccatgttcagctaatttttgtatttttagtagagacagtgtgtcaccattttggccaggatggttttgatcacttgacctcatgatctgcctgccttggcctcccaaaatgctgggattacaggcgtgagccaccatgcccggcctgtatgttttcttttgtaaagtatctgttaatatcttttgcccgtcttatttatgcgtactgtattttctgtgtaacagtttaataaattattgagtatcacaatattagaagtttggaagagagatacaattctaatgatcttttcaaaagtatgtgcctgattttaatttgtaagggttattctcagatttttatattttattttattttattttattttattttttgagatggagtcttctgtcacccaggctggagtgcagtggctgtgttcatggctcactgcagccttgacttcctgggtttaagtgatcctcagcctcccgagtagctgggatacaggcagttgcgtgcaaccacacccagctaattttttgtatttttagtagacacagggtttcgccatgttgtccagggttgtcttggatacctggactcaggtgatcctcctgcctcagcttcccaaagtgctgtgattgtaggattagccactgtggcagcctgttatttttttttttagtagcttttcatttgtagagggatggcgatgtctccagttttttaatccaggtgtgatcttagtcttctatacttaatgattataggactcagtagattttgttagttgcattttctgataaatggtggcatacagcagcattttgtataacacatcttattaaactttttttctctacaggatgaaaactcctcctctactaatctctgtgtggaagatcttcagaaaaataaagattcgaatagtataattaaagatagattgtctgaaacggttaggcagaatactaaattcttttttgacccagtccggaagtgtaatggtcagccagtaccttttcaacaaccaaagcacttcactggaggagtgatgcgatggtaccaagtagaaggcatggaatggcttagggtaatgaattggaatttttaatacaagatactggttttatttctatagtagcctaatgatttgaggtaccacaacttgagtcatttctatcatgtttcactattatacatttgtatgtggatacttgctttctgatttctttaccctgaatttttagaagtagaaattaccttgttaatggcttccagcacttttatggctttgataaaggactttccagtgttgttataatttatggtgtgaatatatcagctttaacataattctcatctttgggtgtgattttttaaagagaagaaataaaatattgtaatcctgtagttgtttatatccaagtttaaatacagtatctattattttgtccagatgctttgggaaaatggaattaatggcattttagcagatgaaatgggattgggtaagacagttcagtgcattgctactattgcattgatgattcagagaggagtaccaggaccttttcttgtctgtggccctttgtctacacttcctaactggatggctgaattcaaaagatttacaccagatgtaagacatgcttccttatgttaaaattataattttacatgttttcttatgctttgttgtagtaggaattaaattgtagaactcttataattatattggtttctgtataaatattttgtctgatttgacttactcaatctgcacaataccctaatttaaatttatatagtataggttttggaaatccctgacatctttcctaaaatattcctgaatgattttcagtgcattggtaatttgattcgactgagacagacttaggtagagattttattaaaaattctgcttgttcttcacttgatctttgccaaaaggctaagaagagagttttctgttttttctgtacttgttaccttctgcaatttttttttttttttttttttttgaaatggagtctctgttacccaggctggagggcagtgatgcagtcttggttcactgcaatctctgcctcccatgatgaagcaattcttgtgcctgagccaccggagtagctgggattacaagcatgtgccaccatgcccagctaattttatgtttttagtagagacgatgtcttgccatgttggccaggctggtcttgaactcctggcctgaagagatctgcccactttggcctctcaaagtactgggattatagacgtgagccactgtacctcccgggcccagcccttctgcacatttttgccttatgagaaatatatatattctagacgtagtatcaccatctgtctcattttatatatttatatatatattatttatttatttattttgaaatggagtctgtctctgtcaccatgctggagtgtagtagctgggactacaggcgcacaccacaaggccaggctaattttttgtattttggtagagacaggatttcaccatgttggccaagatggcctctatctcctgaccttgtgatccgcccaccttggcctcccacagtggtgggattacaggtgtgagccactgcgcccagcctatatgtgttttatgtatttgtaggttttttgttggggggggggttgtgtttgtgtgtgtgtgtgtgtgtgtgtgtgtgtgtgtgtgtgtgtgtatgacagagtttcactgttgttgcccaggctggagtgcaatggcacgatctcggctcagtgcaacctccgcctcccgggttcaagcgattctcctgtctcagcctcccaggtagctgggattacgggcgtgcgccaccacgcctggctaattttgtatttttagtagtgacggggtttctccatgttggtcaggctggtctggaactcccgacctcaggtggtctgcccgcctcagcttcccaaagtgctggggattacaggtatgagccatcccacctggcccgtctatttgtttttatgcctttttttttgtcttcagacaggatgttgctctgttgctcaggctggagtgcagtggcgtcattctggctcactgtggccttcacctcccaggctcatgtgagcctgctatctcacacgcctgagtagctcatgtgaacctcccatctcactccactgggtgagtagctggcactacgggtgcgtaccaccacaccagctaatttttgtattttttgtagagatgggatttctccatgttgctcaggttgatctcgaactactggactttagagatcggcttgccttggcttcccaaagtgttgagattataggtgtgagccattgtgctgggcctgactttgtttttttgtttgtttttttttcattttctcccataatagttcaatgatttgttagaattgcttggcttattttgctatagaaaaatagaaataaaattttttaaaattatattttttccctcagaatgatttatattttctaaatagtcaatatttacattttgttcttaagtctgataaaaatcaatataaaatttttcagatccctacaatgttatatcatggaacccaggaggaacgtcaaaaattggtaagaaatatttacaaacggaaagggactttgcagattcatcctgtggtaatcacgtcatttgaaatagccatgagagaccgaaatgcgttacaggtacaaatgatcttcattggtttctttgtaatacataaaacatgcttttcttcatttatatcactttctcaccatctgggagcatttgtctaatttttttttgttgtcgaaataatagattatattgtgcatatacctgtagaagctggaaacttttattaacagaatgattgggatgaaggccatcatttgtaacaatataattaaagcttatggcagtttaacctatggcttagaatcatccagaaatagacctaatctcggaatgtattacagatatatttgtgacaggtactttgaatatatggaatttacttatcgtattttaatcaaataagagtatttgaagacaagttatttttagagtatcttattggactatttggtagcattttcgtttctattttcttgatgttctagctacttatttaaataatttccagttagcataacagaattgaaagattgaccttttttctttcatgccttctgttttcatttattggtgttttgaacttcttcctcactgctctacctcattcatttataattcttgactgctttttttttcctttctctggccatgtgagaaccctcttagtgcagtccccttaggtttatcttgcttgcttggaaataggaaagtatttaatggtttcaacataaaatcaaaacacataagtcataaatagaataattatgacttgcataattatgaccagtattgtcaggttttatgtgtctgctggtaaaactttggaatatgatttgcagaaatctcagttcaggagtttagcaaagtttatgaatgtgtacagcattaaaaagtatttaaaccaggccgggcatgaaggcttatgccagtaattccagcacttgggagtctgaggtgggcagatcccttgaggccaggagttccagaccagcctggccaacatgacgaaaccctgtctccactaaaaatacaaaaattaggccggacgcggtggctcacgcctgtaatcccagcactttgggaggccgaggcgggtggatcatgaggtcaggatatcgagaccatcctggctaacaaggtgaaaccccgtctctactaaaaattacaaaaaaattagccgggcgcggtggcgggcgcctgtagtcccagctactcgggaggctgaggcaggagaatggcgtgaacccgggaagcggagcttgcagtgagccgagattgcgccactgcagtccgcagtccggcctgggccgacagagcgagactccgtctcaaaaaaaaaaaaaaaaaaaaaaaaaaatacaaaaattagctgggtgtgatggtgcacatgtttaatggcacaaggattgcttaaacccaggaggtggaggttgcagtgagctgtgattgcgccactgcactctagcctgtgctacagtgagagtctgtctcaaaaagaaaaaaaaatttaaaccagtagtccccaaccttttggcaccaggaaccggttttgtggaagacaagttttccatggaccatgggtgggggatggtttcagaatgattcaaatgcattataattattgtgcactttatttttattattataaaattgtcatatataatgaaataatagggctggccgtagtggctcacccctgtaatcccagcactttgggaagcttaggcgggcagatcacttgaggtgaggagtttgagaccatcctggccaagatggtggccaacatggtgaaaccacatctctacaaaaatacaaaaattacctgggcatagtggcctagctccttgggaggctgaggcaggataattgcttgaacccgggaggcggatgttgcagtgagccgagatcatgccgcttggttggctgggcaaccaagtgagactgtgtctcaaaataataataattttacaactcaacataacgtagaatcagtggtagccctgagcttgttttccatctagggatgatgggagacagtgacaaatcatccaccattagatttttataaggagcgcacaacccagacaacccagatcccttggatgtgcagttcacaatagtgttcatgctcctatgagaatataatgtctcctgatctgacgggaggcagagctcaggccataatgtgagcagtggggagtggctgtaaatacagatgaagcttcccttttctgtaaatacagacgaggcttccctcgctcacagctgcttacctcctgctgtgtggcctggttcctaacatgccatggacccctacaggtctgtgacctgggggttggggacccctgatttaaagcatttctttacagtaaaagtaatatataccaattttttttaaagggtagtgtacaggaagatgtaaaagcacctgtaattctacctgagaactactacttttttctttttttttttttttttgaggcagagtcttgctctgttgcccaggctggagttcagtggcgcgatcttagctcactgcaagctccacctcccaggttcacaccattctcctgcctcagcctgccgagtagttgggactacaggtgcccacaaccatgcccggctaatttttttgtatttctagtagagatggggtttctctgtgttagccaggatggtctcgatctcctgccctcgtgatccgcccgcctcagcctcccagagaactactacttttatactaaataattatagctaacatgtaggtataatttacacatatgatcatactatacattcaatttttttttttttggtccgagacagggtctcactttgtcacccaggctggagtcctgtggcacgatctcagctcactgtagcctgaatctcctgggctcaagtgattctcctacctctgtctcctgagtagccgggactacaggcgtccgtcatcacacctgactgattcttgtatttttttgtaggaacagggtgtctcaagccatccaactgtctaggcctcccaaagtgctgggagtacaggtgtgagccaccacttccagcctgcattcacttttgcaacttgtgttttctactcagtagtataacatgaagacccttcctgtaatgaaatagttaagcttccttgtccatttcctttgccagtggctagaaacttttgactttttccatttaagtgagcttatattatcatttcaaggatcttagcttactctggtaacggagtgtgaggttccagggcttttgttgctgagtgcgagtggaagtgactgagttcacttgctaatttggctttcagattcctcatcatttatttccttgttttcttttctctcacatacccattataaaagtatatatatatatatatatatatatatatatatatatatatatatacacacacacacacacacacacatttttttttttttttttttgagacagtctcactctgtcacccaggctggagtgcagtggcacgatctcggcttactgcaacctgtctcccgggctcaagcaattctcctgcctcgcctcctgagtagctgggattacaggcatgtgccactacgtccagctaatttttgtatttttagtagagacggggtttcaccaagttggccaggctggtctcaaactcctgacctcaggtaatgcgtctgcctcggcctcccaaagtgctgggattacaggcctgagccactgcgcccggccaaggatattttatatttttatctggatttttagatagctgtcttacagtgagagataattcaggttttttggtttaacatattgccaggaaaataaatcctttcttggttattttaataaagaagatacagtactataaacttttttcattcttttgggatgtataaagcaaaatgcaaaacgttctctatactctttcctcaatttgtcagtcccattttttaaggatagttatatttttcagattgttatttatatttccagaaatacttcatatttctgtatgttaatataaattagattaattataaattttcctgattaagatatatgagaaatcacagatattaaaatgagaaagttaaaacaatttccttgataactttatgaaagtgagtgggtgactttctgtgaaaatataaattgcttaaataagggaaaattctagtgctatttgatgtttcagcacatatggaactaataaaagctcaatttttagtagtctagtgtaacattaatatcaaaacttgggaaaatattagaaaagaaagctacaactgcgttgactaaggtgtgaatagggaaatcttaaattcaaaataggtggagttcaaactttattgcatattttagtaggtctcttccaggaacagaaatatctatcagttttaggaatccttgtaagtggatcaaatgaaaacatgatcatttcagtagttactgaaattacatttgataaaattcaacatccatccctcataatagaggttttatttttagaattcttgttagaaaaattgtgagatcattgtttaaaaatctttttcctcaattcgttttctagcattgctattggaaatacttaatagtagatgaaggacacaggattaagaatatgaagtgccgtctaatcagggagttaaaacgattcaatgctgataacaaacttcttttgactggtactcccttgcaaaacaatttatcagaactttggtcattgctaaactttttgttgccagatgtatttgatgacttgaaaaggtgggtaagccagttatttaatgatttaacctcaaaaatctgtgctgttagttaaaattactttcttttcagtgactgaattaaaatgccaaatatttggcaagttctttgtggtgtatattgtatgttctactcctgccacaaattatgtgagagcagattaagaaaagattatttaaaacttacttgcattgattaaaggaagactgctgaatgcaactttaagataatatttttataataaggttcttttatgtgttacctttgtaaaacattttaagatggatttttcttactatatcctcattaaacaaccagggacaatagagttgttaaattatttcctatctcacataaaagaaaacctaggtgtaaagttgttacaagataagactagttagttagcaccagagccaaagttaaaaccaaggtctcccaatgtaaacacagtgttttaattctggaaactgtttgaatcttagcttatataataaaatcagacataaaagtagttttcagaaagtaattagtagcttcagaatggaggaggaggtaatgttgacataatttaaaactgattacaacggaaatataacttgggcaaaaaataatttatacttgttttggcatcagtgaaggaagtaagctaattgggtgtggaaaaataattttaaattttgggaatttatttcaaatctggttaccgaatggtggctcaaggcaggctaccttattgtgactctgggcgcttttattgaaagacaagaattccaggtcctgtgcagacatactgagttacagtgtcaaggtaggagttgagaatctgagttttttgaacatgcttctggtgatccaagtttgggaacttctagtctactgcataaatgttactagcattttccagaattgggtataatgttacctattctatattattaatctgcatgctcatacttaattgctcattgtaatatatatattttcaacattgggaaggaataagcatgtatattattgtcaagttatgtatatgttgaattttaaaatatttattgtagtgggccatacttagactgatggagaaaaatcatatggctttggttttcagagatagttctcacttttgtaatgtaaaattataaatatataccttaatcttatttttgatttttatactactgtacaattgttaatctatttataaatcagaaaagtgttccctttaagctcacagttcttgatggttcaaaaatgcaaccaatttatctttgttgttggaatgtgttctcttccattataaattttaaaaattgcacctaaggatttgatgcaacaataccacgtttcattatcagattattactgtaaatgataaatcatgtatcatgttgacataattgaatttatgtgatggttaacttaaacatttttctcttccagctttgagtcttggtttgacatcactagtctttctgaaactgctgaagatattattgctaaagaaagagaacagaatgtattgcatatgctgcaccaggttttccatgttttcttattctgcttaaccataggctcgatagagtataaaaggaactctggagatcacctgtctaaccctttgtagtagagatttgaaaaatgaagatcctcctacatttaaatgactcctttgtcctttcttctcccagaggtcacatggttttatgacagaactcaagtgcttacctaagttttgtccttttcagatagtatactcattttacccctaatggttactgataagtttgtcaagcacaaaacagaagtatgtggtttttatggaatgcttgccaataatacttttataatttacatccttgcatggctgctgtctaatctatttttattgcttcctgtaattcctaccccatcctacctatctttaatttagagaaacattatctttcaagggtaatctagtcatatgggcctgaaaagcttctcagttgtggtttagcaattttattcaaagtctttatcgttttttctgatattaaagtttatacatgttcatgagaaaaacgtgaagcaggagagaagtgaaaagtaaaaatatcacttcctcttaaaattgtatttcctagcagtgcatgtggaatgattatgttgtgttatatgacaatccaaactcttttctgtctttgtgtaaacacgtgtgttttatctatattttatgaagaaaaggactttaaaaataaaattgttccttaagatagtcttttaaacagttatcagaaaattattttccttttactacatgtagatttaaatcagtttttaatagctgcttattatcccattgtcttgttctactataattaataatatctatctcttcctcttttcaaaattttcaacaatataaacaaggttgtagtatctgtatttaaaactacacctttgcccatttctggctatttccttaggaaagaattcctagaatgtatgtgtcagagtttacagatgagggcttctttgaaggcaaattgccctccagaaaagatttatatgatatacgtccatatgaaaatacttatttactcaagcttcataccaattttgaggttagaagtccttttcagtgttgcagagattaaaaaggatgattattgctgaattgagatgtttattgactattggtagttccttgtggccatattccaacatgtgttggaatatttatttattaatggtttataataactatatgttaaaaataagttaatgttgcaaataatttctttcccctcactttttgggataaactttgtttatggtatctttgtgtgtgttcatgtgcacaagcgtgtgtgtttatatttaaaattttctttttttcccactgtgactctgggcaatgacagaaatttcaatgcaccaatagttatagaagcttttaaatgtcccagtctgaattattggagtaaatgacttatttaggaagagatgtgtttggatatcacatcctcatcagtagtgtatacatccatatagtgtagcaaaggattaagtttctgttcttaggaaatttaattagagtcaagacaatgaatatttatagaatttgtcacttacacgttacctcacagtgtatacaggtagatagatattccttagaaatgatcatctgccttttgattgaacatttgtagtaattgtcatagttgataattccataagagggctcactggaattgttttactatagataacttcagatttccattaatattaagatatgataatgaacttttattatatccaaattcaacagttttatcaaaaataggggcagttttgaatgttctagcaataagaatattctctgtaatactgtgcttaaatttgagtttatattacttttacgctttgtcctaattatgttttaatgcattactacaggaaaaagttttcattcaaaatgaattcagattaggtggagatagttttaaatcgctagtatattttcttaactattttctatatgaaagaattcctttcctttttttatgcaatgtttacataaaccttgcatagtaaaaaaaattttttttactttccgtttaaagttctctaagcttgctacttttctatttccaccccatattgaaggccaaaagcagtataacctttacaaattaattatttaaaattttttattttaaaattatgcgtacacggtaagatatttttaaatgttataaacatttagaaattaaaaagtaagaagtaaaaatttctgttttccttctgcacttcctttcttatctccaaagtataactaatagtttttttgttttgttttttttttttgtttgtttttgtttttttttttgtttttttggttttttttttttgagacagagtctcactctgttgcccaggcctggagtgcagtgagcgtctgcctcccaggttcaagcgattttcctgccttagcctcctgagcagctgggattacaggcgtgtgccaccacacctggctaatttttttgtatttttagtggagacgaggtttcaccatgttggccaggctggtcttaaactcctgacctcaagtgatctgcccgccttggcctcccaaagtgctgggattacaggtgtgagccactgcacctggccaacagatttttttttttttttttagagacaatgtcctactatgacatccaggcaggagagtagtggtgccatcgttggttattgggttgttatctgcagcctccaactcatactcctgggttcaagtgatcctcctgcctcagccttctgagttgctggaaccaaaggtgcatgccaccaggtccagctaatttttggtagatgggtcttgtataagtcttgtttttgtctgctttgaaagcttgtatactaggaaaaacatatataaataccttttttatacatgtgtttcagcggtatagtgtgcctcttcttccacatatttgccatttcagttaacatcaaactatagcatttgtcagtgcatgtggtagaaaaatatctggttatttcatgttttccttacagacatggacatgttttttttaattttatttatttatttttatttttttgagacagaatcttgctctattgcccaggctggagtgccgtggtgcaatctcggctcactgcaagctgcacctcccgggttcacgctattctcctgcctcagcctcccgagtagctgggactacaggcgcctgccactacgcctggctaattttttctattttttagtagagacggagtttcactgtgttagccgggatggtctcgatctcctgacctcgtgatccgcctgccttggcctcccaaagtgctgggattacaggcgtgagccaccgcgcccggccggacatgttttaacatgtttatgaaacatttacatatttttcctgattgcctgtcggcatatttgtttttgggttggtagataccaacactggtaatgtgtttactatctttggtaatagtctgtctatgattagctctatacctgttgggtatttaagtccagagtcctgaaaatgagctttattatatatgattactatatgtaaaccattgtcagtatttaatggcaggggtataaagagtatacaattatttgtttattattattagtagtagtagtagtattttttttgagtcaacgtctctgtcgcccaggctagggtgcagtggcaagatcttggctcactgcaacctctgtctcccaagttcaagccattctcctgcctcagccttccgagtagctgggattctgtaatcccgccaccacgcctgactaaatttttttgtttttttagtagagacgggatttcaccatgttggccaggctagtctcaaacttctgacctcaggtgatctgctcgcctcggcttcccaaactgctgggattacaggtgtgagctactgcgtccgacctagagtatacaatgattttaatctagtatttgtgctcttttagtgacccgaatattttaatgcataattattgtctgttgcttctgtgttctctttataaatgtgataatcatttgtaaccaccccagctaatgaaagagaataattttaagcctgaaactttagaacttatagaaggaaacttgtatgtctgcatccctaggtcagctggctttttactgagtcttaaaacctcattctattaaaaaatttttaatttttaaaaaaacttttagttttttgggtacatagtagatgtatatatttatgaggtatatgttttgatattgatacagaaatgcaatgcataataatcatatcatggagaatggggtatccatcccttcaagcatttgttaccctttgtgttacaaatgatccagttatacacttttgtgtgtgtgtgtgtgtggagacagagtcttgctctgtcacccaggctggagtgcagtggcacaatcctggttcactgcaacctctgccttccaggttcaaacaattctcctgcctcagcctcttgagtagctgggattacaggtacccgccagcacacccagctaatttttgtatttttagtggagatggggtttcaccatgttcaccaggctggtctcaaactcttgacccaggtgattcacccgtcttggcctcccaaagtgctgtgattacaagtgtgagccaccgcacctggcctctagttatactcttctttatattttaaaatgtaaaagttaaattattattgactgtagtcaccctgttgtgctaccaaatattaggtcttattatttctactttttgtactcattatttcaaatatttttaatttttattcatttttattatttccccttttgtatggtgctgataacatctcattctaaaagttgtgggctataactgaaacttcaaccctaagaaatacaaatgctacctttatatttttacttttaaaattatttgagatagattcttacagtttttaaaagaaaataaattctgaaatgctgcggacaactgtgagtttatcatttggtctggtctgggaaaatctcaagatattttcaccttttgagatttggcattatttatataggaagtcaaaagataaggtaaaggagtatatggggacagtattccttgaaaaacaagaatgtttaatactcatatttttctgttcatgttttaattttagattttaacacctttcttattgagaagactgaagtctgatgttgctcttgaagttcctcctaaacgagaagtagtcgtttatgctccactttcaaagaagcaggagatcttttatacagccattgtgaaccgtacaattgcaaacatgtttggatccagtgaggtatagtggttttgaaatgtactgtaaatgaaacttgacatataaaatttctcttttttccctttttttttgagagaaggtgtcgctctgtcacccaggctgtggtgcagtggcacaatcactgctcactgcagcctttacctgcctggctaaattttttgtatttttttgtagagactggcatttcgccatgtttcccaggttggtctcagactcctgggcttaagcagtccacccaccttggcctcccaaagtgctgggattccaggttttagcaattgtgcctggcctaaattccagttttaaggtccccttgttcatttttaggacttgggtgaatttctaactggggtataaggcataaggcttagtggcaaaagttgtttcctagtatctggagtcctgctaaaatgttaagtgataatctttgtattaattgctttacagtcatctggaatacttactaaaaatttaggccaggcacggtggctcatgcctgttatcccagcactttgagaggccgaggcgggtggatcacctgaggtcgggaatttgagaccagtctgaccaacatggagaaaaccctgtctctactaaaaacacaaaattagctaggcgtggtggcgcatgcctgtaatcctagctactcaggaaggctgaggcaggagaatcacttgaacccgggagacggaggttgtggtgagccaagattgtgcctttgcactccagcctgggcagcaagagcgaaactccgtctcaaaaaaaataaataaaaaaaaaatgtatatttccgtacagattaactctaatcatgctttctggagatgaacttggaaatgcatttttaacaagcacacaggtaggtatttgagaatccctgtactaaggacttggcaactagactaatctccagatatacagattgagcatccaaaatctgagttgctccaaaatttgaaactttgagtgctgatatgaaactgaaaggaaatgcttattggagcatttgtattttcccgttagggatgttctacctgtacagtttccttacagaaggttattgataaccaaaaagattaataatcaatttgatgatgattattcatcacccaccatattataggagatagaggtgggatgttattatcatgtaactgaaggagacccttaagttttgtttaactttccaggttttttattgtacactataaacctacgtattttcttttcaaaatatttattgtgatgcatttttaaacaataggaccaccagactcttctccccccgacttttttttttttttttttttttttgagacagagtctcgctgtgttgcccaggctggagtgtagtggcatgatcttggcttactgcaagctccgcctcccgggttcatgccattctcctgcctcagcctcccgagtagctgggactacagtcgcccgccaccacgcttggctaattttttctatttttgagtagagacggggtttcaccatggtagccaggatggtctcgatcttctgaccttgtgatctgcccgcctcggcctccgaaagtgctgggtttacaggcgtgagccaccgtacccggcctcttctccctttttaataattaattataattaaaggaagggtctagccgtttacaaatttacattatttgtctgttaatgagcaatttcataatgagcagtttcatgcagtgttacaccagtctgaagaaatatcctctgtactgcaaatttccggagccatatttcaactttaaggtattaaatccttttgtgtaagttcaaagtagttttatacacccttcatttttacctattgagatatgaaggcccttcctcttactttcagatattgttgtccatgttaaaattaaactaatttcccacaacatttgtatttgtctatagattgtcattttgtacataaaatatgccttattttgtttacatttagaacctaaggacatagctttataaactgaatttcttttaattcgttcccttttagaaagaaacaattgagttaagtcctactggtcgaccaaaacgacgaactagaaaatcaataaattacagcaaaatagatgatttccctaatgaattggaaaaactgatcagtcaaatacagccagaggtggaccgagaaaggtttgaattcaaaagtgaatttaagtattctttaaactgtgaccattttttgcatttcccatatatgcattatttgttttggtagagctgttgtggaagtgaatatccctgtagaatctgaagttaatctgaagctgcagaatataatgatgctacttcgtaaatgttgtaatcatccatatttgattgaatatcctatagaccctgttacacaagaatttaaggtgaatactgtttaattctaatttactgttttgatttccattacttttatattggtggaaagtgttactttttttgattataattattaaaaataagtatggtgctatttgtcatgaagattgtaatccttcagtaagctgagacagtcttctttccgaaatttcagagaaccttatcagggttagaaaaatggtcactttctatgagcaactagttttttaaatttttttattttttatagagacagggtcttgctatgtttctcaggctggtctcaaacttcctggtttctcaggcaatcctgcctcagcttcccagagtgctaggattacaggcaagagccaccacgcttggcctctatgcaacttatatttttatttacatattttatgtgaacaactaagaattctaaatttagtaattgatttgtactctgcatgtttacttgttatattttagagagagtggtcatcttttcactatttcttttatcattaatatttggcttatcaaaatcagcctggttgctcattgcttaaagatcaacaggtagccatagaataaaaccagttttgatttggaggttttcaaattaagtaaatgaagttgctttcttgggtagttgatagaatgatagcataatatcaatagaaataaattcttagtaaccctcaatcacagttgtttcaaggtagtttacaataggcttttccactcctggcaatattgacattttgggccagataattctttcttaggaggtaatgttctgtgcacttaggacatttagcagcatccctgtcttctacccattagatgccactagtattcacttccctcagttatgacaactaaaaagtttgctgccgctgccaaatataccctggggataggtggagggcaaaattgtccccatttgagaggcactgctttacatctttattagagtaagaaggaagacaaaactttcccactcaaatgaaagtagctctctcatgagggaatttcaccagaaggtgaaaaagtctttgtccacaatatttagattacttatcagctcctgtattttctcttaatttctggtaagaattctagcagtagtttacatatacatttagttggaaataactcacttataaagaataagcctgagtatgtacccattaagtttgacataattgttttctttcacaatgactttgagagaggagtgttgaggttagatcaaagttatatttgtactttgtttttgtgaaattgctggttttacattctagagtatgtctttgagtaataactatcttctgattttacaaagattgaataacaggtcagtttttaagttttttaagtgacttggctttgaaaattgaactttccaaatggcttttgttttaacaaagcaaataacagttttctctctattttttcttcctttgcccctccttaagatcgatgaagaattggtaacaaattctgggaagttcttgattttggatcgaatgctgccagaactaaaaaaaagaggtcacaaggtggtacttttgattggaattttggattgttcaattatttttttatcaatcattagaaatattaagatatgtttaatttcaggtgctgcttttttcacaaatgacaagcatgttggacattttgatggattactgccatctcagagatttcaacttcagcaggcttgatgggtccatgtcttactcagagagagaaaaaaacgtaagactacttatgtcatacataccaaactattcttttataattcctatcttgatttctgaagtaatattccaaatagacccacaaattgataaaaagatagaaatgaccagaaaccctgtggttttatcaaaaacaaacattttgatttagtactaagaagtcttaatttttgattcacaaatatatatatcttctggcacaatcttattaataatatcctacttaaccatcactgtaagaatattgggatagcaggaaattttttgcctttttgccctgtcctcaactttctattatgaaaatatcaactatatggcaaagttgaaaaaaaaaaagcaactgtaaatccgcctacaatctgctgttaacatttgactatacctttttaaaaacacatttcctgtaatagcagccttgctgtatccattcagcatttaatcctggttttttggtgcatttaaaaataaaatatagatgatactacccttttccgtaatgacttcagcatattttatcttttggggtaaaatttacacatactgaagcaaataatgtatacatttgctgaatctttctgacaaatgcatatgtaaatttatacctaacccctattaagatatagaatgttaccatcagcccagaaagtttcctgtgcccccttctagtcaattctcccctgcacccaccccatgtgtttagacaactacaattttttcatcattttttgatattagcttttcttatttaaacattgttgtgatacatggtttttaacaaaattaagatctctttaatataggtgcttggacgataaagctaacagcacaggttttgttaacataattgttttatagatctgaatgatttgtttggcctcctttgtttaagtctttaatagttgtaattgaaaacatttttctccttcagtcttgttggttaatttattttaatctgttgtatttacatcctttttgcttttagatgcacagcttcaacacggatccagaggtgtttatcttcttagtgagtacacgagctggtggcctgggcattaatctgactgcagcagatacagttatcatttatgatagtgattgggtaagttggaagtatagcaaggaatatgctgattatatttccattttgaatttttttttttttttgaaatggagtctcactctgttgcccaggctggagtgcagtggcacgatctcggctcactgcaaccttcacctcctgggttcaagtgattctcttgcctcagccccctgagtagctgtgactataggtgtacaccacaatgcctggctaatttttgtgtttttagtagagacggggttttgccatgttggccaggctctcttgaatcctgacctcaggtgatccgcccacctcggcctcccaaagtgctggcattacaggcttgagccaccacacccagcctccattctgaatttttttttttttttttttttgagaaggagttttgctcttgttgcccaggctgggattaagtgctgggattaccagcatgagccaccgcgcccggccattctgaatttttaatttttaatggtacatgttacaaatttacttatctattttgaaaagatacccattttcagctaagagttatttcttcataaagttttttgcaagtaaaaattgaaaatttttttttacttttgtttttagtgacagggtctcactatcacccaggcttgagtgcagtggcaccatcacggctcagtagccttgaccttttggattcaagtgatcctcccacctcattctctcaagtagctgggtctatgggtgtgctaccatgcccacaaaaaatgtaaaaattagtgagaccacgtctcactgtttgcccacgctggtcttgtatcctcatatgatcctcctgccttggcttcccaaaatgctgagattataggagtgagtcatcgtgcccatcctgaaatgttttctttagggtatttaaacttttttgttaatattgtcaaggatctgtggaatgataattttgtctatgaagccactctggaagtttaaattaagacaccactatttaaaagttcctggctagatcattcatgttgactttatccacatgagtttatgttaattttaacctaataccgttaaatattatttttctttttaactttaagaacccccagtcggatcttcaggcccaggatagatgtcatagaattggtcagacaaagccagttgttgtttatcgccttgttacagcaaatactatcgatcagaaaattgtggaaagagcagctgctaaaaggaaactggaaaagttgatcatccataaaagtaaataacacttatgtagtgctttattgtttaaattgtgcattgtgtgttgtggattttgtttttattttgtttataaaatattacagcctgggccgagttctgtgtctcacacctgtaatcctagtactttgggatgccaaggtgagtggatcacgaggtcaggagttcgagaccaggctggccaagatggtgaaaccgcgtctctactaacaatacaaaaattagctgggctcggtggcgggcgcctgtaatcccagctactcaggaagctgaggcaggagaatcgcttgaacccgggaggaggaggttgcagtgagccgagatcgtgccactgcactctagcctgggtaacagaacaagactctgtctcaaaaaaaaaaatattaacagcctgatatgacaggatttaaataagcagtggggaatttgggagcctaaactaagttggtcaccatagacataaaagaaagaatgttagcgagtatgtagatatgtagatgaagagcagatgggcagagaaaaggggtcaaggataactacatgttcctgataagagattggcttgctaaaagttttaagataaatattttgcaagttccatgtattaaaatattaagtgtatttaagtgttataaaaaatctatttatttattgaacccactgtttcacagaatatttcactgcagaatgccctttttatagttttggacacttttttttcctttttcatttccttatcataaccagatgggtctcaacaatgctttttaatctagaaaaaattctgaggaggtggggaactgacataggtgaaaaagttttgttcctgagattccttagagaagttatacttctatccattcaccataaaattttctttgaataaatggcttgatagctacctgaagaaatgttgaaaatcatttatgtaaatcatcaagccctagagaaatgggaacatgataatgttaatgtgaaaagtaatgttggaaatcactaataatttattttatactccttttccacttgtaaatactttctctgggttttgaggtaagagtgtattaaggtttagacaaaattaatttggtgaaacatttagattgtaattggaacttgcattggggaaaaagcataatttttttttaagagaccatttaacttttttacccaggttgttctcgaacacctggactcaagtgatcctcctgccttagcctcttcaagtgttgggcttataggtgtgagccactgtgctcagccctattttcgattttttagtagattaattttgtagaaaattttgaagggatttttttaaatgctgacatttttcagttgagttattacatacatacagcaaaatgcacagatcttaaatgtacaggttaatgaagtttgaccagatttatgtactcctatgtaactatcatcgagatcaaggtagcattttcatcatccaagaaattttctttgttcaccctttccagtaattcctatgctccccttaccatcactaggaagcatccagtattctgatttttgtcacactgatgagtcttttttctgtttagctattttgttgaatatattttttcaacacagagtcatctgtgttgtttttagtagaatttttttcttttaattggtgaatagtttgttttttccattctcctgttggtcgacatttaaattatttctagattctggttattatgaataagttggtcctgtacaagtctttgtggacataatgcattttttggtccttgatcttagggagggtgcgtgtttaactactggaaactaccagccttttccaaagtggacatatcattttccagtcctaccagcgaagcctgagagcttcatttgcttttattttttatcaacacttttttttgccgtccttcttaatgcaagccattgtgattggtttgtaatatgttgtattgtagttttaaaaggaattttaatgtttttaatttctcattttttttagatcatttcaaaggtggtcagtctggattaaatctgtctaagaatttcttagatcctaaggaattaatggaattattaaaatctagagattatgaaaggtgagtttttaattttagaaagatttaatttgtagctttgaattattcacatagacttgaatattttgttttctatagggaaataaaaggatcaagagagaaggtcattagtgataaagatctagagttgttgttagatcgaagtgatcttattggtaagtattatgcttttttttaatggaagcttcgaaacatacacttaattagcataatgtaatgaaccccttgtgcaattcattcagccacatgtatccaatcttgttttattgtcatttttcttcttagagtattaaaatcaaatctcagacatgacattttgcccataaatgtcattatctttaacttcttccataattcagatattttctgtaaactggtaaataacacttgtaaatgaatatattcaagttcctgtcttagttaagaataccagtgctttgttctcatatttttcgtcataccaggaggcacatcgtatctggatttcttatttccagtgagctaagattaatcaagataatgttataaagtgtcttgtcagccttcatcctttacttaacacgatgatttattttattttattttatttttttggagacagagtcttgccctgtcgcccaggctggagtgcgctgacacgatctcagctcactgcaacctcagcctcctgggttcaagggattctcctgcctcagcctccctagtagctagtattacagtcgcctgccaccacacctggctaatttttgtatctttagtagagacagggtttcgccatgttggccaggctggtcttgaactcctgatttcaggtgttgtgcccaccccagcctcccaaagcactgggattacaggcatgagccactgcaccaagcctaacgtggtgatttttagtatcccttgaaagtggctgataagaaccattattaacttaatcattgcaaaatggtgatttttcttgttctgtcattcttttattagctgggttatttaagaactttcccttacagtttccctgagatagaagagagccaggatatattgcttcttttttttttttttatcagtttttagaataccaccttatgatctgatgcctacagtgatgaccatgaattattttgaaaacaaaaataatattttgtacttcataatttcctaattattttacaacatattactgtcgtctaggctattgattatttgtctgttgcatctgtatggtggagatactgtataatctttttttcccaactgtattccgtgacattttggtcttttgaaattggtgatggcagtaacattcatatcacggatacaggcagaaactagaaaccccagtctttgtttttaacaaaaaagggtcttgctttgtattcctggctagaatgcaggagtgcgactatagctcattgcagcctaaaagtcctgggctcaagggatcctccagcctcagcctttggagtaagctgggattataggcatgagccattgtgcctcagtttttgttttttttgagacccaattgttaaacatttacctgcgtggcactggctacagtgtcatgatatcttattttcaaatatgttgttcattttaaaattcaattctgtgtcttattgaatcaaaataaaatatattggttggaagtttttttttttttttttttaatcagatgtattttccaaacattttcttctactctggcctgtctcttcacttacttacttagtatcttctgaagagcaaaagttttaaattttaatgaatttcaattttaacaaatttttttctgttcactcatgatttttatgtcatctgtaactactctttgcctaattcaaggtgttgatattttcttttaatagttttatagtttttgctcttacatttagatctatgatctattttcaatgaattttcatctttttgcatgtcaatattaatttgttaaaaagatgatcctttttctattggatggccttgtcatccttgatgcaaataatttgatcataaatataaggatttatttctgtattctcaattctgtcccattgatctctgtggtattcctatgccagtatcgcactgatttaattaaggtagctttatgggaagtgtactttctctagttttgttctttttcaaaattgttttagatattctggattatttgcatgtttatttgagttttaactttgaaatagtttagggagaaatatgagacatacagcatcatggtcaaatctaaactatattaaaaaacaacattatgtgaggcatgtaaggactgtttaacatctgataatataattcatatcaattaaataatggagaactagatgatcacctaattagataccaaaaaccaacttgccataatatcgtaatcatcttcataatttttttttatttgagacaaagtctcgttctgtcaccgaggctggagttcagtggtgtgatcatggctcactgcagctttaacctgctgggctcaatcaatccccacacctcagcctcccaagttgctgggactgcaggtgtgattactatgtcctgctaattttgttttgtgtattttgtagagacaggggtttgccatgttgctcaagctggtctcacactcctgggctcaagtgatctgtctgcctcatcctcctaaagtgctggcattatcgaaactgcttttatttgcaagtggtctggtttgattatcttcataggaagtccaagggaatccagaatcttttaaaatagaatttaagaagattgcttattaataatatgtgtaacagcaataattgtttaataatgaaggtttttacaacagctacaaaattaacatgcctacaattaaagtttaacaatttttaacatgtttatataaggacagaattatgaaacattgaaggacgttaatagaaagactgagtaaacatgcagatttagctgtatttgtggatatgaatggttactacaaagtgtaagtcagtggtccccaaaactaacttatattcttgaatttttcttctaattaaaatcccagaatgatggctgggtgtggtggctcatgcctataatcctatcactttgggaggctgaggcaggtggattgcctgagctcaggagttagagaccagcctgggcaacacggtgaaaccctgtctctactaaaatagaaaaaattagcggggcatggaggcatgtgcctataatcccagctactcagaaggctgaggcaggagaattgctagaacctggcaggtggaggttgcagtgaatggagattgtgccactgcactccagcctgggtgacagagcgagactctgtctcttaaaaaaaaaaaaaaaaatcccagaatgactttttgtaaaacagactgttgttaaaatttatatgagagagtaataaagggccagaaccaagacagttttgaagcacaagatattctataccaggtataaagtcttattaaaaatttaaaagtcataataatcaagatggtagaattagcacatggtgtgatatattggctagaagtacaatatggtgaatctagaaagacaactttcacgaaaagctaataaatgtgaaatggaacttcaaacaactgataggaaattcctattaatcaatagatgatctggggaaatagtaattaataggggaaaaattaacttagattctcctctcctcacactgcacttacaaacttcagataaattaacaatccacgtgttcaaaacctaaatattaaaggtagaattttaacctaaaaagacaagaaaatatatttatgattttagaattagaattctttataatacagaaatcacaaattatatgataggtttcatagattttaattacattaataggaaagactactataagacagatgacaccataaagagataagagacaaaccacaaataatatttgcaacatataacaggaagtgtttaggatatgcaagtaaataaaagttgataatgaaaacggataatataagagcaggctattaccaagagagaaagaaatgtctgatgaacagacaaggatgattagaaatcagtaatacaaatgaaaatcagatttcatttcacagctgtcatgttgataaaaatttaggagactacatattgtcattgattcaaaatgtttctcaaggtaagctttttgtggtgtgttttcagctattaaacgaatcgtgattgggcctctttttaaaacgtttctgacaacatgattcaaattgatattatttattgctctttgacttgtttatcttaccttaaattcagcaaaagcgattttgactagcaaactgatgctttagattgtatgctcccaagagtctgattctagttgttgtattaagaatagtgtacctttttgctttcactgctattaaatcttggtgattaaggaagagagtgccctgtattactgtgagttttataattttggacagatgactcacttctcataacatcatattggatgtttcttttacgatttcttcttcttatacttctaaaatgtacctgttttaatgtttttcccttagatcaaatgaatgcttcaggaccaattaaagagaagatggggatattcaagatattagaaaattctgaagattccagtcctgaatgtttgttttaaagtggagctcaagaatagcttttaaaagttcttatttacatctagtgatttccctgtattgggtttgaaatactgattgtccacttcaccttttttattatatcagttgacatgtaactagtaccatgcgtacttaaatagatggtaattttctgagccttaccaagaacaaagaagtatccatattaagtttagattttcagttaatttttgagactgagtagtattcttggatacaggctgatgtgtacttaaccacttccagatttatacagtcttcctgtggaagtttagtaaatgtctttttccctcctttcttctagtaatgcagttcatgggctttaggtacttcagttatgaagtaggcttttcatggggagagattgggattatgctctctgttgtttaagaaactgtttgattttagagtctatttctatgagatagtttaccaaataaatgttccttataagatgatctcattaaattatttcttcaggaatagcttaggtgcaataatagcaaaagacttggctgtcggtaggatttggttattttgttttcttggtttcattcactagtactataggagtgtgtcatatagagatttcaagtggacattgtgttagcacaagagaagtttctgaatgaaactttagggtcttgagaaacgactagaaattggaaatggtagtgtatcatgcaaaacaagacagaccctgaaaatttatagtagtgggttaactagaaccaaatataagagaataggccttaggaatatgtaagtaatgcacaatctgtaatagaacagcataaaggccaaaagaggcacaatttagaccctgtgtgaaaggatatcagacaatgaggaagagaaatcctgaatgtaccctggagaggggacatactccataagccatacatttctgtgttagtgtttatttcatggaaaaatattgctgttgccatgtatattcaaatgcagatcagatgatctgttaaggataatggaaccgtcacttaagaaaaacttaattttttttccctgtgtcctattggcacaggtcttttcttttaaatttttattttaatcgttttgaggtacaggtgggttttggttacatggataagttctttggtggtgaagaaaaacttcagatagaacatttggttaaataaaagactatagagcaggtttatttgttttttaagtcaaaatgttaacccattacataagcatgctgacctaggcttgcttgaaactcgtgatcttgtccttagtgacccagtctttcctgttacattgtcctaaatgactggtttcatagttttactctgtcattgcacgtctcatatctcctccctctcactttgctccctattgccctgagaaaatagacgcagtcagaaaagaatctttaaaagttgtcaccgttgcatctgtaaacctagcatctgtgcccatctgtccccatctgccctttattatatactgcggatatattgtttgtcgtagcttgagccaattgcaatgtctcatttcttttataacaaagctccttgaaaaagagttctattatagcaaaactccttgcctgtattcattgtttttagtttgttctgttttttctgaacccattccaatcagatattcatttccattggagctggtatttttaaggtctcgtgacgtcagtgacctcattttacttgatctattagcagcatttcatacagttgttgactcttctccattaaaacatttactttatttggcttctaggaaacatattttcctgctttttcttcctatttctctgactcttttctcagtttcctttgctgtttccttttctatcctctaaacattgaaatatcctaagcctagtttgggattcccttgatggtcttcatttctttaatgggaactgtgctggtgactcaaatttatatctccagccagaacctttctcctgaattccagattcacatatccgactgtttactaggtgcttgataactatatctgtacttttcatcttgtttaatccaaatttacttcttttgcattttccttagttcaataaatgacaactttattcttccagttatttaaaccaaaaatcttagagtcattcttctcttccttccctcatatttcatgtctgattctaaaggaaatcttgttgcctgtactttttctttctttcctttttttcccctttttttgagtctcgcactgtcgcccaggctggagtgcagtagtgcaatctcagctgactgcaatctctgtgtcccgggttcaagcgattctcctacctcagcctcctgagcagctggggttacaggtgcatgccaccatgcctggctaatttttatatttttagtagagactgggtttcaccatgttggtaaggctggtctccaactcctgaccttgtgatctgcccgccttggcctcccaaagtgctgggattgcaggcgtgagccaccacatctggctttttttttttttttttttataaacagtttcacttcgtcacctgggctgaagtacagtggtgtgatcttggctcactgcaacatctgccccccgggtttaagtgattctcattccttggcctcccgagtagctgggactagaagtgtgcgccaccacacctggctaattttcttatttttagtagaaacgtggtttcaccatgttggccaggctggtctcgaactcctcacctcaactgatcatctgcctcggactaagtgctgggattacaggcctgagccaatgcgcccagcctactttctataaaagtcgtcatgtctctgcccccaccccccgccaccccccacatagtctgtttcatttgattttccccttagtttagtgttttattttgatgtttcttcagatgccttgggatcatttactgttcctcatatttaagagcaaatgcttaaaaattcttagaaataccttcttgaaaagcctgcattcctaccacctctcaccacttcaacatgaaataatgatcccttacatctttttagtgtagttatataacttttgattggctcaataattacttttattatggctgtgtaagtattattaaagctttagataagccatggaatatgctgtgattttattttcattcttgtgcagctttttttttctccctgaagttaatacttaactgttttttacctaccagtaatttatatctaatcactctggaaatataagcccctcagtatattaaaacagatctcatgattcagtaataaacctccccctccaaatatatcccatcacctctactccctggaacattcttctagtttggactgtagaactgattccatctggaaccttcctttaccatactcctgggtattcctgttggctgtttcatgttttggaattactgtttactgtgtcttgtgtctccccccccccccctttttttttcctttaagacagagtttcactcttgttgcccaggctggagtgcaatggcttgatctcggctcactgcaacctctgtctcccaggtttaaactattctcctgcctcagcctcctgagtagctagaattacaagcgcccaccaccatgcccagctaatttttgtatttttagtagggacagggtttcaccatgttggccacgctggtctcgaactcctgacctcaggtgatccaccctcctcggcctcccaaagtgttggtactacaggtgtgagccactgcgcctggctggatctaactttttttcctccttggtttactcgctcactttgatggattatgttgtcttgtgttttcccaagaaaagaattcaagggaaatgaattttttgagaactcgcatatctggctgtatttttgttggattcttatatttgatggatagttctggtttgggattttagagtaggaattattatcttctcagaatttcgaaagttgttgtgttgtctcagaacttccagtgttgtgggagagaaaattaatggttccttttttttttttttttttttgagacagggtctcattctgtcacctaggcatgaatacagctcactgcagccttgacctcccgggctcaagtgatcctcctgcctcagccaccaatttagtttggaccacagccatgcaccaaatgccctgctaaatttttaattttttgtggagacagggtctcaccatgttgcccaggctggtcctgaactcctgggctccagcaattccccccggcttggcctcccaaagggctgggattacaggtgtgagctcctgcacctggcccgaatgctgctttgatttccagtctgttgaaggtggggggaaccagccttttgttaatgtgagcttccagtgtttctttgtcttttgtattctaaattaataacacagtgatgtgtcttggtatgggtcttttttttttttctttttttttttcatttttaaagagactcctgctatgttgcacagacttgtgaattcctggtttcaagttatctttccccctatgtcactcaagtaatgtggactacactcatgtgacaccatgcccatctttatgttgtgtatcttatttttgttttgttttactcttgaatcagctcagtctgaaaatctgtcttttaattcatggggattttttagaatgatttcttggagggttttgtcttttgaatgtgtggtcccttctctgcctagaatttttttgtttgaatgagacatggtcttgctgttgtccaggttggagagcagtggtgcaactatagctcactacattcttgaatttctgggctcaagccatcttcccatctcagctttcagaatatcttggctacaggcatgtgacactatgcccagataatttaaaaaaaaaaaaaaaatttcttgagacagggtcttgctatgttgcccaggctcgtcttgaattcctgttctcagagggtcctcctatgtttgcttcccaaagcattggtattatatgtatgagccaccaccactagcacttctgcctagaactcgtaacaaaatttctttcccccatctgcatagtcttgtttcattaaatgattcttccctttttaaagtttagtctgtcttttattttgatgcttcttcaaatgccttgggatcatttactgttcctcaaatttaagagctagaagaaatctctctaagctccatgcatgagggttctcaacaggtggattttactccagtgtgatttcactagaccatttatttgagggtcacccaattgtcagtatatgtatatgagagagaatatgtacatatatatctgagagaaattctctaatcacttgtcctgtgtgagtatatgtactttgccagttttcttttggggtgaggaggagggacagtgtattagagattttactgttcaaaatgtagacttcctcagttttcagtaaaatactctaccctgtctatatgtggattcccctattccagactgattcacccttttcagtgagttagtcgtgacatttcttacactgtgagggggagtggtaattactttacagggaggtatggggccatggtgtttgactcttctttcaaccacttctgggttttttagtgaaaacctctatctaacactgatactttcatttctgttgtctattgagtcagttaacactgatccatttatttttcagttcccaaaatcttgctttgccattgcttctattttattgtctgggggtgtttaacacctgtttcattttttacagtcatttagtttccagattttagtaagggacagaggggaatagatggactcatttcatgatgtagaaacaaatactccctgtcttgtcttacatgaaaaattattcttaaactaggccttatctttgagaacctgatcaaagtataaaaaatactttttggctttatttctttagtgagtcactattccatattttgaaggtgttaagaggtatggtaaaggtggtacttgaacatttccaagcaaacgtgtgatgaaatctttcatcaatgtcttagcaatggtatatgatttttttagtcttagcaattttagataagttttttttttgtcttgtttttttgagacggagtcttgctctgtcgcctaggctacagtgtagtggcgtgatctcggctcactgcagcctctgcctccgagcggggtccagcgattctcctgcatcagcctcctgggtagttgggattacaggtgcatgccaccacacccaactgatttttgtatttttagtagagacagggtttcaccatcttggcctgactggtcccgaactgatctcaggtgatctgcccacctcggcctcccaaagtgctgggattacaagcgtgagccactgcgtggcctgaggtaagattttataagaagcctacaaagccctaatttttacattaagaacattaagtgcttctgatagttttaagttccgtagtctttatttcaaagaattatttcattctgaatttctatttaaattagtctagaatatgtttataaatttatttacatttggttgaaatgtattcttaaaacttattccacagtttccagtttgaggataaatgaggtctaaagacagtatgaacttgttaataatttttcctattgtcctttttagaaatcttacatatcctttagcctaattatagattggccctgcaagcatgtcactgtatcttttatgtcttcctgagtcttagcactttaaattcttctatatccttcactgtctttcttacagcaccctaaaagagtagcatgtgaactgttgctcttctctaaggtattttaggacatttttaaaataatatatgagtggttgtcatgctaaatactgtctaccacaactcatacaattaaagtggtcaaagaaaggtctctttcatttcttttttcattttaaaaagaaatgttatttgtaaaacagtatagtcataacacagatatggcagttttttagtttttttttttctttttcttcactgtgtcatccaggcagtagcgtgattataattcactgcagcctccaactcctgggcttgagggatcctctcactgagccttctgagcagctgggactgcaaacgtgtgccagtactcctggctaatttttaaatttttttgtagaattgaggtgtttttttaaatttttttaaagccttgtttgcaaactgttgcaacttctggcggctgcaacttctggcctcaagcaatcttcctgtcttggcctcccaatagcataagctaccgcacccagcccacaattttctttcagtacaatataaacatcttgcaagcgctagcttgatttacactttttgtctgtatccacctctttttttttttttttttttttttttttttgagatggagtttcgctcttactgcccaggctggagtgcagtggtgcgatcttggctcattgcaacttccacctcccaggttcaagcgattctcctgcctccatcttccgagtaggtggcattacaggcatgtgccaccacgcccggcgagttttgtatttttagtagagatgaggtttctccatgttggtcaggctagtctcgaactcctgacctcaggtgatccacccaccttggcctcccaaagtgctgggattacaggcatgagccactgcgcccagtatatatccaccactttaccatccacattagcatttcattagcttctctttgcccttttagttaataaccccatctcagggtgattcactttcataatccgtattaccatggattaattctgcatagcaaaaactatgataggtgtgttaagtaatgaagtttggggaatgttaataagatgatttctcttactgtagatgaaatacatcgtaagagaatccctcgtgagaccagatcagttacatgtatatcttgcctctcttaagtctctaccatttattactgtacttgagttaggatttggaagtgccactgaacactaaaattattctgtctgggtatttgaatggtgtgagacaaaaatccattttaatgttttatcaagttgagatgtctcacatgagtagttagtgctgagaatcagacacaggcacatttgggagcatggcgtggcaagaagctttgctttttcctgttcctattgtactcaaacttgtttctacatttttcattgatttctcttcgtactagcactagggcgcaagagaagccgtactggaatattacactactcagcacaagacaggtttaatctttttcttgggggacaagattggaaaattgaggtctgagcagacctgaagagaggcatccagcaactctgagattaaattcatcattgatcaattcgttattgtttggaattgacgtttagctgtgttcctcactcagatacgtgcatgatagctgcttgctaatttggtcttagctcacatttcacctagaatgtatggtctccctctcccctgcaaaatatcccactgttgctaatctgtctgcctcataatttccatgagattgagcatcttgtttgttttgtcaccactatataacagcatgttggaaacaaagcagtaataaagctagaaaaaccaagcgaatacactggattaaaaaaaatactgtttcctagaattaaagaaataaatgaggccgggcgcagtggtgcctgtaatcccagcagtttgggaggctgaggctagtggatcatgtggccgagatcgcgtcactgcactccagtctagcaacagagcgataccttgtttcttacttaaaaaaaaaaaaagacctcatttgttaactgttaaacagaaaacaagaaattccctatacctgtatgcattatagagcaaataagagcatcaaaaacaatcttagaaatctttcagagaaaggtcacctacaaaggaacattgatcagataatagatttttttttttttctcagatggagttctgctcttgtcgcccagactggagtgcaatggcacgatgttggctcactgcaatctccgcttcccaggttcaagcagttctccagccttagcctcccaagtagctgggattacaggctcccactaccattcccagaatttttgtattttaattagtagagacggggtttcgccatgttggccaggctagcctcgaactcctgaactcaggtgatctgcctgcctcggcctcacaaagtgctgtgattacagggtgtgagccactgcacctggccgataacagatgttttaatagtaagataaaaagtaaaatttccagtgtgtcgaaggaagaaaattacagcctagaattttatcttcatgtacattatttaagtgtgagggaatagtttcagtgacattatgtcattgaagaccttagaagatttccctcgctaaaggagataaagcgactggcacaacatgtatttctctgagtaattagaagtgttcttttctggctgtactgaagggactttcatgatttcttcgtttttgtactcttagttttataatattgcatagtagctaaggcctggctgtagcagttataaactgttctgcaagtgcgggaagtaatagttattcctatctcaaggatgtggggtttaaatgggttagtgcacaaaaggacatttattaaatttagtcataatcatctcaaggacatggtaagtgaaagagtgtacataaagtacttaatgtaatgtttgctacttaatgttcaataactcaaagagaccaccaccactactacattttacttttattagtaattaataataattaataattagtaattcagtggtaattagtatactaccaaagaaagtacttgagcagaagagccaaaattcaaaccatagaatcattttactgtgcttttattctacctcaaacactaatctccaggccttggataaagggattatttctctgaaggggaaagttatcctctttttgcccaagtcacacttgtgtcatttcttatactgtaaacatgtggttccaattctgaggtattttcccggtttgtaggacccaaaaagaagttaggcttgagaaattttaagtgaagagaacaattctagttcagagtgattggctcttcctaaaagctgacatttgactgaaaattttgaggggagggaaagaaacaataccttttacggcatgtaataggaagaagacctggattttagttgctgctctgatgtcccaacttgggtaaggcaacataacataaatgtcagtttcttcagatttgtgatgaagctgataatccatgctcagcttcctttatgggtctcttgcctatcaaataaggtacagtatgtgaagatacattgcagattatcttatgcattgcttcaggggatgattaaaccatcctttattatagccagagtctagtctaagggaagaaggtcattctctataccagtgaaggctccatccaaaccagtgtttgggggcatagtcataattgaaaaatgattgttttccttatctgtaagacaggtaaatggtattaatcctcaggtggttgtgaggattaagtgatacatgtaaaaaaaagaaagctttggatagtacctattataagaaactcagtgttgctgcaatgtatgtattataatggatttgaaatttgccctaaccaagagtcacagacagaaaaaaggaagttaatgtatctcttgatcactatcaagatgtggtattgaaccttcaagatccttttcagggaatatgtgagatcaaaatttttatactggcactatgatgttatttgccttttcctcatattcacaagtgaacagtggagttttacagaagctatataatgtcatgacatcactgatgggtaatagaatgtgtgcttgtatattccgaaactttcagttccaatttcttcgatcaatgtaatcctcataagtaaaagttatttgaggacctcagacatttttaaaaatgtaaagggggtggggtcaggctcagtggctcatgcctgtaatcccagcattttggaaggccgaggcgaacggatcacttgaggccaggagtttgaaactagtctggtcaacatggtgaaaccccgtctccactaaaacaaaaagttttctggatgtggtggcacacatacctgtaatcccagctactttggtggctgaggcatgagaatcacttgaacccagaagacaggttgcagtgagccaagattgtgcccctgcattctagcctgggtgacagtgagactgtctcaaaaaataaaggtgtacagggattgtatatttgacaacttggtatgtaggatgtgctacctctaatgttccatgctgttacttagttttcactcactactatattttggagatttgttcatattgctctgtgtacatttaattcttcagtgtgtatccaccacatttaacttattcacttacagaactatgcaagaatttctctggtaaatttcactaagtacttatgtacttttcagaacgattgtgagtttacacccctaccagcaggactgagttgagtacccatttcctcacatccttgccagtacttcatttgcctaatttttgccattctcataatgtggcaattgttcaattttgcatttcttccattttatttttttgcatctctgcttttcttttggttagctttgccagttctgcctattatattaatctcccagaatcagcttttagttttgttaaatctctgacatgtttcgttgattcctgctttcatcttaaacatttcttcgttgttaatttgtgtttgctataaaataagcaacatcttaaatgcttgatttgctttcgatgtttattctgtaataagatatttaaagatataattttttccctaaatgctttattagacttttctcataagttttgactggtactgttttcattgttatttaattttgtgttttttaacttctttcatgatttccttttaactgaaggttttcttagatatttagtttgctggtatattcttttaaaattgtatcattgctttctttctatattggattattgtcagagaacatgatttgcatgatattaactttttggagtatattgttgcatctttgtggcctagtacatagttaatttagtgaatgcttccagttgtacttgaaaagaatgtatattttctgattattgagggtaaatttctctatatatgttttcctgtttaataaatatgtagctatgtgctta

SEQ ID NO: 302 - DNA, 125078 bp, Homo sapiens
  source 1..125078: mol_type = genomic DNA; note = NC_000010.11:c132332559-132207482 STK32C [organism=Homo sapiens] [GeneID=282974] [chromosome=10]
gtgaaacaacagcctggactcacacagggcccaggcagcgcaggctccgtggggtttccgaggctgccttcaagggatccccacgcacgcccacccccgctccctgcctcgatttccccatccgggcgaggctgagttgggtccgacgctctgggcctcacattccaggcctcagaagggcagcctttgcggtcagcatcgcggctggagctaggcgacagggcacgacgggccgaggcaccaccttcctgccgccgcccgcctcgagggctcagcgagctggccgtacccgccccgtctcacctgccgcgtccccgcccactgaagcgctggcgagccccgccgctgagagcagcagcccgacaatggaggccacccagccaacgcggtcgccatggagacgccggtacggaatcccgcaggcgccacgctgagcgcgagtgtgtctgtgatgcgcctgcgcgaggggtgtggtgcgcctgcgcgcgggggtgtgcgtgttgtgggggtttgtgcctgcgtgcgggggcggggtgtgggtgcccctgcgcggcagggggtcgggtgtggtgcgcctgcccgggagggggcggggtgtggtgcgcctgcgctggggcggggggttgcgcttgcggtgggggggttgtggtgcgcctgcgcgggggtggcagggggtggtgcgcctgcgcacgcacgcggccaacggtagcatccgtttttccgcgcccgcggccttgaaggggtggtggtcgacgggcaagtagagaccgcgagggtctggaggggcgaccggcctggcacagaggggaaggaagagagcgggatgctaagtgccgtctggggagccggagggcccggggcgggcggggctgctcgaggacagccgagcagaaaagaattgctgctgaggcaccacctttggagcggtcctcgctgcctgtccttcccgctgggctcactccccgcgtctctcctggggcttcctggagccacttcccacaggagctgcttgtccccaaatcttgcctcaggacttgctgccaggggaacgcagactcagagcgtcctctttggagaagtaaggctgcctctggacggaggagtgaggggggcgaggaaacgcagtgagtgtcctgaggaagggttttgagaatttggaagaagatgaaatgacaccgggcgggaggggaggtgctcgcgtggtcctgtggaaccctggagtcccgtgcaccttcattccaggatccaactgataatgaaaagtagcaccctctgtcccacccagaaacactctggaaacccggacagtttagctggagtctgccatgatttcacttttttttttttttttttttttttgaggtggagtcttgctttgtctcccaggctggagtgcagtagcgcgatctcggcccactgcgacctccgcctcccaggttcaagcaattctcctgcctcagcctccccagtagctgggactacaggcgcgcgccaccacgtccagctaatttttgtatttttagtagagacggggtttcatcatgttggccaggctggtctcgatctcctgacctcatgatccgcccccctcggcctcccaaagtgctgggattacaggcatgagccaccgtgcccggcctgattccactttttaaaggaaacgacataattatgtggagaaacgactatccactttgaggggatttacgttttatttttgtgaagagatcacagtaagaaatgttttttaggccggacacgatggctcacgcctgtaaccctagcactttgggaggccagggtgggaagatcgcttgaggccaggagttggagaccagcctgggcaacccagtctctacaaaaattaaaaaaaaaaaaaaaaaaaaatgctgggtgtggtggcacacacctgtagttccagctgtgtgggagggtgaggcaagaggatcgcttgaacctaggattttgaggctgcagtgagttatgattgtgccacttaatgtcagcttcggtgacagcgagaccctgtctcaaaaaaaaagttttcgtacatacccaactatctaccaatcaggaagctgaaagcacaaccagtaccttctcaggagcgtggggaggccagccacccgggcagagcaaggagagaatgaggagtgacatgggtgttgccgtgagtggcgaaggggatggaagatttcagcacgatgctatttctaacaagtttcagcattccagtatctcttttcacaaataaaacatttactaaccatttgagcgtattccctcttgcttgttattgttgcctcaggtttttgtttcacatttttcatgctacattaatttttgtagtcagtagttaattgtatgtacgagcatgttttgccctttactgtgctcagtttttgcccagccagattgtatccattggtagccttttggcaagtattcttgggtgagcctcccaacgtaggaacgaatgaagtgttcgtgttgatctgattattgagtggctgtggagctggtgccgcgttccttgttgagtcatttcctgtcttgattttaggaccttcctccgggcagcgactgctgctaccctgccgagaagtttgctgcccgtggcattgctacttccatgaaggaaatctatcttctcttttcatgtctttgttctgaaatttcgctgtggtatttctgagtataagttggtttggctgtgttgcctggcgctggccgtgtcttctcacctgagatagctaagtttcagttcccagcccttcccggccatctgtcctcccgtggcacctctgcaccctgacataattcttgttctggatctcctaaaagggagtagcttgcacccattcagtgtcttctccatctctcaaactgcgcttcccagtattggtctctgtgttctcagtttacgatcttccagtttactagttctgtctccatccaattagtttgtttaatctgttgagtttttaaataaaaccgcattggtctctatttctaattttcttttttgtgtctaatttcttccagtttttgttttataatctgtttttaatgttcacggctgttttctttctttatctaccatgagaatcccaaacacctctatttatttattttatttattttttgagacagggtctcagtctgtcacccaggctggagttcagcggtgtgatctcggctcactgtagcctttgcctcccagattcaagcaatcctcccacctcaacccctcaagtagctgagactacaggcatgtgccaccacactgggctaatttttgtattttttgtagagacgggttttaccatgttgcccaggctggtctcgaactcctgagctcaagccatccacctgcctcagcctcccaaagtgctgggattataggcgtgagccactgccagtcctgagccactgcccggggtagacacatttattttaaactgtgctttattgttttcatctcccctgggcggaatttaccagttgatggctgatactgttatctgtcttcttggagtcctgtgttttgaaatctaggcttgcaggcttctgcagagggggcttatgttctgtttccctgagtattcactgtgtgtcatgctctggcaggagcctccgtccagccttttggggtcatgcttgggtgcttgcctggccttgccgttgggaactgtagatccagtcctggagccagcaagaggctgggccgaaggctgtcctcgtctccatctccagatatcgctgcagaagttgtatgttttttcacattcctttcatggaagtgaaaccgcctttgcaaaattataactgaggaaattatgacagtgaaagagatcagacctaaccgattccatcttgcttctaacttttaagctgtccttgttcattcctgggcataggccaaactaaccttgggaaggaattcagttcatggtttgactctgaaacaaaatgggtaatagccctttcccgaaaatacccccttcttgcccagggaccaatctgcctttgcaggactaacaaattaggtacaatattagacattacaggttaggggtcctgcagcctctggctccaagagtctaaacctccccaaattgctcctgggtataacatcactattgtaaaacccaagatcagagcttgagatattttgcaaaccctgcactccacagatcagccgacaccacccagacctgtaatctcgctccggcagttcgggcacccacccaggagcagaaaacagcaaggaaacctcacttcgaccccctatgagtccatctccaacctgaccaatcagcactcctcatgtcccaaagccccaccctcccaattatctttaaaaactctgatcccagaatgcgcagggagactgactgagtaataatagtagaactccggtctcctgcacagcccgctctgcgttaattactctttctccattgcaattcccctgtcttggtaaatgggctctgtctaggcagcaggcaaggtgaacccatagggcagttacagaggcaagagacttattccagccctggttttcagcgatgctcttggctgttctccactactctcaggcactttctgccccctcactcttcagggacagccctcccaagcacctttccctctttctgggcccagagcccccacaggcccaaagtctgggtcctgtgagctgctatgtgtttctgattcatttttggtctatgaagtgttggtggtttttaaatttttgttttaaaaattacctattataggccaagcatggtggctcacacctgtaatcccagcgctttgggaggctgaggcgggcggatcacctgaggtcaggagtttgagaccagcctgaccaacatggcgaaacccccatctccactaaaaatacaaaaattatccaggcgtggtggtgcatacctgtagttccaggtactcgggtggctaaggcaggagaattgcttgaacctggtaagcaaaggttgcagtgagccgagagcatgccactgcactccagcctgggtgacagagcaagaccctgtctcaaaaaaaaaaaaatttgttttaaataaaaattacctattgtagccatggttggggagaattgtgggagggcctctgtattagtttgttttcatgctgctgataaggacatacccaagactgggaagaaaaaaaggtttaatggacttaaagttccacatggccggggaggcctcacaatcatggtggaaggtaaggaggagcaagtcacatcttacgtggagggcagcaggcaaaaggagagaaagcttgtgcaggggaactcccctttttaaaatcatcagatttcatgagacatattcactatcacaagaacagcctgggaaagacctgcccccatgattcagttacctcccaccgggtccctcccacagcacgtgagaattgaagatgagatttgagtggagacacagccaaaccgtatcagcctctaagcttgaacttgcaataccatcttgcccagagaaagtaatattttccagtacaggaaataaaacagttttactctgctttagtttttttatgtaatcccttattgtgaagctgccataagttatgtgtgatgtttttccagtaattaatattcttctacattgtaaaccaaaaacaaaagtctgagtcccccaaccagctgaatggacccctcttctctgtcaaggggattccaaagaaacctgaaactagttcagaccatgaccagcagtggaggactgagtgcacctcctagttcagactgtgaccagcagtggaggactgggcgcgcttcctagttcagaccgtgaccagcagtggagaactgggcgtgcctcatgatactcctctccttttggggttagacagactcaccagcattaacattaaaatagagatcttggctgggcgaggtggctcacgcctgtaatcccagcacttggggacgccaaggcaggcagatcacttgaggtcaagagatcgagactagctggccaacatggggaaaccccatcactactaataatacaaaaattagccaggcgtgcacccataattccaaccacctgggagtctgaggcacaagaattactcgaatccagcaggtggaggttgtagtgagccgacatcacaccactgcactccagcctggtggcagggtgaaactttgtctcaaaaataaaatagaggttttaagactgacagaacagactctgtagcaataagataccaactccaactgactctggcgtaatatcacatggcagataaggaaatcaagataattacccccaaatttgtttatttttcatatctggaaatggccctgcaaagctgtcttttgtggggcggagatttgtatctgtgaagaatctaacataactggatctttacccttccaggcctccccgatcctgaagagatgaactgatagtctagcaccctttgaaggtctacataggaaaccatgttagtccattttcacgctgctgataaagacataccggccagcgtggtggctcatgcctgtaatcccagcactttgggaagccaaggcgggcaggtcacgaggtcaggagatcgataacatcctggctaacacggtgaaaccccgtctctactaaaaatacaaaaaattagctgggcgtggttgcagactccgatagtcccagctactctggaggctgagtcaggagaatggcatgaacccgggaggcggagcttgcagtgagccgagatcgcgccactgcaccccagcctgggcaacagagcaagactgtcttaaaaaaaaaaaaaaaaagacataccaaagactgggcgatttacaaaagaaagaggtttcattggacttaagttccacctggctggggaagcctcacaatcatggcggaaggcaaggaggagcaagttgcgtcttacccggatggcagcaggcaagaacttgtgcagggaactcccccttttttttttttaagacggactcttgctctgtcacccaggctggagtgcagtggtgcgatctcggctcactggaagctccgcctcctgggttcacgccattctcctgcctcagcctcccgagtagctgggactacaggcacccgccaccacgcctggctaattttttgtattttttagtagagatggggtttcactgtgttagccaggacggtcttgatctcctgaccttgtgatccacccgtcttggcttctcaaagtgctgggattacaggtgtgagccaccgcgcccggccggggaactcctctttctaaaaccatcagatctcgtgagacttattcactatcatgagaacaacatgggaaagacttgtccccatgattcagttacctcccaccgggtccctcccacaacatgtgggaattcaacataagatttgggtggggacacagccaaaccacatcagaaacatcagaatttaccatcaattgtttctaacagtagccaccaatgagacttcatttaccactaagaacttgatctctacaaccccttatcttaacccagacactccttcctgttgattgattccaggtctttagataataattctttcaaccaattgtcaatcagaaaatctttgagtccacctatgacctgtaaggtcactctcctgcatctctccccatcccactttcagttgtccttcctttctagaccaaaccaatgtatacctcacaggcattgattgatgtcttatgttcccctaaaatgtataaaaccatcttgcaacccaaccaccttgggcacatctcaggatctcttgagactgccttgggccatggtcactcatatttagctcagaaataaacctctttaagtatttgacagagcttgactctttttgtcaacaacatcaaaagaaaggcagtctttttttaaaatgtaaaatatactttatagaaagttgaatgtaaggacaatacacatttctacgtaagtttacagatttcaaaatggcctaaaattgttttttggaagatgttcaaaatgcccctggcagctgattccatttctgctctgctgtgcctgctaaaccaatcatcatacaatgtgacaactgaaatacattgctcttccttgaaaagagttcagactgcaaagtgaagatgacctctgtttcctcatataggtcttctgagagcacaccccaggactgggattttgccaggaagatgtggaatggtgtggaaagacaagaagctgcagccttcaggctgccatgaaaaagctgggggtgtgttctgtggcccatcaagagggggtgtgtaatgaattgttaatgaatttctcagatgagccaaagtggtgaacttgtctcagtacccagggagactcagactcatccccagctcttggcctccattttcccagctgctgtgattggagtgggtccctggaattcatatgctggaaatttggtccaggtgtgggtgtgttgggaggtggggtttaaggtgtggttaggccattaagagattaatgctgctctttagggactgggctaattcttgagggagtgagtggcttcccgctctctccggacagcattaactgccacaggttgggttattataacatgaggccacccctcatgttttgtcccactcccccttccacttcgcttctgtgtcatgatgcaggacaaaagcaccaccagaaactgttgccgttctcttgggcttcccagccttcaaaactgagtcaagtaaacatctttcctgtataaatcataacccagcctcaggtattctttgtagcaacagaaaatggaccaagacactggccttgagacttgggtgcaaaatggtttagctccatccatcaccccatcccaagccaatctcatggcctgtgagcctccaatccccatgcaccccaccttctatcttaaattctttaacctgaattcatgtacctaacatagacacaggttttggggattcagacatggacgtctctgagggccattattctgtctgccacaattagatcagcacatctcttggaaaggaactgtctttattggaggaaatacattgacgaggtgccagggtgggcaacagtctgtgaacattggtattggcctaggccagtgagaacgctagggatggagtcttaagccagccagtgatggcactattcagtccatacagttaagagatatcaaggatgggtgaccaggaagccaagggcaagcacctcagtaacaatcatgattcctggcccatttccagacttgagccaggttttggacccagaatgcactgtgcaaggagaaattgatttggtggaaaattacatggtaagcctattgtaaggggcaggaagaattcccaagaggttcaacaaaaactaagcaactgaaaacgtcattatttcagtaaggacaagcagtaggaagggaaataatcatagtacacagaatgaaagggtggtgagtccgacgcagggcagcacttagaccagggaagagacatcctccttccctgggctttgcattttagagggcctgcatttcacagacacagaaccagctatctgttctttttggtttcgtaagaacactctgggattgagtaagcgatcaaatgtgttcaggagagggacgcacgaaccaaactggtccctgggccagagagaatggggctgagacatgcacatgtttgtggagagagcagagaaccacgacctccaccccaggacactggagaaagtacagagtggccactgcagatgaccccaaatgggtgtcaggcaggagggcttcccagatcagggtgcctcctccccctgctgggtggtatggtcctgggaagggcttagtaattccagggcttctaagatgctggcaacattttacttcctgtgctggtagttacactggcgtgaaatttggttgagatgcatgcccattacctgtgtagtttcccacaggtatgctatgcgccagtgcaagagtttatacacatccttaggagaaaatgtcagtgaattttactttgttcttaggctaagaaaggatttttaaacaagatataaaaacaccataaaaataaatattggtaaattcactatactagaaataatcctgttcatcagaaagataccataaagaaaattaagtcagccaaaaactgagagaagatactggcgactcttacatccaatgaagattagtatccagactataatccgataaagatagtatgcagcattcctatgattcaatagggaaaagatagagatacatttatagtaataggtaaaaagatataaaccaatagctcacagtagaggagaaataaatggccaataaaaatataaaagatgcttcactttactagctgtcagagaaatgcaatttgatccaagattgtatttcagatgagtgagtcttacactcactcaactggcaccagcaaagcagctgccttgtgttggtgagctggtgaagcccacggaacccgctgctgtgagagggtgttcgtcaatatcttgggagcatctggggactcctgtgcagggttgaattctcaagtgcaacagccccacaattccccctttggactccagtagagaagcagatggaggcgtgcaccaggacacaggtgccaaaatgtgccccgcgggatcatgcatttaagcaaaagcactggaaaggccaggacgggagaaagcacaaatacgtcacactgaagccagacaaggaagcatcttacagcctcaaaatgaatgaccaaccctccgcctcccaggttcaagcgattctcctgcctcagcagtagctgggattacaggtgcctgccaccacacccggctaattttttgtatttttagtagagacagggtttcactatgttggccaggctggtctcgaactcctgaactccagccatccacccaccttggcctcccaaagtgctgggattataggcatgaacgaccatgcccggcccttagatggaaattttaaagaggttacagaccagagggtgaatgaagtggctctgggactagtttggggaccctctggggagctggccttgggtcatcttagacattgtcccagcaggctatgtggagggtgacgtgactccagttggctagtctcaacagaattccacataacaaaccatcccaaaattagtaccatgaacgccaagcatttacctcttactctgcaggtgggctgggcttggctgggcttggctgggcttggtcagtcttggctctgggccacagatgcagcttgcatctattctatgggtgtctcattcttctgtgacaagcaggtcaccatgtgcctcccatgaacatgcaaaggtgcaagacggtagctgtgggaggacatccagggcccacttcgctggcatccccccaacatccctttgaccagtcaggcctcaccgtgttccatcccactctccagttgggcctctctgctccctcccacctgacaccccattggccaaacaaaccacacggcaagccagtcccaggatggtgaggtgcactgcacccaccccaaggccatggcagggtatggagatgtcatttattataagatggacagataagctggaccaataatttacagattccagcagagggtgaggacacccagatgcgccaggactgtaggaaatcacaatgatggcaacgccttggccttcctggggacagggagccctatttccaaatatagtcacattctgaggagccgggggttataacatcaagtctgcccttgacctcacacaagccaggctcctccaggccctctgctccaccaggcctcaacgtggcgcacaaaggattgaacggacgccagcatcatttgtaagaactccaggccgcatcccaagggtgacctagccccccaaatgcctgcctgagaaaacttaagctgcccaaaggatctcttcttggctccagcaacccgagaacagggccccgtgccccagcctctgcgggggtgggacctcacttccataaccgtggccaacaaacctattatagacgggtctcctgtggacccaccctcttcccactcttaagttttcacttccccagctctcctgagccccagcggacccccacccctcactgtccctttaaaacccacagtcaccgccgtgcagattcaagctgagtcaggtcacgctagactcttccccattgcaacagttatgactaatcacagtctgccctcaccactctggcaatgggctgtgtttatctttaaccagcatgaaagtggaggacacattcagccatagcacccatcctgcacaccccccaccatcccctacctgccccctccccagcctggattgtgggatgttcctgaatttttctcttgttttagaattttatcattcacacgcgcaatgtgccatctagtttttcttggctttataaacctcataaaaatgtgccatactgtatgaggtctcctgtaacttttttttttttctggaaacagctgtttctaagactttttctcattgttgcttgaacctgggaggcggaggttgcagtgagccgagatcgtgccattatactccaccctgggagaaagtgtgagactccatctcaaaaaaaaaaaaatccatctaaggtgcaatagatgagttttatattatgtaaattatgcctcaatagagatgacaaaaggaaggggaaaaaaaaacccttggctacaagccattgtgaagacacaataccacaatttttattcaatttacagtaaatttataccatccccacactcccactttaggatgagtaccctcagcccctgcattcccacagctgtctgcagtccattccgctctcaccccagccctagggaagcactgactctacacatttgcctggacaatggggtgcacattttaggtaaatggagtcagacagtatgtcgtcttttcatctggttttatgtagaataatgattttgaggtccatccgtgtagtagaaggcatcagtatttcattcctttttattgctgaataatattctgttgaatggatatactatttgtttatctgttcaccagatgatggacatttggactatctacagtttggggctatgaaatcatgctgctatgaatattcatgcacctatctttaagtcatatattttatttttcttggctagattcctggtagtgaaattactgggtcatatggtaagattatgcttaaatttaaaataaatgaactgttttccagtgtagctgtatcatgactgggcgtggtggctcacgcctgtaatcccagcactttgggaggccgaggtgggcggatcacctgaagtcaggatttcgagaccagcctggccaacatggtgaaaccccacctctactaaaaatacaaaaactagccgagtgtgatgatgagcgcctgtaatcccagctacttgggaggctgaggcaggagaattgctttaacccaggacgtggaggttgcagtgagccaagatcacgccactgcactccagcctgggcgacaagagagaaactccatctcaaaacaaaacaaaaaacaaagtagctgcatcactttaacaaaatatggactccagttctgccacatccaacccttggtattgtctgttttttttttttaattatggcaatcctagtaagtgtgtagttgtatctcatggaggtttaaatttttacttgcttcttcagaggtagcaacagttggcaggaagaagaaaaaataaactaaaagcaattttaaaaattttatttgcccagtgactcataatgtttatcacattttacatgtgtatcagccatgtagccatttgtatgtcttatttggtgaaatgttttttcttttcttttcttttcctttttttttttgttttttgaggcaaggtctcactctgttgcccaggctagagtgcagtggcgcaatctcagctcactgcaacctccgcctcccaggttcaagtaattcccctgcctcagcctcctaagtagctgggattacaggtgcgcaccaccatgcctggctaatttttgtatttttagtagagacaggttttcctatgttggctgggctggtctcgaactcctgacctcaagtgatctgcccgcctcggcctcccaaggtgctgggattacaagcgtgagccaccgtgcctggttttccaagtcttttacctacgtttttattagattgttttctttctctctctctctctctttttttttgagacatagtctccttctgtcgcccaggctggagtgcagtggcgcgatcttggctcactgcaacctccacctcccgggttaaagtgattctcctgcctcagcatcccaagtagctgggactacaggcgcctgccaccactcccggctaatttttgtattttaagtagagaccaggtttcaccatattggccaggctggtctggaactcctgaccttgtgatccaccctccttggcctcccaaagtgctgagattacaggtgtgagccactgtgcccagacttttttttttttttttttttgagacagagtctcacaggctggagtgccttggtgtgatctcggttcactgcaacctttgcctcctgggttcaagcgattctcctgcctcagccccccgagtagctgggattacaggcacacaccaccatgcccggctaatttttgtatttttagcagagacggggttttaccatgttggccaggatggtcttgatctcttgaccttgtgatctgcctgccttggcctcatttttatttttttagacagtgtctcactctgtcatccaaactggagtgcactggtgcaatcctgactcactgtagccttgacctcctgggctcaggcgatcctctaacctcagcctcccaaactacaggcacatgccaccacaccatgtgaatttttaaaaatttttgtagagatgtcattatgttgccaggctggtcttgaacgcttgagttcaagaaatcttcccggccaagtgtcctatatgttctgggtacaagtcctacaccagaaagatgacttccaacctttccccttgtctgttttcttaattgtgtatttttgagtgccaaagtttttaactttagtgaagaccaatgaatgaattttatgcctcattcatgcttttggtgtcacatgtaataactcttggcctaactagaggtcatagagattttcccctgtgttttcttctagaaattttatagtgttagctcctacatttaggcctctgattcagtttgagttatttatgtaagggtctaggtttattgttctcatataaattttcaattgtctcagtactttcagttttctttgggaaggagttttaacttacaaattcagtttctcttgtagataaattatatttttcaaatagtttctccattttatctgagttacaaatataatgtactggtactacattttcacaacatgcctttcttcatcttttaagtatcttttttttttttttttttgagatggagtctcactctgtcccaggctggagtgcagtggcatgatcttgactcactgcaacctctgcctcccagcccaggttcaagtgattctcctaatttttgtagttttagagtcggggtttcatcatgttggccaagatggtctcaatctcttgaccttgtgatccaccagcctttgcctcccaaattgctgggattacaggcataagccaccgcgcctggactcttttaagtatctttagattctagaatgatagccttttcttcatttctaatattctaattcctctttctccttattctgtaatcctggggctttatacattttaatgactttttaaaggatcactgatttgctttgctgattttcctgatcttttagacaggatctcactctgttgcccaagctggagtgcagtggtacgaccatggttcactgtagcctcaacctcccagtctcaagggatcctcccgccttagcctcccgagtagcagggactacaggtgcatgccaccatgcctggctaatttttttatccttattttttgtagagactgggtctcactatgttgcctaggctggtcgtagacttctgggctcaagcaatcctcccacctcagcctcctaaagtgctcgggtgacaagtatgagtcaccgtgcctggccttatttttttaactttttatagctcatctttactctcttctcccatgaacaaaacttcccatctttgctacattggcttatagtagtgatttttaaggtatgtaatttattttttaaatttttttttacaatttattttctttttaattggcaaataaaaatgatatatacttatggcatgcaacaagatgtttcagaatatgtatacattgtggaatggtttttttagcttcttaagacagaacttagaaaactgatttttaacatctcttatttttctcatacaggcatttaaaactagctgcatctcatacattttattagtttgggttttataatcattccatttgaatatttttaaatttccttgtgattcattatttgataatggattattgtttaatttccaaatgttggactctcttttataattgatgcttaatttcattgtgttcagataacacattatatattatttcaatcctttgagatttattgaaaattttcattttgtttcaggatatgacatcctatttaatatttcttgcacacttgaaaataatgtgtaatatgcagttattggttattgtgttctatagatgtcgatcaggtcaacttgcttaagagtgttgcccaaacttctatatccttagtaattgcgtatgtgtgtacctgttctagcaattcctgagatggaagtgttaagctctactactatgactgtgcgtttgtctatttttctctccggttgtcaagttttgctttatatagtttgaagtcttcttattaggcgcatacatatttgggattgttaggtattctttttttgtgctatctatttatttattttacttttaagttctgggatacatgtgtagaatgtgcaggtttgttacatagctatacatgtgccatgctggtttgctgcacctatcaacccatcatctaggttttaagccccacatgcattaggtatttgtcctaatgctgtccctccccttgcccccaaacccccagcaggccttagtgtgtgatgttcccctccctgtgtccatgtgttctcattgttcagcttccacttatgaatgagaacatgtggtgtttggttttctgttcctgtgttagtttgctgagaatgatggattccagcttcatccatgtccctgcaaaggacatgaacttattcttttttttttgagatggaatttcgctcttgttgcccaggctggaatgcaatggtgcaatctctgctcaccgcaacttccgcctcttaggttcgaatgattctcctgtctcagcctcccaagtagctgggattacagacatgcgccaccacgcctggctaattttggatttttagtagagatggggtttctccgtgttggtcaggctggtcttgaactcctgaactcaggatctgcctgcctcggcctcccaaagtgctgggattacaggcatgagccactgcgcctggccaaactcaatcttttttatggctgcatgttaggtattcttaaataattgatccttttatcatttgaaatgttcctttttatctctaataatattctttgtcttgaagtctacgttatctgatataaatatagctacatcacctttcttatgattattatttgcatggtatatcttttttccatctttttacttttaaattcttttttagtgtttaggttataattcatctttatatttaagatgcagcttttagaatcagcatatacatattagggtcttgcatttgtatccagtctgatggtctctatcttctaattgaagtgcgtagtccatttacgtttactgtaatgatgaactctaccactctgctctttattttccttgtgtcccatgggttgttttcatcttctcctggtgattttagttacattgtatctcctctgttggctcgttagctgggccactttttaaaggcattgctgtggatcacgatagccaccctcagtctgtcacagtcaaacctgagctgtaaaacaccacttccagggaatgtcagaaaagctcagcagtgtcatcatctctttgccctttgtaagttgtgcagttttacatctgcacatgctatcaggcagagtgttattagttctgctatgagcgatgaattgtctttcaacatgaaattgatttgcccctcctttatatagatgcagaagggcagaggggcagagaagggcggggcccaggtaaggtggtgcatcgcggtgctggccgagggcttatggctggctgagttctgacagaggctgctgctccatggatgccctgcttggccaggtaggatgccttcacatgggcaggagagagactctgcctgcgaactcttgtgggaaagaggaaggagaggtggcttatcctcccagcagtggttttccattggccaaagttcactgcatgggtcttaaacaacccccatttcagcagcctttcaggaagccagagctagcaccttccacggagctcatgaggcctcttgacctggtccttgtcatctccttagccttcgtctcttgccactccctgcctcaatctctccagcttaaccagcctggcctttcattcattcctttcttctaaagcatcacattcttgctcacctcttggacgctacccatgttctgcccggagggctgctctcctgctcccctttggctgacgtctgcccatctgtcaggtgtcagctctgctgtgggctgcctcgagggggtgtccctcatgctctgtcaggactggcatccactcctgctctcgcagccctctgtgcatcccctctttgcctgctatccactgggttcccgtctccctcgctgagaggggtgcacgctccatctgaccattcactatgtcagcagtgtctgctgcagtgcctagcatggagcaggtgcttggcaaatgtctgtcgtgtggcccgtgtggaagggtcctttttagccttagaggctgcctctgtgtggatggtaaacagccacggcgtttaatgttgctcatctcaaggccagtgcttgttagctgctgtaagggtagagtgtgtgacttaaccgtcactcggcatggccttaggtcctgtttataatttggtatcttattgccacaaagagccattccgtttgtcttatggtctccagcttaacattaaagctggttggttgttgtgtctaaaccgtaaaagggagggggtatcaggagacccgtctgacctcccatcccaccatcatagccaggaactcaggtttttaatttaattttattttattttttgagacagagtctcgctctgtcgcccaggctggagtgcagtggcgtgatctcggctcacagcaatctccacctcacaggttcgggtgattctcatgcctcagcttcctgagtagctggtattacaggcgtgtgccaccacgcctggctaagttttgtatttttagtagaggtagagttttgccatgttggccaggctggtctcgaactcctgacctcaagtgagccgcccacctcggcctcccaaagtgttgggactacaggcatgagccactgcatctggcctggaactcagttttaaggtttttctggagtttccttggccaagagcgggtctgtcccatcggttgggggcttatggttttaattttagtttacgtagtgcagcattgagccaccaagaattcttgccaggccttgaaacctcatggaacttgccctgctggatttgaacttacttgggaccgatgactctttttattccttcttatttctcccttttgaaatgggaatgtatatcttatgcctatctcatcactgtaccttggaagcatattttccagtttcacagttacacagataaaggggaattttgcccagaatggattgaactgaggtctcacccatgcctgatttagataatgagtcttggacatcatttctgattgtctaaatcaggcatgatttagacaatgagtcttggagactttcgagctgaaaatatttagacgagaggctgggtgcagtggctcatacctgtaatcccagcactttaggaggctgagtggggtggatttcttgagccccaaagtttgagatcagcctaggccacagtgtgaaatccttgtctctaccaaaagcacaaaaaatcagccaggggtggggtcatggatctatggtccgagctactcaggagcctgagatgggaggatcgcttgagcctgggaggtcgaggctgcagtgagccatgatagcaccactgcactccagtctgggcaacacagtgagactctgtctcaaaaaaaatcttgagctgggattttggacttagagttgctgctgtaatggttgggactttggggctgtagggtgtggtgaatccatgctgcccatggatgtggtgggttaaatggtggccttttgccaccaaaggacatgtccgtgccggccctgtgaatgtgaccttatctggaaagaggatctttgcagatgtaactaagttaaggatctcaagatgatatcatcctggagtagggtgggccctaagtccaatgacaagtgtccttatagaggaagaaaagggcggagtagacagatgaaaaggcaacgtgatgatggtggcagcaggggctggggttgtgggtccttaagcagagctgagcggtgaactcatgctcggccccggcgcactgcagtgggggcgagggctccttcctagtggctgcagcccgtcctgcatgttctccgtcgctgtgctccttcctgagtcaccaggtggccacatgacctttaaaatcaatactgtcaccatagcaaccaagtgtccccacacgtgggctccaaggccctggccttccaagaatcctcagtcccaggccccgccagggctgaatctgagggcgccacggccatctgtcttccatttcccaggagggaggctgtccgtggattctccacataggtggacaccagcatcggagtcccatgggagcccatttcctgttttgggggtcagttctgagatgtgttttccagcaggaaacagcacacacgaatcgtgtgatctgaggagatttaataaaaggactcttaacaaaggcgtgggcagagcatgtgttaatttcataatgatgacagaagatgaagcacacatctcggtgtgactgagctgtgtgccaattatgtggcaacggaggacccatgtccaaggcatgtccctcaggaggcgtggctttatggacgaattatgaacaaatgcacatgaagcctggtgtcagggactgcaccttgtcccccaaaccacccccagcccttcagcacatgccacggccactcacttgctgtcctgcagcatggaccctcctgtcctcccgcacaagccggtttctaccttagggccagctcctgctgttggaacccggacacctggcctcccttgggctactcgttcatgctccggcctcagcatcaaggtcacctgctcagagactcatgctggactacccaagctaaagtggtcccacgatcatgcacgtgctgcccagccatgtgccttcctgtgtgctcctgcgtgctagacgtcagtgcactgaatgcatttatctgtcacattgtcacttggtctcctgtcattggaaggggcagacaccatcgctgccctaatgaagttgacgttcccgggcagcatgggcacacaggggaactcaggaattctctactggcctcactgccccttcccatccacagctgactctgtcccagcctcagtccctcccagcatccccctagaacttcagagctacctcccatgaggcaccaggggttggcatcctcttggggacagcagttcctgacccctcctgtctcatgcctacactgtgcacctcttaacgctcagtcttgtgtttgcctggaccctgagccgtggctggacagtacaagagttgcacctggacagtacaagagttgtgccctgagcccacaggcccctccagggctgatctgcactggccaaatcttaggacccggcattcttttgggagctgctgtttccctacagatccttcctgtttcctgactgagaggcaggtgcctggcttggtgtttgaggctcacagcaagggtgaggttggagggtctcctagttaagtgtgcagatgtccccatgaacccctctgcccccctgcactcttgtcttctgcaggacttggtatccctaggtcaagagcccctttggaccctcagaccagaggactgtccatccccaactgcccgggccggggaggcgtcctgggctctggctgtattcacattctcccgccttttggggtcctggttacctgcaggtcctcagcctctccaatcttcagagtcagctttctacctgctgtctgaagtctattaacatgtcttcccttctcctgttccctcttaggtggtggtggggacgttatatcttttattccttttctgccacttttaggggtcagagggagaggaggagaggcgatgatgtaagttcagaggctgcgtgttttgggaggagccctggggagtctgatgtgtgcaccgggtacgcagggttccaggcactgccctgccttggtacctccccttccaaacgctccttcaccactcctgctgggatgggcaccgagggcttcctctgaggcaggtgctgaacccactgccttctgcgtgcctgctggagaatggcaactttgagggagagcagggaacagagcttcgcagctgcaagggctgaaaactcggctctgtgcactggaagttagagaccgatgcgtttgtgctagccaggcagggagagctgcggtggctggttggtcaggtaacctaggttatgctgccataaaaataccctctaaatctcagtagtgaaatgcatgccatgtgtcctaagcgggtgcatgtccaggtgggtgcatgtcctaggcgggtgcatgtccaggcgggtgcatgtccaggcgggtgcatgtcctaggtagatgggcatggttccattccttatagtccccaagggatgggggctcctgttggcccagaagccacacagacttcccgtgctcacatttcatgcatcaggcggttagggcgggcggccacactgaatgtcaaaggccgtggggaggcagggctcacagtggctgaatgacagggtagacagttgtgtgcggtgggagggacgggagcgggagacactggccttggagccatgttggggatccgctcatcgtccgggcgggcagcaggaaatcccatctaggatttcaccgaggaggaagagaccccgtctttgtgtcctggttacagggcagaacttaaggaggtaaaggcttcctaaagtcaaacagcccggtagcaaaaactgattcttcagtgacaagcgccaggggcaggcggcgaggctccatgcagagccgcgccttctccagggcactccaaggcgcccagcactttccgcgcaaggtcgcgcctggccctgcgcaggggcagaggtgcccggaggtcaagccgcgccccaggcctccgaaatacgccgagtgccgaggcccctgtcgcatctggacaaggggaccctgggcgactcgggcacgcggtctcaggccggacgggggtcgcgaggatggcacgggggtgcccgagagcgcgggcgcacgtgctcagggcttagcgcccaccccaggcgcccgcgtgtgcgcgcgcgcagccaggcccgccctgccccaccccaccctctggcgcagcgcttggactcagcctgccgcctcctgaccgtgagccgggctctgcccggcagattcccgccgcccgcatcccgggcctgcagcccggcctcaccctgcgcaaagcagaaggctggagtttagggctccccgcactgggcggcggaagcccgcgcgccggctgttttcacgaagaaggcaggggagggaggcccccggagaccgcgagaaggtcccgccgccgtgccgggcacagcagtccccgtgccagggacgccgacctccggggccccaggatacccgtggggacgctccctgcctccctcgctctcgtacccgccgtctagtctgagccgtggtccccgtgtcccggcgaaccacagcccccatccctagactggtggcggccacccactccctagcgacactccaggcactagccccgcccctgccccgcccccggctcggccccgcccctacccttcccgaagctccgcacctgccacgccccggcgctcagctccgcctcgaccccttccaggagctccgccccgcccccgccccttccagaagccccgcccctgccccgcccccagcgctcgcaatctacggggcgggttccaccgcccagaagagcgcacggcgggcgctgccggccccgagcgctcccgctaccactgccgctcccggccctgccggccggccatgccccgagttccggctgccgcgcgcacccagacccggcgatgaggagtggcgccgagcgcaggggcagcagcgccgcggcgtccccgggctcgccgccccccggccgcgcgcgccccgccggctccgacgcgccctcggccctgccgccgcccgctgctggccagccccgggcccgggactcgggcgatgtccgctcgcagccgcgccccctgtttcagtggagcaagtggaagaagaggatgggctcgtccatgtcggcggccaccgcgcggaggccggtgtttgacgacaaggaggacggtgagtgcgggcacggggacgacgtgggggccgcgcgctattgcaggggcgggcgcggctgggcggctttttcccgcaggggttcccccggtgtccgggacggcttcccggggcgccccggcttccggagaagctcgcgccgggtggctgcggccccacgcgagttctgggcgcccgcccgcgtcctccgtttctagtggcggcgccgcaggaggagcaggctgggcccgggccctcggggcgagggtcccccgcggctgtggcgtctccgggcttgcgcgcgcctccgcccaccgcccgtggcagccctgctttccgctttccgtgatccgctcgggcccacgtgcgggctcgtttgtactttgcagttagagaggcgctcacctgtgccgcccgagtgcgagtgaggctcctgccccacaggtggcggggcccggccgctcagaggctcagtctccttggtgaccgcgcggtgtccatcctctgctcacccatgtgcgctggaggcagggccaggccgttgtgcaaagacctgccctgccaggaacgagtgcgctgctgagtcctgtagataaagccgccaaccccggggactggtgtctcctgagtgaccgtgcagccgtgggcgccatagaaagcagagaaggcaggtgaggtgacatgggacaggcctgcagggacacctcccggggtgccagggggccccggggacccccgaattatcacctgcagggagatgtggtgccgcgtctgcctgtgggcactgtaatacagtcacatgcagacatacagctcttttctacaggtaacatgcaaatcatttaaaatcgtacattgatgacacatttcatgttttttgacattttcttaaaatacttgaaatgtgcatttttcatttatagatagcgtgcagaggtatgatggatccttcaaaattttagagcccagcgctcaggagccaggctatttacttgcgataaataatttaagcattatgggaaattacagtaatacgacctcaggccggcgttggtgagtgtggggccgtgcaccgccgttcctccgggagacggcaccggggattcatggtgtgctgcctagaaggagggctgaaggcccagccacaccaggccccacacgctccagggtggcccgtcactgtgtcctgaacttcgggacagcagaactcacgatggtgaatgtttgagaaatgtttttgtttttaacataaatattcaaagtaaagaaagcccagagtgaactaggagctgatcaggaggcagatttgcctctcgtttctggctgcgggttgagagaacgtctgagaaacgcatctggtttagcacttgctggtgtcagccaagagctggctgctcttctgggtctcggcaccgtgctctccgggggtgggagtggagacagtggtgtggcactgggctgccttcagctttgtagggtagacttccctgtgtgttcacagtgtgttatgtcacagaattcaaggatcactagaaaggcaaaaagagcaagcacagagtctgtctgtggggctcacggtctgacttgggaattctttcacatccccagcatcaccgtatttgcctgtagtaggacggcagagattcggctgacggtgtcccacggatgctgctggctccgtatggcttggtatgcagccacatccccaaactgagcacccgccgggactcagctgggctttgtgtggtgaaatcaggagggcaagactaggccctggcccgaatagcagaggacatctctgggcggtgaccgcttccctccgcttcttcctgtcactggcagggcacagacaacttgggagtcatagcacagggtttgcagaagaatgttctgcacctctgagtgtggatgccggggactcgtgttggtggaagggattcagtttggaaggagaaaggagagtcttttaggaagggactgttgcccctgagtcccacccctttcaggttggtgcagtcatttgcctggtactttcgtggccccgtggcagcactggcttaaggaggccctggtgctgtgttggtgtctcgagtttactgaatctgcacggttgctatggcaatgctagaccttccgatgaattttttagattaaaacacctaattaatatatcaaatttagtatgcagagaaaaggaaaaaagaaattaagagtgctgtttaacaaagtgccaggtaaatttcaactgataggcatagttgcgacatataagactaaatgtcctctgttccttttaatccttgtggactccagaaccattttcctaatttggcagatatttggtgcatgtacagaattctctgcacgtctttgtcatgccagaactgagggtctccagttttccttcccctcagcccctcacatgctcccattctatcccttctctgacttcggtgaaaaattcatttttggggttgaacttggttagggggtctttctgctgctgctctgcaccagagctgcatggcgttgggcgagccccttcattcctctctgtcttggtgtcctggtgataccaagtgaacctgagaggaggctccggtaccttcccgctaagcagctctgcaacctggggggcgctcgcccgtctcggggtcacagcattgagtctccagcctgacgtggcattagcccgccagcaggaagtagctcctccctgaggggctttgccttcatctggggaaggctggagtggacaggcccttgcaggctgtggacggcccgccctgggcgccgggccgggcaggcagtgaggcaggaccaggggccaccagactcctcaagtcatctcttaaaattagaaacacctttgttttttcctaattatgaaagcattaaaatgtatgcatttaaaaacattctatactttatgccacggtatctgtaacttcagcattgggatcacggtgtcacctcccagcctttttctggaaatacagtcccaggtacagccgtggagaaacactctctctttgttagcagaagtgggatcctgctctgcatgccaatttgccgtaaggtgcttgttgattcagcgatatgttgccagcctcttccagacctgaggcatcatttgttggctgaatttacaacagttctcagccccaggctgtggacccgagtcattcactgggcactcttaaaaaatgcagatgctcaagccccacacccgtgaactgtgggtgaactgggggggtttggtgggttgggggtggggctcaggggctcaggctttttttttaagcccctcttgagttttaccagcagtcgaggctgagattcccgactctgcagtgctcccctgagcagctgtgactttctctgcttacttagtttcctgtcacaggactgtgaggtgtttctgttttataaatatcataaacgacgtattgatgaacatcgttgcagatctttgtgcacttggcattgtttccctaggatacatttttaggaacgacattgctcaggcaaaggggtccgtgtgaaataccttaacacgtgtggccgctcaattggtccctctctgagcattgtttatgggccatgctgtcgtggggtaaccgggcagaggggaagcagagagactgacaagacagggaggcaggagcgagtgcagtgggtggcgggaggcacctgcaggggagagaaccagaccacctgctgccagcggagctggcgggaagggaaaacccattttcacttgctccaggagcgggagggtttgatcgccttttcccctgaatcctctccagctttgggtatcagcaatgtttctattctttgccagtctaagagattaaaagatggcactcatgctttgagtttctttgattatcaatgaggttcatcatctttttaccttaaatgtttagagcattcagctctaaacacatttcacgtgtttccacactttttgaattgcctgcccgcgcttgttagcggcatgtgtcctgtgggatggcagccgcaggttcctctcgcccttcctggtacacaggctgagccttcagcagcttccctcccacgttcctcatttatcttttaatgttgctacttagcttttttctctatggatgtgtttaatttgtgtgtggtcagattcatcatctgcctttgtggctgcgtccggccttgcctttatgtgacagcagtccttcccagcacagttaataataatttaattcataaacctgcatctgtactttcttctagcgcttctgtggtttcactttttgcgttggaaattgcagcccgtagggagtatcgcttgacggagagtgagaaagctctctccttctcgcattagttctcctctttcccaggatgagtgcagttaggatgtttccccctgtagggatctgaggcctcccacgcagcccctcaccgcagagccccaggcaggctgcgcccttgctgctcccggcctgtgggactggagtgggaccgtttccacgctggctgctgctgatgtgaaggaacgctccacttttacaaggttcaccttgtgtgtggctgagacttcgctgcctcttgcacatgactgcacttggctaaattctcgttagtctatagctttgaagttcattttgttggctttctgggtggtctgtcacgttgccttggagtgactctagtggccccgtgatggttttgcctcgttctttccttatggtgttgccggagctcatggagcagagaagagagaaggtcctgagcccaggggctgccgagggctggggacagctcctcccgcacggttggtatggacgggttgtccttccagagcgtcagcttagccctagtgtgggaaaactttccagtcaggtgtggactcgcattttggagggtgctctttccttgcctcctgaccctgtgaggcaaggggtgggggctctctgtgtggcccagacacccatcccccacagtgcaggcgcttggtggtcagaagcctggtggctgcagaggcccctggtctggggtgtggactggggaggaggcctatggtcctggcctcctgccgggcaccccgtcacatgtttgctcctggcttccccggttctgggcccagcaccgggtgtcctgggggcccttggggcagctgtgcagcttgatgcctcttctccttcccagctgtgaggctgctctagaatggactcgggacctactgtcatactttttatgtaacaaatgtcagctctgcgtgtctatccatctggttgtgcattttacaaggctaaaaataagccggcttttcttttagaacttgaaccacccagctttccagtggagaagtaatgcgaggatgccttggaggtgattttgttgagggattgattctctgcgggtgaagcccagagacactccaaggtgatctgagggaggcaaagtcacagacaagtgtttcttccacacggagccgggaccactcagagcagctttcctgcctgtcccggacccccagtcacccaggacttgtgaaaatgcggctgacccagccggcctggggtggggccaggagcccacatttccagccggccccaggcggtgccagcgctgctggcccgcggacatactttgagtgtgagagtttagtgagtatatagccggtgcatcatggtgagtgagggcaggaaacccacggggtgctggtcccttggcccgggctcccgatgggcctggagggggatctctaaccctctgtaccacggggttgccagtcatcagagggcgcctcgcggtgtggacttttaatttgcttttcctccttctgttcctctcagtcctcttgaaggcccagccttctccacacgtggccgacgtgcagctcctggttcacatcttgcattttcacccggcccagtagcccgcactgtttcctttacactgggatgcggcatctgtcttctgacccggatctgaggcagggtagtctggtgtgtccactggcgggttcctggggagtgtggccccgtgcttttgggcggagcatcctgtgtccccgagcccactgcggggccttgtcttccccggggacccccacacctaacgggcgctcccagctgtgtcaggcaggaccctcctagggaggaacccgggttccaggccaggccctgcaggaccactcagagcagcttcccagacttcctcttgagcccctcggctcttacatcaagtaagggcctgtgccctgtggccctgaccctgtctcttcctggttgggaagctcggagctgcatctgggttcacattagtggaggaccaggccttctacttggtgtcgggaagctcggagctgaatctgggttcacgttagtgggggaccaggccttctacttggtgttgggaagctcagagctgattctgggctcatattaatggaggaccaggccttctactgggcgttaggaagcttggagttgaatcggacctcgtgttagtggacgaccaggccttctacttggtgttgggaagctcagagctgaatctgggctcacgttagtggacgaccaggccttctacttggtgtcatttcccttcccagccagattttcctcctcacctaaaaagctccgttgagctgtgtgtttctctgaacctccctctctgctgtctgtgtataactggagataaaaataaagctctgtgaaccaccatttctcctgctgctgctgactaatacttgggcacgtggcgagaccttggtcttctcagccaccctcctgagtgggatgccgccttgttcggctctggctgtcaatgggggcgagtggccacccggggtggtatctctgtgcctggagcgcttccttacaggtctcctgcctgccctgggcgtgggcagagacgcaggcccctcccctctcccagtatacaggcagaccaacctgctgattgatgataaagatcagaacttgagacagtttggggaaagctataagcaatacaattattgttatttgtatggtatgcctgcttcatcagaaaacagtttcctcattgatttgaaatctattgttttaaaaatcaaggctgctgcagagatcagcatggctgggcaggagtgcagacggaggtgcttgccctggcctggctttgtcccccccagattccatccagcctcctctcaccccacttctccacctgtgaggagggagcccccatggtctctgccatgcttccttctgggctccggccctgccaatcctgtggaaacccatctcgatgttatttaagttctgaagccaaggagatggtgtaggtgggagtcagtgtcgcccccaatttattaaaaataggaaccgagcacattccatttctcacagtgatttagaaagttgactttgcaaaggtttctcctcttttgaattcacatcatgactctccgtcctccgaacgcagaaggcagaaagtgtgatagagcaggagagaggcgcctctgtgtttggaatgtctgcaggagtctagcacgggcgttgcacgcattctggggccttggcaaggatgacatttgtcttgttttgaccacgatgctgggatgtgagcaggagtccgcgggggttttggtgccgcctactccatgcacctctgcctctccctgtgccagcgccctgggtcccgtcctcagtcactttgtgacgtctgacctcagagcctctgttcgctgtgggaaagctgttcctggcggctcttgtgcccaataacagggctcggggtcctggcaccgcgtttctcaaaccgggtcctgttcgtgcccaggggacacattgttccacttttctgttgctgctagtaaactaccctacactagtgacttatcagcctccttgtggtttctcacgatgctgtgggctaggaatttggacagggcctagtggggacgggtgtctctgctctgcatgacgtctgtgggaccagaatgtccaccgtggctccctcatccatgtacacggcacctcggccagagcggctcagagagctgcgggctggtgcaaacctccccaggggtcttgtcctgaggtctcagttagtttgctgttggctggtggatcagctgtccatgctgctgggtctcgtcctggggtctcagttcgctgttggctggtggatcagctgtccatgctgctaggtcttgtcctggggtctcagtccactgttggctggtggattagctgtctgtgctgctgggtcttgtcttggggtctcagtttgctgttggctggtggatcagctatccatgctgctggggtctcagtccactgttggctggtggattagctgtctgtgctgctgggtcttgtcctggggtctcagttctgctggtggactagctgtctgtgctgctgggtcttgtcttggggtctcagttcgctgttggctggtggatcagctatccatgctgctggggtctcagtccactgttggctggtggatcagctatccatgctgctggggtctcagttccactcttggctggtggattagctgtctgtgctgctgggtcttgttctggggtctcagttctgctagtagattagctatccatgctgcttaatgaatttcctcatagcctagtggcccacagtgagctccatcttatcgtttctgagtcggtgattcaggagtggcttagccggtgcatcctcttggtgtctctcatgaggctgcggtgaagatggcagctggggctgctgtcacctgaaggtttgactgggactggagcgaccacttccaggccagcttccccatgtggctcctggatggaggcctctgttccttgcaaagggagcttccccacacactgcctgggtgactccacacactgcgctcaactccctcccagtgaccccacacacggcgctcaactcccccccagtgaccccacacacggcgctcaactccccggtgaccccacacagggcgctcccctccctccctccccagtgagctgagcaggagcgagaagccacagcgaggatctcagccacaggctcctcccagcatgtcctgttaggagcaagtgagcaagtccagctcatcctcaggggaggggagctggaccccgcatcggaaggggctgccgtgggacctgtggacttgtctcacaccaccacagccgtcctcagagtctcggcttcttcgccccactgggccccacattggggcaggaggaattcctgagaggccccagggcgcccacagacgcagagtagaagatgccgggccttcttgaggcttaggcctgggctggcaccgtgtcactttgactgctttctgctggttggagccagtcacaggcccagctcagattcaggggagggaccacacagggtgaagtctccgcatctgggggtgggctagggctgctgcgggtcggccgggctgtttggaagagctggacatggggccgggagagcagggacgagttggaagcgtgaccttcagggagtggtgctgctgcctgccacctgccagcatcacacaagttctctctcagccacctctaaccccagtttagccaaatggccaagcaccagccagtgtacccgggttgctgccgcagagcaccaagaccccaggagacacaaagcatcttctgagctttgaaactgaaagagcttggagggaaggctgtttgtacttgagaacaaacaaacaggaagttggagtggagtcaacatcttcctgagtttggaaaataaagccccagagaccaggcgggtgtgcacctgctgctggccgcggggcgggcccctgactacgggggcttcgccggggagtctcggagctctggctcagggcttcctgcactgcccctggaggacgcacctgtgactgccagggtctttgtttattttgcccccaattctttttcctttttcttgtaaacatcagtcatcttgtgtgtctgaagtgatgttttatctccaaaggcagaaaagataatctgtaaagttagcacatgactgaaagagggaaaaagatgaaataggaagaaagatacaaaggaaaaggggaggaaaaaaaatctgttctgaagaaagcattggaccctgggaccccagccccagagtgcgtggcccagctagtaccggggctggcgtggcccctggtggggctgggaattgtaggtggcaattggaaaacccagggtgggctaaccaggcacagccacagcaggcccttcggtggatcttcggggtctgctggcagcgggggcggaggcaccggtggggtggcagcgaggactggctgccctggacacgctggggatggccacggaggaggggctggggcatgtcctgcagagggtgtggggtgggagccaagcaggaggggagtcctctgtcattgggtcctggtgccccttccccagagccacagcagccagaggcgcaggaaggaaggggcctaagccgtgactgtcacccgcccagaagctgcacctgctcgggcaccacaaggaaacaaaaggtgaaaggggtggtgagtcagtggcaggagaggacactgggcagagctgtgcccaggccttggcctctgtctgtggcgatgtccgcctccctgtctctgggctgcctctccttccctgcaccccctgccgtggtctccccactggccctgacactcctttccagagccgcagaggctttcggcgtcccagagggcgcgggcctgcgagtcctgcctctgtggccaccatgccccggggtcgcctgggacatctgcttcctgcctgctgatcggtgccattcctcacagcggcccctttctgtctccaagtggcctggtttggatgatcaattgtgtggttgcccggtctaaccaccagatgctgtgccaggacgatctctttcttcctttatagctttttattatataatgaaagtgacgagaaaaaaattaagaaatccagcatcttgtgtcatgtcagcactgataaacaaccatttgtagtttttcacatgacctcccagttcgtactggaaaacatgcaaaatctatgtggccttttaaatttcaggatagtttagatttatagaaaagttgtgaagctgatacagagagttcccttgttccccagaagcagtttccccttacgtcaccgtctggcattaaccgggtacatttgtcgtaactagaggacccgtatccatacctcgttgtgaactgaagtccacactgggttcagatctcctcagttgttccccggtgtcacttatctgtcccaagatcccgtgttacatgagtctcctggcgccttagtctactccgtgctgtgaccgtttctcaaacttgctttttatgaccttgacagtttggacactggtcagctgtgttgtaaaatgtcctttaactgggattcatttgatgtttctctcaggattatgggcctttgggaggaagaccacggaggtaaatgccattctcatgatgtcatacgagattacacgctgtccacacaccttcctgccgatgctggccctgtcactggtgaggtgtctccaccatgacgtcccctttcccccttttccacactgtcctccctggcaggatggcaccatatgcagcccacaccgggtgtgggggtagttatggtcccctcatcaagggggcttatctatatacgtcattcagaattctttttttttttaagatggaatcttgctccgtcgcccgggctggagtgcagtggcacaacctcggctcactgcagcctccgcctctgggttcaagcgattctttttcctcagcctcccgagtagctgggattacaggcgtgcgccaccacacccaactaatttttgtatttttagtcgagacagagtttcgccatgtcggccatgctggtctcaaactcctgacctcgtgatccgccctcctcggccccccgaagtgctgggattacaagcgtgagccactgcgcccggcctggaattcttctgtgtagatttgtctcttccttgcgttaattctgttaccccgtcattgatatcactgtagactcatgggtgctgattttacacgctggttgtaattcgtcactgctttaatttcttggtcaccccgtcccagtctggccactgggagctgtcctttgccctggctccttcaacaccccttcttcggtgctttcgttgttgctcttgtgagtttctgatcactttctcacattcgggcactgcacgatgctgcaggctcaccccgtgtgtttccttacccagccctagaactggccatttctccaaggagccctggtttctttgttaggaggatggtgttagacactgagctctgggtcccattgtgctccttgctctggggggacagtgatctttttaaagtacgaagcccatggtgtcactgccggcttaagactcttagcttttcctgtcactttgtttgctcagcttaacgtgttttccgtgcacctgctctgtgcactgccggtgggcgtgtgaattgacaggcctcctttggaggctgtttctctgggtttactgaagtggcacagtccacaccgagaggggcagaggccgctgacatctggagctgtcctggctctgctggccgggcctcagtgttcccttgtggaccacacatgatttacccgtgtcatacacaggcaggacagatcacgatgaaacaaagccaccacacgtggcagctgcaggacctgtggcctgtctccgtggtcaggacttccggggaaggggacggaagtcactgcagggctctggaatacagaacccggggctctggggggaagagctgtccatggtgctggccctgggtcgggggctggtgcactgacccatgcctggatcagaggctgagctgttggctgtagatggtgcgaggtcaatggctgatagctgtgtacacaactagctggagctcccgaggggctaagagtgagccatgcatgttcgtgtcccgagagtggagaagggcgccaggcatcagatggcgtttggtgtgtggctgttgagtgaataagcaacatgctttatttcctgtgctacgaaagtgtcagcccacagccctatttctcagccctccattttcagcaaaactcaaactcactcactccctgccgtctgcaggcctcccctccagttctcccaaaacccgctggagctggaatctgccccacctgccccaaagatgccttggggcgggcccctccctgtggctgtgctctgttcccagccttccttggcctcgacctatggcagggtctgacactcctgatccccaacccccttccccgtgcctgctccatggcctccttggcggatcctcctcgtctctgactctgactctgccgtgctggggctctttcacctcccgctccacccacacgctggtgatctcatggttcaaataccacctatatggcagcgactcccaattcctgtctccagctgggacctgtttcccacattccaggcttttccgtccaccctccgactcgacattgccactcgagtgtctcagttccgcaggttcaaatgcgagtcctgatgcccccatgctggccccgcctgaaggcccctgcctgtgcccacctctgagctccctcgggggccccttccctcgtgcctgtgaccgtcaggtgttctcttggctctaccctctgaagggccccctgtgccctggctccttctgcgtccccggagcaggctctgccccagctctggtagggcttcctcggggctgtccccacccccattccccaggcagtggctggtgtggcccagtctgctggacctcccacctgctgggctcctggctctgttcttcaggccgaggctcaccacgtgcctggctgtgtgatctccccacccccactctggccctgcctgccctgcgttccctctgctgtagccggcctgactgctgcttcttaaaagagctctgcccacggcaccctccgtgtgcctggccggctgccttgctcccctggcccagtctgggtggcagacgctctgcagtaacgcccaccccaagccagtggctaaggatgacagggccttcattctgccgcctgccctgtgtccccatgagtccaagggagggcttggctcactgtcacactggcctgtgtgaaggtgcagccaccaggggctggagtgggagaaggagtgttctgagatgtcttttgctggcgaagaattgccttccctggcctgagagtggctcacagcttgctggccaggacagtcgcttggccctgggccatctcagagccaggaggggagcccgccaggcgccaggcctgggtggagggaccgtgagagtagcgatggccactccatcctcctctcagccaggcccactctaagtcctgccccagccccctggccccaggcctctcttggctcttccccagcgctgccctccccgcacgcatgcacgcgctgcactgaccgccccgcacgtgccgtgctccccgcttgctgatgtttgccgttcgctgctcacctctgggtcagcctcttgccctgcacgttgcgtggggcaggtttcatctccttggctcagtcttgtgtcctgagtgacttgcagcactggagcaggtgagcacccaccgagtcaggaggaggacgtctgcatggggaagggaggggggagggaccagggagggaccggcagcgggtcgtcgcggggcttgggtgccatctccagagggtgagaggttggcaatctgatgccctccctcacacctttcttatagaagagctccaggggatggtgtcagccaggcctctgagagtggcttcccagggtctggtgtctttttttcgataattccagggcctgctttgggtgggggtcttgcgttgggtgcccctcagagcacctgggctggcaccgggaatctgtggattagcctgtatgggtatgagcacaagcatgggagtgcatgaatatggaagcatgtgtgcaagcatgaatatatgaatgtgtgtgcatgagcatgtgagtgtgtgcatgcgtgtgcatgtatgcatgtgtttatgtgtgcctgagcatgtgtgaatgtgtgtgcatgcatgaattgtttacgtgtgtatgagtgtgtggatgaatccgtcagactgagtgtggatgagtgtgtgactgggtgagagagtgtgggtatcaatatgcatgtggtgagtgtgtgagcattgagtgcccggatggagaggccgaggccgatacccaggcccttggtggcagtgaggggaccctgtctggctgacgcatggtcctgggggtgcttgtgagggctgggcttgggctcctgggctcagagtgtgctgcactggctgtctactcctcgtggaggtgcttatgttggcactggatgtccagggtggcagtctgcctccaatgtccttgctcttcttgactttagagagtagctgaagtgttgaggcccagtgctgactggggtctgaggccagtcctgggaggtgctcagtccctgtaggagccttgggcccctgcaggggaagcctccaggtctagagaggtcagtgcaacggtgggaagtgaaggctgggccgtatgtggacctcactgcaatgctcttcttccccgctccccactggtgtctgagaggggagacacaccacctctcgctgtcagcatcaggcttgccagggcaggaggttaggaatggccatcttgtgcacacaggtggacatggaggccatgtggtctgtgtccttcagctctgcagcctgagggtcttcagtgcaggacggcaggcaggtcagagctagggtgggggggatggggtctctgggacctgaaggttctctctcgaggcctgtttcatgagccccatggctctgcttgaagcctggcatagctcagcctcagcgttcatacaggagtctggatgcgtgaaggatggtacctggtgtgattctaaactcagacttgcagaggggcactctggaaggctccaggcccaactccattgggcgggctggcatctcgtgggcacagcccttcttcccactaggtggcctgggctctgcaggtgaccgtgcctctaggctttctttggcacagcttgaccatggacttctttcttccaaggccacgaggaggtgtccacagggctcctgggtcctcagaaagcagagcctcatcctcacaaggatgacatacatctcagatcgagaacatccaaggggacagggtcacccacagccagtggagcctgtccttcctgtggacctgtgtggcctgtccaggggcccagtgcagtggatcgcaggaaacctgtgccaaaatgaactcacattcctttaattaagaaacggcaatgctccagagagcgcaagccagctcagccaccgccgagctaattggaaggttcagaaaatttccattaattacatttgccctccggtggtttcttctcttctatgtgcagtggctgtgttgattttgtgttttcaacatacaaacagtgaggtcccacagccatgagggctgttatcgaatgcaggagagagccggaagggaggcaggggagagccaaggcagcggaagccggtggaagactggctgtgcctctcctgccgtgtttcccttgggttgccctggatgtggccctgggtgtggtgggtctggatgggtatccctggacatggtggccctgggcttggtgggtctgggtgtggtggccctggttgggtgccctcgagcatggtagccctgggcatgatggccctggatgtggtggccttgggtatgatggccctggatgtggtggccctgtgaacagcagtagagccttgggccctcagggcagcaatgtccagcgccccagggctgtggtcagggggatgcctcaggacacagcatgctggacactggcttggtcttggcatcttcctgggtagtcctggggaccttagcttcttaggggtctcttggaatccatcctcataaacgtcagaacagtcagatgatctggccaagaggatctggctttgagtttggagatgtcactctcctatgagcgtgcatgcatacacacatgtgcacagtaatcgcatcctctctaggtgctacctgctgcaagaacacgtttctgtctgttgctgagaaagccatgtgggcaggggccgggttatgttcgctctggactccatatggtcttgcacatgtaagtgctcaataaatgcttagatttaacttaactgggtagaaagagaaagtgaatgagtcaatgtggaagggagctgggcacatggaggttgggcgttttgaccatgagtgttgcacaaagctgtgtctcccttagggagtgtactgcggtgtccagcggggaggcatggcccagccctgctctcctttctggctgggtcccggggttcttcttggggtctatggtggaggcatctgctggccatagggtggccggctggtatcttggagacacagcagaatctctttggcaggtgtggccaaatcggattgctgttggatgaccatacggttttcaagaaaattatgcatctgaggttggcaaataatgggcatttccaaacgtgatgtgataagttttgatattaggaacatttgcattttcctgatgactgatgatattcacgactctttcatgtgcttattgaacattggagtggaccgaatgtttgtgtccccacccacatacatatgttgagatccaccctccagagtgacagtattaggacctagggcctttgggaggtacttaggtgataagggtggaacccttttgaaggggattaatgcctttataacaagggaccccagagggctctgtcaccacctttctaccctgtgagaacatggagagaagacagctgtttaggagccgagaagtgggccctcaccagacactgagtcttccggtgctttgatcttacacttcccagcctttacagctgtaagaaataaatctctgttgtttgaggaatcaggtctatggcaatctgttatagtagcctgaactgactgagacagtcatttgtgtggcttactttgtgaagtgtctgtgcaattctttagcccatttatgtgtgtgttttattaagttgtaggagtttaacgattctgtattcaagtcctttggtggacagatgcactgtgttttcttccagtttatggctcaaccattcattttctcagcggtctcttttgatgagtagtctgtgtctcctctaagaaatcgttgtctatcctaaagtcaagtttaggtctaagatacatttaaaattaatttttgtgcacagtgtgaaatgggggtagaggttcatttttccatgtggatatccatttactccagcatcattcattgaagagacttagctttccccattggattaccttcgtgcttttgtcaaaaaccagtatgtttgggtctatttttttttatctttcttgttgccagtaacacactgtcttgattattgtagctttatagtaaatctttaaatgagatttttatgtccaccaacttagttcatttcccaaaattgtttcagcaattgtggatcctctgtatttccatatgaattttgaatataaacttgtcaatttatatgtacagaagcctgccaagatgttgattcagactgtgttagaaatataactcagttttagggaggctggacatcttaataataattagtttttcaatccatgaacatggtacatctctccatttattgaggtcttctttaatttctctcagcatgggttgccattttcagtatacaagtcttgtacatctgttaaatttatccccaagtaatttttgttttatgctactgtaactggcattattttagttgtatttaaaaatttttattgctggtgcataggaatatgtttaatttttaatatcagttttattgaagtctaatttacataaaattcacacattttaaggttgagatttaatgagttttgacaaaggcatacagtcacctaaccactactgcaataaagatgtagaatatgtctgtcacctcagaaagctcgcccttgaccctttacaggaagtccagctctgggctggagttggctacactggctcacaggagccaattctgcatctttgtctcattcctctttagttcttaatggtggttttggagaaagaagttttaaatgttgatgaagttcagtatatcatcaatttcttcctttatggtttgttctttttgtgttctttctaagaaatcttcgaccagcgcttgatcacaaggattttttcctgtgttttcttctagaagttttatagctgttaatttttgtgtttcacatgcggtgagggttgaggatttttttcccctcttcttccctccctcactcttctcctttttataatctggatgtttttatggtccagcactatttgctgaaatgactaccctttcctcattgtattaccttgacacctttttttttgggctgggggaagagcttataattgtgggtttattcctgaacattattcttttctgttgacctgtatggccgtctttaccccagttcaacactatttattactgtagctttataagtcttggaagcaaaaccccagttttgttctttctcaaaattattttggctactcagattatttgctcttttatcccagcttgtaaatttctgctactcattagtattatttgtactcttctggaggagagactcattgggattgcactgaaactatagatcaattcagggagaatggatctcttaaaaattgaggatttttggccaggcgcagtggctcatgcctgtaatcccagtactttgggaggctgaggcaggtggatcacctgaggtcaggagtttgagaccagcctggccaacatggtgaaaccccgtctctactaaaaatcacaaaaattagccggacatggtggtgcacgtctgtcatcccagctacttgggaggctgaggcagaagaatcacttgaacccgggaggtggaggttgcagtgagccgagatcacgccactgcactctagcctgttttgactgagtctcgctctgtcgcccaggctggagagtacagtggcacgatctcggctcactgtagcctccactcccgggttcaagtgattctcttgcctcagcctcccaagtaggtgggattacagactcacaccaccacgctcagctaatttttgtatttttagtagagacggggtttcaccatgttggccaggctggtcttgaactcctgacctagtgatccgcctcccttggcctcccaaagtgctgggattacaggtgtgagccaccgtgcctggccaaaaattgattttttaaatctatgaatctgtggcagttgggacattttattttggtcgtctttaatttttctcagcaccgtttcctagctttcagtgtgcaaatgttgcagatattttgttaaatttatccccacatattttatgttttttaaaaaatgaaatctattgcttatattgtctttgtattctccagccttgcttaaactcactcagaacttccattatcatatttttagattcttgagggtttctcaaatcatttgcgaataaagacaatttcgctgctttcttttaaaactttctgcctcattgcactctctgggatctccagcacaatgagtagaagtgagagcagacatccttgctgttttctggtcttagggggaagcagtcaacattttattatttactgtaatgttggctgagccttgtcatgtgtgctttttatcaggtagaggaaatctccttctcctcttagtttgctgagttttttatatttttaattattaacagttgttgaattttgtcaaatgctttttcttctgtatttgtggacgtgatgatttttcctcctttattttgtttgtgtaataagttacattgacttttgaatattataccaacctttcatttctagatttgtttttatgtgttcctgaattcagttttccaatatttcattaataatttttacatctgtgttcattagggatattggcctgtgttttctttcctgcagtgtccttgtctggttttgacatcaggcatgtgctggcctcacaaaatgagttgagcggtgttctcttctcaattttctggaaaagtttgtgtaaggttggtggtgtttttccattaaatgttttctaacattcaccagtggtgctgtttgaccctggagttttctttgtgtgaagattttaataatgagctcaatttctttaggagataaaggattattcagatcttccatctcttttgtgttagttttgataatttgtgtctttcaaggaatgagttttgtccatttcatctaagctgttgagtttgttgcatgaagttgtattattttcctttttttttttttgagacagagtctcgctccgtcacccaggctggagtgcagtggctcagtctcggctcactgcgagctccacttcccgggttcacgccattctcctgcctcagcctcccgagtagctgggatgacaggcgcccgccaccaagcctggctgattttttgtgcttttttagtagagatgggatttcactgtgttagccaggatggtcatctccatctcctgacctcatgatctgcccgcctcggcctcccaaagtgctgggcttacacgcgtgagccaccgcgactggccaatattttccttttaatgtctgtagtgattccgcccttttattcctcacattagtgttttgcgttttgttccttgtctataatagaggggaatgatgcaatctatcgctatgtctgttggttagtctgttccttcctttcattttgtctatttttgctccacatattttgggttgttgttgggtgcattcacatttagggttggtatctttctgatgattaaaccttttaggaaatgttcctctgcacattggtcaaatatcccttgtttgaaatgtgctttgatgtagtcacctaactgtatgatcagtgttttcatgatgtatcattttccacccttttcctttttaacctgtgtctttaaataggaagtacatcttttacaaatatatagtggtgtcttgcttttaaaaatacagtctgaaaatatctgctctttaattggaatgttagcgtcattattgatatggttttccttgagtctacagtgttgctaattttctctgtgtttccatctgttaattgtttatcatcagtctcccagggtgagaatatagactcctgagggtggggacgttgagctctttgtggagctccacaggcaggtgtgggaatgtgttctgggttcatgcctggtctttgggcaggtgtgggaatgtgttctgggttcatgcctggtctttgggcagacgtgggaatgtgttccgggttcatgcctggtctttgggcagacgtgggaatgtgttccgggttcatgcctggtctttgggcagacgtgggaatgtgttccgggttcatgcctggtctttggacagacgtgggaatgtgttccgggttcatgcctggtctttgggcagacgtgggaatgtgttccgggttcatgcctggtctttgggcagacgtgggaatgtgttctgggttcatgcctggtctttggacagacgtgggaatgtgttctgggttcatgcctggtctttgggcagatgtgggaatgtgttctgggttcatgcctggtctttgggcagacgtgggaatgtgttctgggttcatgcctggtctttgggcagacgtgggaatgtgttctgggttcatgcctggtctttgggcacgtgtgagaatgtgttctgggttcatgcctggtctttgggcagatgtgggaatgtgttctgggttcatgcctggtctttgggcagatgtgggaatgtgttctgggttcatgcctggtctttgggcaggtggttcccagggctgcagctctgttcgtctgaggggaaaggcccatgcagtcgatgctactgggggctctgtgggtgtcatgggtgctcagagtccctgtggagcctcatgggttgaatctgctgccctcccaacctcacctgccctcccaacctcacctgccctcccaacctcacctgcccccccaacctcacctgcccctgcaacctcacctgcccccccaacctcacctgccccccccaacctcacctgttccccccaacctcacctgcccccccaacctcacctgcccccccaacctcacctgccccccccaacctcacctgcccctgttctccaccttgatgccacctcctactctgcccgtttcctgcggggcttcccatggggcccggcaagccgctgcggaccctgcagacctcaggcacgggtggatgcggggcttgtggtcggcgtctgctcttcaccaccatcctcctgtggtccacgtgccctttcagttggccagctctgctcatggttggtcagaggctgtgggatgcgcttaaaagcctcagcagcaagtcctggaatttggagagtctgtgacagagaagggcacattccgtggccagacaggttttgattctgtgccatctgtgtacttgcctctgaccatcaggtgggggctgcacccgtcttctcctttggttcccctggactttggatggggcggggctggactcagggaggcctcctgggcagtctggggtggctcttcccagcagagcgtggggagaagtggagccacagccagccatgggggcggaggaggaggcagcagctgtgtttctcagtctcaggcgcagcggagtcggacgtgtatggcaccacgtgttccctcctcttagtgctggggtcatctccatgacagcccgcggcctctccctcctcctctcttcagctctgcagatgctggaccctcaggtgttccccaaaaccgggcccagacctgctgcaacttgcaggtcacaaaccacccccttcactggccttctgtgccgaggaagatgggcggcctggagggaatctgcctttctagaggctggagccctccccactgcccatctgtctgggagcctggtccccatgacaccctcctcccagtgagtgcatccaggactctgcctccgctggtcgcacggtgaggggggcgtggctgccgctggaccttcgcagcctcgtctgcgttctgccaacgccttcacagcctgtttgctccgctcagatttcacagggcgggttgtgccattttttcttgtaacttacccgtgttacagtcatccccaaagccactgatcagcgtgttgctctgtgctgaaaacgttttgctggggtgtcttcagtagcgctcacagagctgagatagcatagaggactggcgcagtccctggggcctggggcctcggccggcctcccggctgggtcttggccatcgtggccctgaggtgcacacgcctctccctgctctgtctggtcactggattcttctctgctgcccccgggttggctgcatggagtggggtccgccttggtggaccttttgtggtcaggacccctgggaatgtgattggtgcagcctcggcctgagaacgcagcagggccagcctccccgaccccagcctcagaggggctgtgacaggaaatgacaacaccccccaccgcctcctgaccagcagagttgctgtagcctgtgctgtgttttctccagagaaaccacttacttcttcccttcgctccagcagctaatagggtgcagcagtcacttctggccggttccccagaggagtggctgctggtggctaagatgtttaactggtggccccagcctactcagacagctgggtgatcggatgctttgtgtcggcttccttaatggcaagctgacttcgtcgtcgttgttattattattttgttgttatttcttgtttcaagttggggtttcagtgtagtgtttagtatgtcacttcccctggtgaagccatggctgtgggttaaataagtgaactgcagaaggacaggcgcaggtacaggtgggcacaggcacaggtgggcgcaggcacaggtgggcgcaggcacaggtgggcgcaggtacaggtgggcgcaggcacaggtgggtgcaggtacaggtgggcgcaggcacaggtgggtagctgacgcctggcactgccctcttcatcagccaccagaaaactgcaggaaaccacccaggagctgtctcagagaggactttattccagttccagcagcgactctggacggcctggggaagctggcgcagctggcagggcgtgtggcagggatgggcgctgtgagagccggggtgggcggctgcgaagcctctcgggcgtggtgcgggctggttggcgcaccttggtcctgcactgggcattttcagcacatccgctcttcccaagtgtagcgtggctgctgagtgttacacaatgtagcgcctccccgcccagcacctgtcgcccccacccccggagcggctgggctgctgcctggccagctggcggctctgcctccaggccgggatcagggaggcgcctccctctgaatgtcggcgctcagcagggacgctgctctgagagtggcagcggacagcatggggagagtggcccctgtgaacaggctcccgtctgaggagctctcttccccccagaccccaccatcctggttgggctgaaatagccatcgtcagagaagttgccccgcggcctcagcaccatgtctgatctcccacccgggcttctcccaaggtggagcaggtttctgtgggtcctggaaccaaagcagaggggcctgcaggtgccgggagggaatctgtcttttcgtctcccggggacctgcacaaaccacccgaccggcccagggggatactccctgtccgcaacagtgctttccaaccggagcccttttctgatagaagatttctgatagaagattttcaaagacagtatttcttgagctgggcttcatgaacatactctttgggctatgtgagaatgtttttttcctttaaaaaaagacaatcatattaagcttggaatacactggtccaggcccactaagacgtgagctggcaaaatggctttcttttacccagcaggagcgggcccggtaaggtacgttaggaatagctggggcactgtctgttttatgttgtatttaacaggcttttgttttttaataaacagagaggcccaaagaaggaaacagaaaagaacccataatctcacacccagataacccctattgccaacaaaaatagttcaagtagaaggttcaaacacggacatagtctagagaagcaaaagatggggcctgaaggtcactctgtctatgcacctgtgtgtgtgtgtgtgtgtgtgtgtgtgtgtgtgtccacgaggatcacgtgtgtgtgtttaaagataggtcttgctctgttgtccaggatggagtgcagtggcatgatcatggagtgcagtgccatgatcacagaatgtagttgcatgatcacagagtgcaggggtgtgatcacggagtgcagggacgtgatcacggagtgcaggggcgtgatcacggagtgcaggggcgtgatcatggaatggaggcctcagcgtagtcagggagtgcagtggcgtgatcatggagtgcaggggcatggtcacaggatgcaggggcgtggtcacggagtgcaggggcgtggtcacggcatggaggcctcagtgtgatcacggagtgcagggacatggtcatggagcgcaggtggtgtgatcacggggtgcagtggcgtgatcacagagtggaggcctcagtgatcatggaatgcaagggtgtgatcaccgagtgcaggggtgtgatcagggagtggaggttcatgatcacggagtggaggtgcgtgatcacggagtggagtgtggtgatcatggagtggagtgtcgtgatcacggagtgcaggggcgtggtcacagagtggagtggcgtgatcacagggtgcaggggcgtggtcacggggtgcaggggcgtggtcacggtgtggaggcctcagcgtgatcacggagtgcagggacatggtcatggagcacaggtggcatgatcacggagtgcaggggcgtgatcatggggtgcagtggcgtgatcacggagtgcagtggtgtgatcagggggtggaggtgcgtgatcacggggtggagtgtcgtgatcacggagtgcaggggcatggtcacggagtggaggcctcagcatagtcagggagtgcagtggcatgatcatggagtgcaggggcgtggtcacggggtgcaggggcgtggtcacggggtgcaggggcgtggtcacggtgtggaggcctcagcgtgatcacagagtgcagggacatggtcatggagcgcaggtggcgtggtcacggagtgcaggggcgtgatcacagagtgcaggggcgtgatcacagagtggaggcctcagagtgatcacggaatgcaggggtgtgatcaccgagtgcaggggcatgatcatggagtgcagtggtgtgatcagggagtggagtgtcctgatcatggagtgcaggggcgtggtcacagagtgcaggggcgtggtcacggggtgcaggggcgtggtcacggggtgcaggggcgtggtcacggtgtggaggcctcagcgtgatcacggagtgtaggggcatggtcatggagcacaggtggcgtgatcacagagtgcaggggcgtgatgatggggtgcagtggcgtgatcacagagtggaggcctcagagtgatcatggaatgcaggggtgtgatcaccgagtacaggggcgtgatcacggagtgcagtggtgtgatcacggagtgcagtggtgtgatcagggagtggagtgtcgtgatcacggagtggagtgtcgtgatcacggagtgcagtggcttgatcatggaggagtggcatgatcagggagtggagtggcatgattacagagtgcaggggcgtgaacatggagtgcgggtgggcatgatcatggctcattgcagccttgacctcctgtgctctggccatccccctgccacagccccccaaagtgctgggatgacaggtgtgagccactgcacctggtcacatgtgtatgtctttacacacatgcatgtacttgtcacgtagagtctgtcatttacatgaagaggagtgttgtgtgcagagtgttctggactcctgcaaaggctttatgttgtctctttgggatatgttcttatcagcacgccgctccacctagtttgtaacgtctgcacgagagtccgtgttatggccgtaacatggtcatgtcacctcgcctgttatggacacgggtagcccagggctttttgttcttacacttcagtcgtgaaagtcactgcacatcggtcttgatgaatttttgtgggcttgctgactgtggaacttcacagttgcaatcattactgtgttaaactgggtgcagctggactattgatcactgttgctaattgcttctagaagggctgggccacttatatgccccgtcccccgccccctgcatggtatatgggcaactggcactggctgtattcaagacaaagggcatctccttgctattttggcttggattgttaaatggggactgaggcagggcagtctcgggtctgacacactcttgtaccatgagtggccctcgtggcctctgccccgtctcctgttgggttggttttctcaataatctgtataagttccttgtaagaaaagtagccccttgtttgtcatatgtattgcaaatgctttttctcagtttgtagtattttgaatttttttttttttttttttttgagacagtctcgctctgtcgcccaggctggagtgcagtggcgcgatctcggctcactgcaagctccgcctcccgggttcatgccattctcccgcccagcctcctgagcagctgggagtacaggcgcctgccaccacgcccggctaattttttctatttttagtagagatggggtttcaccgtgttagccaggatggtcttgatctcctgacttcgtgatccacccgcctcagcctctcaaagtgctgggattacaggcgtgagccaccgcgcccggccggtattttgattttttaaaaactgtgtttattgttatctatgcagaagctttgcatttttgtagcgttctgtgtatcttcctggtcaagagccctttccctgtagcttctgcagtctttgtcttccttggagaggcctctcttgctgcaggattacagagaaattcactggtgaatttttgtttttagaactcacggaggcatggcatgtgcggggcatggcatgtgtgggtctttgctgggtttgtagtttcttctgtcactggacatgaggtggggatctagtgtctccaggtctctttcctgaccccacagagtgatggtggagctgctctgagagccaagtcagagggcagagtctgcagagaggggtgtgagcaatgggttcccagggggtcttcatggtaaggagtctattcctaagctgccccctcaagaccacccccacctctccctggagggaactggggaggaactccgaagccttgctttgccactgctgccttctgccatcaacaggatgttcatgtgattttatcgtgatttgggagatgaagaaagaccctctcccaggtgagccagagtgcaggctggccctgcaccgagacagccaatgaaggagaggtcgggagggtgtgtcgggccccgggtgagaagccaggttcctgcagcctgaaggcagaggtttggaaaggagcatgtgtgcatgtgtgtgtgcacttgtctgtgcaagggactcagaagagacaccctgctccccacaatgctttgccccgaccagcttgggtcaaggtcgaataaagtcccctgcaggcctgggatgttgcctgcagctgtcccaaaggctgccgctgtcccaaaggcagttgcaaagcaaggctctggactccttgccgattccctgcagggccacgggcaggcaggtgattggccactgagctctcagtgagctccagctgccatccagcaaggcggtgggcacagaactgcagccgggggccaggctggctctctgggttcctgagaaggaaactggtcagtggataggaagggcagcatgccatgtttctggatgttcagggccctggtgtggtcccagcctcctcagcctggccacctccccgcacaggaatggtgggctggagcccagttttgtggccgtctctgtgctgcaacttgggaagtccaggtgctggtgtcctccctggctctctctccagcggctctcgtggagggccctgactcccttcggcccgtcttcggtggttttgatggtcctggccaagacacgcagcccagaatccacaaacttgtgcatccatgggaaggcagactgctggccctgctcggctcttctgactcttatttttggagacataaaagagaacagagtcttacactctgtctagaaataatgcctttccttacttcaattcagttggtcaaaaataagcacatccctttcccagggtgataatccaatcctttgagctggaaggaggaatggaggaggggaggctgggctggggagggacaggaacagaggccgttcagtgagcccagatggggcgcagccacggcctcgagccctggggagccatagcctgcatctgacctggactcttggggaccgtgggccacgctggggtaacggaggaaaccttgggagaagatacattgggtttttttttttttgaggcagggtcttgctctgtcaccaggctggactgcagtggcacaatcatagctcactgaagctttgagctcctgggctcaagcaatcctcccgccccagtctcctgagtagctgggactataggtgtgtgccatcatgtccagctaattaaaaactttttttttttcagagatgggggtcttgctgtgttatccaggctggtctcacactcctggccacaagcagtcctcccgccttggcttcccaaagtgctgggatgacaggcgtgagccgccgtgcctcgccccttttgtgctctgagtgtatcgggtggatgcagatgctctgagtgcctgtggtgatgtccttcttggcattcacaggtgcacaggaccacatttagacaccgtgtagctggcacaggtgctgaccctgaccctgttccagtgcccagtgccaggaggtctgtgggatggctggtgtctgtaggatcacgcgcctgatgccagccgatcccagacttggcgtggtggcatctcatcactctgctgaaagctcacttttctgcatcttcccttgaaaatggtttttctgctgcggtcatgctgttttctgtgtttcgctgtgggtccaccttctgatttgtgtggactcgaaaattgctgaccgaaaagctggtccaaaagctgggccccagaattacctccaggctcatctcatgatgagggaagcctcgcatgtgggtctggcgtcaccgggtggcagcctggtggtgtggcggcttgggggtcttccatcctcgcgggccttcactgtgaccgttccgcatgccagggtggaaggcagccaccacttgcggggtggggggctgaggtttcctaggcagagggggttttcctgtacagtctcctgcccgacacaggcctgggtgtctgcttctcagagatgccaggaggtggggagaaaagaggggcaggaagaacatggagctgctgaggaggtttccgctgaaggctgtagtttctctaatggaaggggacgtttgaagggatttcccaggaaggcagaccctggagcctgagagaaggtggtgtgggaagcccatgggcccaggtcctcatccctgcggcatgatgcgtcagtgacggtgggtggctctgcactgcgctggcccctggccactggccccgtggcctggctgtgctgtgaccctgcattgcagtgacacgtcggcggagtggccagaaggaagagcgggcactgagactcggaggtgattctggagcaaaatcctaggatgtcctgggctctcttattgcttggattccaggaaagggacctgattctcatcctacgtccatggcacgacatctagatgtttccaaggccaggatggctgcctccaagggcaggtggggcagattcatcccagacccctggaccttccctcggcctcttgcacctgccagccttgctactgttgctgactcaccatcttccccgggggtcccagcacccacccccaccagcggccctgtggggctgtctgtgagtagccatggggcctggtggggcagcactgcccagagacatggtgggcacgggtacggggatgccggacctcccatggctgctgtcagggctgaggccagacgggctgatgggccagatggcagcaccagggacagtacctgctgcctgggccccctgggtgcttccaggaggaacttggttcctcggccctgggggacaccgtgaaccacacactgggcctgctgtgccatggtgctgggccctcagaagctggggctggcacagggttctcggtccctgtcccggctgtcaccttccatgttgtcccctctctggagctggggcaccctccagggagtggaagaacagggtggatttaaggctctcactgaaggagtcctgggagtgactcagccttgccacgtccctgggtgaggaggcgcctgctggctgcctgtgcggcggagcgacaggtgacttgggggtggaggtggccgactgccgaggaggctttggactcggggacatctcggggccctccgaggcctggttcccgtggattttgaggtttgcgctcagccgggtttattctgcagacaggcccacgcctgagggaccagtgcagcctgaggatccggcgtccgtggctcctggtgggctgagggcaggggaggctctgcggccaggccctgttagattcccaagcctcaggtgaatgtcagcgggcggtgcagcctccacagcctggtacgaggttttgtcactgcacatttcctgcaaaacaactgtgaacagttgtcaatcttcatatattgacctcccatcaaacacatacgaaaatttctctgtgaagaagtgtccaaaataaaaccgtgcacttaccatgagataggatttaaaacagccgcctttccctagcaatggtgtgttgcttctgttgacccacatttggtgtgggatgggcatttgattcagacgccacattaccctcgtgtgagtcctgaatccgggcgcagctgttggctgctccccaggccctaggacaggaggagccagcctctccgctgagtcccagtgtggccacacccagcgtggatggtgcttgctgtctggtcccgtcctgagcaatgaccccgcaggcatctgcagactgatgcattctccttgtaggttgcatttccagccccaacccctgcacctcagcttgcttcacctcgcaaatgtttaagtcgatgtgcacctcccacaacttgcggatcttatggaaaaagagagcagagcccagggtcacaccaggaatcagctgagaagtcagaagcgcagttggcagcccaggcccagtcagtatggggctggggtcagcacacgcatagtgggctcttatgatctttcacttagatccactctcattcattcactcactgtgcgttcattcactcattcactcatctctcatttgctcacctcattcactcaccatgcattcattcacttaccatgtgttcattcactcactgcattcattcactgtgcattcattcactcaccgtgtgttcattctcatctactcgttcatttactcattcatctcatttactcatttgctaactccactcatttgttaactccttcactcattcagtaactccactcattcagtaactccttcactcattcagtaaccatgtattcattcactcaccatgtgttcattcgctcattcatctcatttactcatttgctaactccccattcactaactcattatcattaaccgtgcattcgttcactcactcaccattcactcactgtgttttcattcactcatctactgattcattcactcattcattcactcaacagggctttgttgagaacagatctggaggaggtactgcagtgatatctccctgagccccacagacacctgcagttgccccaccctagagctgcagggacttagagcccgttcacaggacctttagggctgagcagcttcctttcttgactgggggctgccctcttggtggggtcgcttagtgagcacagaaagctctatcagatgccccgtcagcctattcaaagcagtggaaaggctgagtggattggaactgatttgtgtgaagctaagtaaatgtataggatgttaacaaacaaatactgttgaggggggcagcaaggaaaaaaatgatgtgggcaattgcagtcttcattggggtgaaatcttggtgaaaacgacacactaaatagggatatggtgagcccagggtgcaaagcgtgcggctctggggaagagggctccgggcagagggagctgttggtgcacaggccgcatggtgggctcactgggctgcttcagagagcgcagcagagtcaggcacagggagggtggaggagccgaggccagaggggtctggggctgggtcctggacggcttgctggcagccggaaggacatgggctattacttgagagaaatgggagtgtggagcctttgagcagagcggggcttgacatgtttgtttcaaaaggacgacgcctgcagctttgttgagaatagattctagggcgagggtggaggcggggagaccaggctgttgcaggaatccaggcgggagtggacggtggccagaagcagaggaggggcaagatgcggtcggagtctgggaacgcttgaaggaagagcctgcaggatttcccgacagacgggctggggtgtgagacagagaggagtcgagcccatgccaaggcttcaggccgagcatccggatgagctgttggtaactggggctgtggcagtgtgagctagggagctgggttgagggcacgttagatttgggttgtgggtttcagacattgtattcatttgctcgggttgttcgtgggtggcgtaaacaacagccgcttgcactctcacagatccggaggctggaagtccgagaccacgcgccggcagggttggctgcctctgaggcctggctccttggctcgtgggcagcgtcctcacgtggccattcctctgtgggtgtctccgtcctgatcttttctgtgaggacacggtccagtgggattgggcccacccacgtgaccttgcttcaccttaaccaactctttgaagatctcatctccacacacagccacgctcggaggcacgaggggtcagggcctcagcttaggacttcgggggcacagcacagcccacgacacacctaccctgccggggcttgcaggcacacctggtctgtcctttccccatttcagctgagctggagagaagctagacatgcattcagggtaggggccttgccccgccagcacacacacaaacatgaggaggtccgggcgtccgggcactgagcagtggtgttgtcactgaggcagccccagtgctgcctgggaaggggcagggccgtggctctgagcacagtgtgcccaggaggccgcaggagtctctggaaaactcagactccagatccccacccacacctggaaattttgttctgtaggtgtggggtgtcggggagggcgcgagtctggggtcaggaacgggtgatcccaggtcactccgatgtgtgctttggccaccttagggaaacaccaccgtggtttttcagtggtgggggctggatccgtggttgcaggtcttaccagctctcccagccggacatgaccgtgtcatgctgacgccacggccaccttcttcccaccctgagtgctgtgtgtggggtcagatttggccacaatggacgggacaacatctttctgtgtgaggccaggtgtggggccagcctcaggtgcccagtgaggcagggcgtgggcacagcacgggcccacactgttgggacaaggagctgggggctctgggaacgtggcctctgttctgaccctccatgctattcttgcagctctctgcctgggtctcttgccaggtgtgctggttttttcctgagtgccaggggcctgggaaccgttgctgtagggctgcctgctttacagatggggtgtatgggccactgccacgtggaggccgaagctggctggaagtgcctgagcccagggacactcttctggatgccacagtccccagccatgggtcaggggtgccggctgctgaatggaaggccccggttaggacactcctcaccccctgtatttctatctgataatggagccctagtcatttgcgtctttgagtcactttgggggtgccaccctccttgcaccccatctgactgtggttcagaacccccttggtctcacccctggctcctcccttaggacagatcaccccctctgattggtgggaggtgaggccccaccccattgccctacccttattggctgttgctctggaggggggctgcatccttctggtcctgcttctgccctgggccacaggtgggtcctcaccaggtgtgttgatggatgcttccaggatgggaagaagccctgggccactccgcagcctcaccgtggccaggatggagctctgagtccagggtgatgtgcagggctcgctgtggttctctttgggctgcctgtgggttctctgctggttacagacgcagagggagggaggggtgtctggttggtacccccaggccattctgcaaggcagcactagcaaataaggccatgggttcatatccggcaggccggggagcaggcgtgggactccaagggaagaggccatgctgggtcctggggttgccgtaactcacggccataccctgcggttcccacagtgcacattcactctcagttccagaggctggcagggccacctgccctccagaagtgccgtggagggtttgctctcgccaattccagcttccagaggtcactcccctgcagccatggctcatgacccctgcatctgcaaggccagcggcgtgggcccgtgcttcacttgtggtatcaccttccctggtagcagtgtctccctgcaaggatggctgtgagcagttagggcccacctggataattcaggagtcccaccctctcaagattgttcactcagtcacatctgccaaatcctttttgccacataaggtgaatcacaggtccggggactggggcctggacatccctggagccattgttcagccacccacaggctgtgtggggtggggtgggctctctcggcctcctcctcacgtgggtgctgcccttggtcccctgctgccctcagtcccctgccacaggttgaggggacgctgtcccaaggcctacagcagtaccaggcatcagcttgtaaactctgcagggttctcaagagaccatgaaagcagtcaggggagggctcaggtcgtcaggcgtggaggacagggggcctggctcaggcatccggggcccacgtggctgggaggccaccattgggtgggtgtcagctattatggccgtggcaggctagggactctcactgaacgcctcctcccaacaccaacctctcaggcttgggagaactgcccccactgtgccgctggagtcagcgctcccacaggcattcgggggaggccagggctgaaggggaccccagggcccacctccaccttttgcaaggcgaggcaagggtctggaatgctcccaggtggatgtggttgggcgacagcctggggtctgtctcataagctcaggtttggaaaataagaccatccactagctgttagccccgagcagccttcctgcccttggggaaaatcaatccatcagcagccagcccagaggcgctggctcttagcagagcagtgatggtgataaatggctgtgaggctgcagcttgctgccacacactttccccaggtcctcctgcagcagccagcagggctgggaggcagccctgagctcaggggaagatccggtgcggccagtggaatccaggctgcatctcagtcctgcagctcagcagcagattttccaggctccaggcaccatgtgtcggtcagatgaggccaggcacgtaatcagctcacttgaagagaccctgtgcagcaccctgtgcataccaccgtgtgcacacacatgcacggagacacagacacatgcacagagctgcacccacaggcacatgcatgcacacacagacacacacacgatgtgacacatgcacacacgatgcaacgtgaaccaacagacacgtgcatgtacacacgcaggcacacacacacacgatgtgacgcacgcaggcacagctgcacctgcatacacatgcatgcacacaccgacacacacacacgatgtgggacatgcgtgcacacaggcatagagctgaacctgcatacacaggcatgcacacacaccgacacacacacacacacgatgtgagacatgcatgcacacaggcatagagctgaacctgcatgcacatgcatgcacacacaccgacacacatacacacgatgtgggacatgcatgcacacaggcatagagctgcacctgcatacacatgcatgcacacacaccgacacacacacacacgatgtgggacatggatgcacacagacaggcatagagctgaacctgcatacacaggcatgcacacacactgacacacacacacacgatgtgagacatgcatgcgcacagacaggcatagagctgaacctgcatacacatgcatgcacacacaccgacacacacacacacaatgtgggacatgcatgcacacaggcatagagctgaacctgcatacacatgcatgtacacacgcaggcacacacacacacacacacacaatgtgacgcatgcacacaggcacagctgcacctgcatacacaggcatgcacacacaccgacacacacacacgatgtgggacatgcatgcacacaggcatagagctgcacctgcatacacatgcatgcacacacactgacacacacacgatgtgggacatgcatgcacacagacaggcatagagctgaacccgcatacacatgcatgcacacacaccgacacacatacacaatgtgagagacatgcatgcacacaggcatagagctgaacctgcatacacatgcatgcacacacaccgacacacacacacacacacgatgtgggacatgcatgcacacaggcatagagctgaacctgcatacacatgcatgcacacacaccgacacacacacacacaatgtgacgcatgcacgcaggcacagctgcacctgcatacacaggcatgcacacacaccgacacacacacacacgacgtgggacatgtgggcacacagacaggcatagagccgaacatgcatacacatgcatgcacacacaccgacacacacacacacacacgatgtgggacatgcatgcacacagacaggcatagagctgaacctgcatgcatatgcatgcacacgcactgacacacacacacacgatgtgggacatgcatgcacacagacaggcatagagctgaacctgcatacacatgcatgcacacgcactgacacacacacacacgatgtgggacatgcatgcacacaggcatagagctgaacctgcatgcacatgcatgcacacgcaccgacacacacacacacgatgtgggacatgcatgcacatagacatagagctgaacctgcatgcacatgcatgcacacacaccgacacacacacacatgatgtgggacatgcatgcacacagacaggcatagagctgaacatgcatacacatgcatgcacatgcactgacacacacacgatgtgggacttgcatgcacacaggcatagagctgaacatgcatgcacacacactgacacacacacgatgtgggacatgcatgcacacagacaggcatagagctgaacccacatacacatgcatgcacacgcactgacacacatgcacagaactgtagccccagaaacatacatgcacatgcatacagacacacatgcacattcacatgtgcagagctacacccacaggcacacgcacacataggtgtgatctgaggtgtattccaggcctccagaatacaagtgaatgctgggctgtgcagacttctcgcattttggccaggtttcaagggaccccaaaaggagacctgcaccccacactgggcttgctgcttctaaaggggctgctactgcagctggctcactgcctggactgagcccagggcccacgtgtcacaggtcagagaaaccatgcggggagcagggccggggaagcctgaggacaggctggaaggggctgctccggcttctgacccagctttgggtctccccactgcagcggggtgggcgggggctgcccgctcagtgacggccgagctcccaacactcacggtggttgttggggttggagctgcagttcctctgcggcctcgtccgcgcagccctccccacccccagtgtccattgtcactccatgcctcaaggctggctgagaagtcctgttgttctgacctcgagctgcccccaggtcctgcttgtgtgatgctctccttggagtccccccgccccaccggtggagccccctccagtgccctcctccccgagagcatttgtgatccactccttccaccccatggagctagcctcccttgcccagcgcctcccccacccacgcccgcgttccttcctcccctccagccctggctcgttcctcccccagggctcggggttgtcctggagacaaattgagggctccttggcgtgggcaggccatgtaacctcagtgagcctcagtttcctgctgccaaaggtaaacacccatttcctgaaattcagataagatgcctaaaacgcttccactacagaatgtccctgatctagatgatctatttatttgtattgaggtataattacagtcaagggcacagatgtgagtatgcagattgatgttttgacagatgggcacacctgtgtaaccaagaccccccatggagacagagaacgttgtcctccttctggaaagttctctgggctcttttccaagcatccccttcctacccccagagacaaacctgtgcttctcactgtggatccgtccagcctgttcttgaactcacacaaacagaatcgcacgacgcgctcttgtaaacctggcttctttccctcaatgtaacacctttgagattcatccacgtggctatggatcgggagtttgttcctttaaaagaagtcccctagtggtattccatcgtatggatataacataatttctttattcattatcctcttgatggacgtttgggttatttccagtatttgactgttgtaaggcagcaaagcacattcttgggtagacgtctgtttcattccttttgtgtaaatagctaggaatggaattgccgggtggcacagcaagtgtatgtttaactaagatgctgcctgagtttcccaagcggccgtgcacggcaccccctaacccctagcatgtgggtcaaggtgcccggtgtccttgccaggcctcgctgctgtccctctccctggctgtccggggggatggagggggcccgcgttgggttttccttgtgtttccgtggcgactaaggacagcctctctcctgtgctcattggccttcgggagcttctcgtctgtgaagcatctgcctgggcctcttgcccatctttaatgtgctgcttgccatttattactgccttgtgtgtgccctggctgcctgcggctgaatcctgacccagagccttcagcaggaaggaaagacattgtcccgagccatgaaagcgagaggcctcccagggctgtgcggggctgatgggcctgccctccgtctctctgcaccgtgtcctctcctcacacccaggcagggccccagagtgcagtgaggaccccacaggctcctccaggctgtgtgttgcccttgcagctctggtggtcgcttctgccctagttccagaagcccaggactggctcttcctggacaccctcgctgtgatgggccaggcctgggctgagtgtggcagggaggagcaggggctgtcatcgaaggagaagagccagtgcccagcagagtgtcccccgggtggctgcagagcccacctcgccgcccttgcggcacccccagagccacctcgctgccctggcagctcccccagagcccacctcactgcccttgcggctcccccagagccacctcgccgccctggcagctcccccagagcccacctcactgcccttgcggcacccccagagcccacctcaccgcccttgaggcacccccagagcccacctcaccgcccttgcggccatgtctgctgctcgcaccttctactgttctcatgttgcagcaggtcaggaagatgtgtggctgtcctgaatcctctgacatcaggcggagtataaataaaatacgggtatgatggatgaggcttgaacttttgtgaatttaacatagtttaacgtctttcctaaagtgaaagtcagaatgaagcgccctatttattcacatgattttttacgtcttccatcaaggaaaactgccatgagcgactgtcccgcccccacctcccaccgaggaaactcgtcttgaaaaagaagactgtgctgtctgctaggtcccacctcgctggctttggggtgacaggccctgtgggggtgtgccccatgcgagccccactaggtgctggtttggggagtcctcctccctccctgcatccatgccccccatcagctcaaacccctcaggatggcatctggcccctcagctccctggtgggagagggtcctggaggggtcctggcccgggtccctcctctccctgaggccgttctttcaccatcccctctgtccagcaggatgtgccagcagtgctggggtgcagcacaaagctctgtccctttcttcctcaaggtccccagctccctgtgcgtcccgcccacctaacgcctactcccagctcgaggggtccctgcggctcagttctgccctgaccaccttccccaccatgtgatggcatccacatggggccacctgatgaccaggtgtccctccagggggctgcagcctacagccaactgattgtgggccacttaaataattatcttgttaattgaagtgaaattcatagcacacaaaattaaccactttagagtgaagagttccgtggtgtttagtgcattgacaatgttgagaacatactcttcacaccacctctatctaactgcaggcgcctcaccagccctaagggagactccatgcctactgattacatccgtcgccaccgcctgccccagctcctggcagccaccacactgccttctgtccctgggtcgtggcactgggtatttcacagggacggagtcacatgatgcatgaactcttgtctctggctgccttcacctggcgctatgtttctgtcagggtccttccagcttggaccatgtgtcactgcgccatgctttttctttttttataatcccaactttttttttttttttttttgagatggagtctcgttctgtcatccaggctggagtgcagtggcacaatctcagctcacggcagcctctgcctcccaggttcaagcagttcttatgcctcagcctcccgagtagctgggattacaggcgtccaccaccatgcccagctatcttttttttttttgtattttttgtagagatggggtttcaccatgttggctaggtgggtctcgaactcctgacctcaggagatccacctgcctctgcctcccaaaatgctgggattacataatctcaatttttattttagatttgagggtgcaggttcgttgcctgggtatattgcgtgatgctgaggtttggggttcaattgatcctgtcacccaagcactgagcatagtacccagtggctggtttttcaacccttgactcctcctcttctcccctgcctcgcagtcccggtgtccattgttcctgtctttatgtccacgtgtgcccagtggttagctcccacctacacatgaggacatgtggtattgagttttctgttcctgcattaagtcgcttaggattatggcctccagctgcatccatgttgccacagaggccataatcttgctcttttttacgattgtgtgatatgccatggtgtataggtactgcgttttctttatccagtccaccgtggatgggcacctgggttgattcacgtcattgctgttgtgattagcaccacaatgaacacacgaatgcgcgtgtctttttggtagaacgatttgttttcttttggatacgtacccataatgggattgctggatcaaatggtagttctatattttttgagaaatcttcaaactgctttccacagtggctgaactaatttagattcccactaatagtgtataagcgtttgttctcttttctctgcagtcttgccagcatctgttgttttatgactttttaataacagtcgtcctgactggtgtgagatggtgtctcattgtggctttgacttgcatttctctgatgattagtgatgtggggcatgtttttcatatgcttgttggccatttggatctgctgttgaaaagtgtctgttcatgtattttacctgttttttttttttttttttttgagatggagtctcactcttgtcaccaggccggagtacagtggtgtgatctcctgacctcgtgatccacacacctcagcctcccaaagtgctgggattacaggcgtgagccactgtgcccagctgtatcttacccgttttttaataggtttatttgtttgttgcttgttcagttgtttaagttccttgtagattctggttattagaactttgtcagatgcgtagtttgtgaatattttctccctgtttgtaggttttctgtttcttctgttgatggtttctcttgccgtgcagaagctctttagcttaattaggttccacttgtcacatttcgtttttatggaaattgcttttgaggacttagtcataaattctttccaaggctggtgtcaagaagggtgttttctgcttttctcctagaacttttatagtttgaggtcttacatttcagtctttgtcttgagttaatttttgtatatggtgaaaagcagaagtccagcttcattcttcctcatgtggctcgccggctctcccagcaccatttattgaatggggagtcctttccccattgcttgattttgtcagctttgtcgaagatcagatggttgtaggtgtgcagccttaatttggggttttctattctgctccattggtctatgtgtctgtttttgtaccagtgccatgctgttttggttactttggccctgtagtagagtttgaagtccagtaatgtgatgcccccagctttgttcttttttcttaggatcgctttggctatttgagctcatttttggttgcatgtgaattttagcatagtttttcctgtttctgtgaaaaatgactttgtagtttgataggaggagcattgaatcagtagattactttgggcagtatggccattttaacaatattgattctgccaatctgttagcatgggatgcatttccactggtttgtgtcatctctgacttcttttttattttatttttttgagacagactgtctctccgttgcccaggctggagtgcagtggtgcaatcttggctcactgcaacctctgcctgccgggctcaagcaattcttgtgcctcagcctcctgactagctgggattacaggtgtgcaccaccatgcctgactaattttctgtattttaatagagacagggttttaccgtgttgtccaggctggtctcaaactcctgacctcaggtgatccacctgccttggcctcccaaagtgctgggattataggtgtgagccaccgtgcccggcccctgatttctatccgcagtattttgtagttccccttgtagagctctttcatctccttggttaggtgtattcctgggtattgtattttattttttggctgttgtaaatgggattgtattcttgatttggttctcagcttgaatgttattggtgtataaaaatgctgtggattgttgtatgttggttctgtatcctgaaactttactgaggtcgtttgtcagttccaggcgcctcattccttccccggggagattctccagccacctggcaactccacagcctccccatgggaagcagtgatcatctccaaggcctaagctcgtagtccccgagtcctccgcatgggaagcagtgatcgtctccaaggcctaagctcgtagtccccgagtcctccccatgggaagcagtgatcgtctccaaggcctaagctcgtagtccctgaggcctgtgggaggtcgggatgccagtcggacagcttcccccagccccaggggctggactgagcggaggtagagctctgtgggctaggggcctgctgggggcccgcatgagcgtcctgacggggttctgggagggagggtctggcagcgctgacctcgcagcctgtcccctgtgctcctgctgggccttggcacgtccaggggcccccaggtgccactgtggtgttgggcgtgggctttaactgggccctgtctcgcccctctccctgcccctccaggtggtgatgggcacgtggtgaagcaatgcccacccggccactggtggcatccatgagcactgcatggggcacagactcgatcacggggccctgggtgcagaatagtggggtgtgcctcatgggtatctgctggcccctgcttgcaggtgggccgaggaagcagagcagtccccttgaatgacacagtccgaaggtgagggtctgggaagcagccccctgcaacacccaggacccgacaacggtgcccagcatcccaagaccggggcctgtgtgtccggtgggagggtatgggagggcgctggggcttggggtggagcccattccctggcacacaggagctggtggaggcagaggggccgcaggggtggatttcgcgctggctccggcttggcctcctgcctcttccgtgcagttggctctcagtggtgccgtgtccttgtctccaagccggacacctgcgaggaccccgggccggactctgggggtgggctttggtacattccccagtggctgagcagggccaggggccaggcggaggctgaggccattgctgtccctgacaacgtggctgggaggacgtgtcagtgtctcctcaacctgaacagttatttctggggacagctttgattccagggtccctgagccaggtgaccctctctcaacatcatcagggtttagcttggatttttttttttcctgaaccagactttacacagcgtgcatttgtggcatgtgtgcatggggcctccgtgatgcgtgcgctctgcccttggtctggagcccatgtagaacactcacccataacaggaaaccatggcaacaacccctgccctgcgaagcccgatgggcttattcaggccagttgaaaacacacagttccttcattcaggcaaccggccctgtgagggcacatcccagaaagtgtgtagcgagtgtcacagggaaactgcaggggccgctccggaatgccggccatggtttcctgagatggtggttattagtccgttttcgcattgctagaactacctgagactgggtaataatttataaagaaaagaggtttaatggactcacttctgcaggctgtacaggaagcctggctgggaggcctcaggaaacttacagtcatggtggaaggccaaggggaggccagcacgttctcatggctggagcaggtagaagagagtggaggggaagtgacacacactttcagacgcccagatctcatgagaactcactatcacgagaacagcaagggggaactccaccccatgatccagtcacctcccaccaggaccctcctccaacactgatctcgtgagaactcactatcacgagaacagcaagggggatctccgccccgttgacccagtcacctcccaccaggaccctcctccaacactggggatgacaattcagcatgagatttgggtggggacatagagccaaaccatatcagggagttacatcttacatgagatttgggtgggaacacagagccaaaccatgtcaggaagttacatcttaccctggatggaaggagggtcctgcagggcccattttcccacctgccccagggcttggaggctgggatggggaaggtgcacatgagggtgagaatggttggctatggccctgttcatgcccccagctgtgccccagtacccggtgcagcagcctcccaagccacagccctgtccatgcccccagctgtgcccccagtacccggtgcagcagcctcccaagctatagccctgttcatgtgttgtcgagtgaatgcttttagttggagatgatattttcctaccatttgccattagcatttctaggataaaattccttcctgatgaactggtcatcctcaacccccgtctgcccacgggcggagaccttcatgttgtggaagaggccatgccctggaggccctcgcagcccctcctcggcactgtggtgtttggggatcctcatccggccctgaggtgtgcgaccgtgtggcctgggcccgctcaggaggggcagtgggaatacgtgtgagtccagaagcagctcctttccagggcctgctggccctcacagcgtcagcgtggacagcagtcggtacccagggcgttaggtgcccagaggaccggctgtgagcccgccgccctgttcctgttcggtgggctgggaggaattccagaggaaggcctgcgcgctggcccagccacccgggagagcgcattggacctgtccttccaggagaacgcgctggcctaggcacccaggagagcgcactggacccgtcctgaggatgacacgggctccacctgtcctttgcaaagagccctggaagggccccgtggggggtgatggggggcggccagggccacgctttccattttaggaaaaggaggctgtgaggaactcttcgagtgctgttgatggtttggggaaaggtgctttccactctaccaagtgctaatgtgtgtgaaaatcagactggagctcatgccaccttggagcaaagctcccgctgtgcccggcagacacctgcccagccttggcagctgggccctcttgcctgtccactgcagatccaggagaggcagctgcccccctctctaggtcaggtcagggccgatgtcctggggctgggacacttgctgttgctcccggggaggtcctggggggccactcagccggcattcatcagcacatgtgtgtgatggggtgacaaggacagggacagtgagggcacttgggacatggagcccttcgtcctgaccgatttcccggggcaggtggagtccgtgcactgaggagagccttgctggtctttgcagcccatgtcagggcctgtggctttcaggggcctgctgggccgcggcctcctttgggcctcaggcaggctgcacagtggaggctcgagagccctgagtcccacctgcaggtgtagaggagcccccagcccagggcagctgatgggtcccctgggggtgtttggttctggggccccctcctagtgtctgcagaggggcctggtggagggtgggggttggggggaggattgtgggggtgtcaggcctgggattgccatcattggctcacagtgggcgcccctggggacagaggcagagagagggcagggcagggggccggcagcagggggtgggcaccagatggggtggacaggggtgatgtggctttctgtgccagaacaggcagcatcctgccacccactccttcgcagctccgccccgcccatctctttggctggggggtgtgatgctccctccctgctctgagtcactcctcctccagctctgcccctctccctgggagctctcaggcaccctgaatgaccacagcccgctggcctaggggcctgtggctgccaggagccacctcttcctaggagcccctccgtctccctctgtgggagacagtggcacgggtgtgggagggctgtgcaggaccccaggggctgcaggtgggaggatggaaggacagacacgtggacagggctttttccagccttgacccacccacacacctacccatctcgtgctggcctctgaacacactgacctctggggtctttcagggcatgtcctgtatccacaggcctcacccccctgaggacccagcctcatgggcagcccccagctggtcccacagcgagccctgagtgtggcccttggtgcagccacaccccaggacacagggccctgcccatccatctgctcctggccagggctccttcctgggctgttctgctttgatccccagccctgggatcccactgggctcgctccccctcatccagtgctgctgctgctgtggccagcgtcccccccactggctaggcacacctgcctcagggttcaggactcaggaggaaccccaagccccaccccgagtcagggctgtctccattgcagctccggggtccccaagcatctgtgcctctgggcgggcagccccaggagcaggcttctcagctgctgcagggccaggcggccttggagtcctccaggtctgcccctgtgggtggtcctggggtgctgggccctgcgcagtgagaggcaggggtgggtggggccgggccttggacagtaggacccctctaggcagcctggggggaggtgctgctgcccacctctccagcggtttggggagctggaggagcccaggtccctgctgccgtgggcgactcctgcggtctcaggcactgcggtctcaggcctgagcctctgccacccggagatactgtattgatcaggcggttgccctaatcactcatttatggcagatccccgtgttgtctgaggatgtcgatattaaacaccggaacatgattccagacaatttcagaccagacaggaccaggatccacagtgctggcctgggaagctgccactgagcctgttttatgggtggaagctttcactgcaattaaggtgggggagggagatggcaagaatgctgccgccaacagggtcctgctggaggtgtaggcaccaggaccccgggctctgggtgtgtacctgggcaggagaagccacaattgtttcggagcccaggggccccacaggactcagctgtgggctgctgccacatcctggctgtgtctgtttcacagaaaagacagggtgagggcatcgctgccaagatggagcctggggcacagggtatgttcccagagtaagaccccagttggctccccgaggctggaagggtggtggtgccagctgaggacagagccctgtcccggagctgcccagggatgccgggaagccgccaagccacccgggcgagtccaagctggacaccagggctccagggtgtgcagaggctgcaggctgctggtcatgggggtctgcccctgggtgaggggacggtggagaaggagaaggtggccagctgggccctcggagatgcgtgggcagcgcacgtaatgctgggccatggtgctggcacccaggcatgacctcgaggctccaggccccctctggactgaggagtccagggtcagaggccggcacccacaccctcatcccctctcctgatctctgaccttcctgccctggggtttcaacacatcctcagtggtgcaggaaaccgcgtggggctcagcaagggttgagggacctgcttcctgcagggccccctgctcctctcctgggtgctgctgtggctggacgcttctgctctatgttctccgctgtaactcgggagcctcctcacccctgcccagcggctctcatgcctgtctctagcccccacctgtcttgtccccatctgcgtcaaccctgcccgtcagcgtggtgggtctttgttcccgcaggccatggcaagagggtgaggggtctgtgaggtgatgtctggtgactcctgtggttcctgttgacctagcgggccagggcacctgaggagtgggagtggggggcacccattgccaggaggagctatcgggccggttccaactcttccacctggcccggtatttcctaagtcaggagccccgtgtgggccagacatccccagaggctgcacaagctctgcggggcctgcgtctcggagtcctgggggatgattttcctcatcataagcacttcccaggtcataggagacgagacggcatttaatcaacttctgcgtgtgtttcaaccacgtgtgacatttgatctttgtgacagctctcacagtagtgcccacttctgctgtgcaatcctcccattggtgaacgggctggttctgcctgaggacacttggacgtgggggcctcttccggatgagtgggtggggtgggctgtgaagggaagcgtcccaggcctgggacacgcctgcagctgtgggcagctcatccaccacgtggcagctctgaaactgtccagcacccacttcccgggcctccaaagacatcaagaggggacctggggtgtcaggagcagagctgattctccagctcttgagacagccttcgcgtggggtgcacgcattgtgccggggtgacatagtgctgattcccggcgccctgcggcaggcttattttactctcctgggctcccaggtctgggggcagccttcgtggagggtgcacgcattgtgccggggtgacatagtgctgattcccggcgccctgcggcaggcttattttactctcctgggctcccaggtctgggggcagccttcgtggagggtgcacgcattgtgccggggtgacatagtgctgactcccggcaccctgcggcaggcttattttactctcctgggctcccaggtctgggggcagccttcgtggagggtgcacgcattgtgccggggtgacatagtgctgattcccggcgccctgcggcaggcttattttactctcctctcttcttttgctgtcctcattgggagtattttcttaccagttttgatacaagccctggcttatgaaaaggctatttttttttgttgtttttttctcccctgatggagtttcgccctttttgcccaggctggagtgcagaggcgcgatcttggctcactgcaacctctgcctcccgggttcatgccgttctcctgcctcagcctcctgagtagctgggattacaggcgcccgccactatgcctggctaattttttgtatttttagtagagacggggtttcaccatgttggcaaggatggtctcgatctcctgacctcgtgatccacctgcctcggcctccctaagtgctgggattacaggcatgagccaccgcgccctgcctgaaaagactaggttttaacctgaaactccactgaggctttgggctttcctaacatggtttgttattggaagtgctctttctatgcccatgtgggccagccactcagccgagtgctagacgcagaggcgggtccctgcagggcgggaggaaggttctagccaggcacacgggagggcagatcattttttattcttggggaaaagtgttgaaatgttacctaacgcttttgccttggacttggtggtagccatgccagaggtgacgtcttggccatctctcgcctcgagccggtgtttggccttagatgtgctgtggaggggcggctccctcagctccctcagctccgcaggctccctggactccctctagctctctcgactccctccagctccctcagctccctccagctccctcggctccctccagctccctcggctccctccagctccctccagctccctcgactccctccagctccctcgactccctccagctccctccggctccctcagctccctcagctccctcgactccctccagctccctcgactccctccagctccctccagttccctcgactccctccagctccctcgactccctccagctccctccagctccctcgactccctccagctacctcggctccccaggctcccttgactctctccagctccctcggctccctccagctccctctgctccctccagcttccttttgcccggttccagttcccaggcccggcaggaccttccaggcagacatgtggttgggccacctgtgctggcaacccagaaaccagaaacaattgcgttggagtgctgctttccggaaaagctccttgccttttctttggttattttgttgctcctggtaagcctggagatggtggcaaaactctctgagaacagggaaatgctgcgttagggaggacgaacgtccctgctgtctgggtgctgggcttagcgctgacaagtctcaagagaacctatctctgattgtggggcctggttcagggactgagaccccagctagcagcccttggggaggacctggagaggctgccggacaccgtgggaggtgtgggggctggtgttggtttctcaacccacctgtgtggatgcagaatccagagtgacctgggaggaggcggccccacgctcgggtcacttagcgggattcagatggcgactctcataggacctgctctcagttgccaacaccaaaaaaataaaagccttccttgaagaataaatattttaaagaccctggattcgaatgcatttgctgtactgggaagactgtgtctgtggccctttggccaagctgcacaatgagggcaggtgctggtgggcccggagctccgagccgctccgtccatcccacgcccgccgttgggtgcacacaagtacagaggtgcttccttcaggcagatgtgtcctggttcctgggaaggagccccctagctgtgagatgggattgtggggagctgcgtctgcttctccttttacctgcgtcttaatttgagaggtggacagcacgggtgaaggatgcgctgacagcatcactgcacggcgtaaatcacgccgaggagcgtgacagaccagtcttggtccccgtaatcacgacccatgcccacacttctttgccaaatgtccccttcagaaatgtctcccgacggccttgtaggatggcagccccctccccctttcctgctttagccccctccctggcacctggtgccacactgtgggcttgttgagtgtttcccccacactgaagagttcactccaggaggttgtctccctccttcctgggtctggaatgggcctggccagcggttcatgtggtgacctctgaccttggctggttagcaggccgccatgtccctagcgggttcttggccagagacttctgatcagacagtgccaaagtccagccctgaggggcccagcaggatgagatggggatgtgagggggaggcgtgggtcggaggccccaggaggcatagggcattgacctgcctgtggtgagtagtggagggtctgaggccccaggaggcgtagggcattgacctgcctgtggtgggtagtggagggtctgaggccccaggaggcgtagggcatcgacctgcctgtggtgagtagtggagggtctgaggccccaggaggcgtagggcattgacctgcctgtggtgggtagtggagggtctgaggccccaggaggcgtagggcattgacctgcctgtggtgggtagtggagggtcggaggccccaggaggtgtagggtgttgacctgcctgtggtgggtagtggagggtcggaggccccaggaggcatagggtgttgacctgcctgtggtgggtagtggagggtttgcattcagggctcaacccccagaagccagagtcgatctgaggtgggcacccaccaccctcttggggtgctcacccaagtcctgaggggctgagtgtggggcgaggtggggtaaagagatggtgtgggggctcctatgcccccccttcccagggccacagggctcctcggccgttcacagtaggctctgtgtataaggaagggaccatgcccactcccctctgaggcccagatcaagtgacatgaccccaaccctttgcacacccactccttctgggagcctgtccggcttcctcggtgaccagggctgcccatggcaccaccacgcagacccgtccctctgctccctctcctcccattgcaggggcctggcctctgccccctccacgggcccccatgagagcggacttgggactaggcgaaactgggtagggcctgggagcagattcatggcctggggacccagtagctggggtcacccctgctgttgggtgaccacatggtggctcctagacccccaggccggtcctgtggcagataggaggcagatgtgtggggcctggggctcagggctccttgggggtgaccccagggatggtggggtcctgctgggacatccctggctcccctaatgctccataggccccacccaggcctctgctatgcagaccgccactgtaccctcccactggcagaggaggaaactgaggccccaaggaggtgggcgtggaggtggcctgcatggagcccaccatgaggcagggattggttttgggggctctgagtgcagcgttggcctcttgcccagcttggaaccttcctcctctctggggaccagacgttgacctttgcctagaacggtctccgacttccgtgctgccgatggaaagccaggcggagacgtggaaggttcaggaacacttgcccgggtctcctctctgcaatgacctgtcccgggcacctcacacacacctgcactcggggcggggcccctctctgcagtgacctgtcccgggcacctcacacccacctgcctcggggcggagcccctctctgcagtgacctgtcccgtgcgcctcacacacacctgccctctcctctctgcagtgacctgtcccgtgcgcctcacacacacctgccctctcctctctgcagtgacctgtcccgtgcgcctcacacacacctgccctctcctctctgcagtgacctgtcccgtgcgcctcacacacacctgccctctcctctctgcagtgacctgtcccgtgcgcctcacacacacctgccctctcctctctgcagtgacctgtcccgtgcgcctcacacacacctgccctctctctgcagtgacctgtcctgtgcgcctcacacacacctgccctcggggtggggctcctctctgcagtgacctgtcccgggcgcctcacacacacctgtcctcagggtgctgtcccctctgccagtgccaccctgggctctgcggcctcagccccttccctcccccggtgcggagccagcgtgcagggagctctgggaactctcatgagaggagtttgatggactccgtagacaccggctcctggtgactgtggtggttgcaggaccactcttgggacaccaggctgattacatattgctcccctcaaagcccacaggaagctgttttgacagattccggctggtggacttccttttccttatctcctccgctgagtgctggaatgagagctcacctctcctttgggagccaggaatggggctgagcctgggcttgcgtggggcagggccggtggtcatgggaggtcctggcccagcctggggcagtgcggagaccctcatgggttgctgatggcaggagctggggacaggagcctgaaacagccactgggtctccagttccactggtttggagcctttggggctggggtcgggagggcatgagggccgctgtgcacagtggcaaggccaggtgggcacctgggggcagcaggagctgggcatcagggtggagccacggtcatccagaggacagccacgatgccggtcagccccctgccagtgcccctgactcaccttgcggggtctgggccaacaggtccttgagcagggatccctgtggacatggccggcagggaccacttggctcggggcttctcaggggcgctggtgcggtgagccctgcccaggcccacaggtgtccactctgctgcttgcacggcatcctggagccacatccaggattcctgccctgcctgcaccttccctgagcagcatctgcatggctgtcttggacttggtgtcccttggtgtccctgtggctgccctccttgtcagtcttaggaagcagggacagttgtgttcaaatcacaggcactgcagagtgggggccgcatgcccctaaccccacagccccaccctcagccccactcccagcactcccgcaaccccacggccccgcccctgacacgccctgacccccatagccccgccccctgcacgccccgccccctgcacgccctgacgccacagccccgccccggcacgcatgcgccttgctgctgcctcccagctgggagcctctgccggagccgccgcctccgtcgcacagtcgggaggctttgcaggtgtgcagggcgcaggtgacccaattgccgtgactcccttatgcttctgacttgttatttaatagattttgtttcccatccttttcctctccgggagggactaaccttgggaacttgtgcttattctctaaagtggaggtgatggtggctggactcccttgctggttcacagctcgggggccagaggcttagggctctgtgctgtgcgggctgcttggggtcctgggggaggccgccagagcacgtgcccatggacaggaagatgctggcttcgtttcccagggcagtgcaggactggactccaggtacccatgtgccaagtgccagggtcaggggcctggcacagcaggtgccatgtggccgtcctaggcatgcacgtgggcgtggaccaccaccctcgtcctcagctctgttgggaatggccaaggctgtgccgaccacgggctcctgtgcccgctgtggctcttttgcctctaccggccgctgcaaggagcacaggggtctctgggcagcggcaacctgggcctgggtggagcctaggtggacagagggtccttggacccagagccgcccagcggagttcatctccccaagctgtaggcggccagctcagccctgggcctcgccctgacaccctgtcccctccccactgcagggcaggccccgcagactccgaggtctgtcctgttggggttgctgctggatggcattggtgtccccatctcccctgccacggcccagctgccctctcactctcctccctccactagttcagcccatctgtcccacgtgctggttcacagctgactttcctttaacatctggtgacgttgggtgacgccacatggcggcagctgctccctgcctgtgcggccgcggcccgggctgccttggagtggctttgctggtgctggagcagcctctgcctcgatgacataatctctgggcgtgcataggttttcttgaggaaggaggctaggatgcagggtggggcagctgccgcctggaacgggggctcgtggaggctgtgtcagcttgtgggtgtcggccacgggtcttgtctgtgcagcacggcccgtcctctgcggcctttctgcccagtgcccagctctgatgcctggcagcctcttctctcaccccttgaagccccaccccctccgtcaacttggtcccaacctcctgtgccagtcagtgcccctctggtcacttgcagtggggagtgcctttctaaggcgcttaaatcaaaccgctctccccacctctgcgagtcaagccccactaccgtcttgtgcagaggagaccaaggccacaggtcacagccccttcctcacccccaggtgctctgctgactgccctcccacttcacccaggaccagcttgtgggtctgtccatacccttggggtccttttcctgcctgtgcccaggctggcccctcacctaggcaccccctcccttcccccagctgatgcctacttgtcctggagggcccagcacaggcgtcctctccccaggatgccaccctgcgccttcaggccagctctgccctgtgctcggagccctgaagcctccgtgggtccttgtcacggcacccgtagctcaggctgaaagaattctgggtgtgtgactctgtccccagggcccatgaggatggacactttgcctgctgcgtctatgctgaaacctggggctatcctggggtgccctgggaagggagtgggcattttccagttcagaggaaaatgcaaagaaacctttcgtctagaaactgttctgtctcctcctccacacactgagtgcctaaagcacttgccccaccagacggcacagggtaccgccagggagcagtggagatgagactctaggccgtgcctcccaggaggggtcagtacctaccctgctgtctccccgggtctgcctctggccttggctgtgtcttccctgcctttagaataaccatgtgtgtagggggttgttccagctgtcgaattccccagagaataagtgaacatgaggctggggtaaaagtgggtaaataggtgaaatgtcatgaaccagcgggtgtcctaaacctggcttcagggcacagtgctggcccttcatggatacagcacactgaggggtgcagacctggggacacggacttaggggtgcagaattggggacacaggcctggggacacaagtggaggcagctgctggcctgggagtcatctggaggggctcgtcctggaggccagggggtgacattgtgggacccccgtcttatgtgtacggagaatgtcctgggtttgaaaggcaagtgcagacggtctggaaagcccatcagaatccctttccttggtgtgaatagggcacacggacaggtctcacgagtgacaattaggggagccgtccttctcccggagggacttgcaggtgtgggaaatggtgccttctgcagcttcgcacaggcttgcggaacggctctcatgctgggcgcaggctctcccaggctacacaggtcatggtggacatagccacagccctgagccgcctctcgttgttcatcttggggccgtttgcagactcccccaggcttgcccagtgagtgccagcagggctgacacccctgtcctctggagacgcggagcagggtggaggggaaccaggaacagctgctcatgtgtgcatggcttcccccaaaaccccaggcctgcctgtctgggggtcttcactggatggagcagctttcagtgggggtggctggtgcctgggaagacagcccagtcgagtctgggactcaggtgtgtgtggttcattcttgccccatccatgctgtggctgagcacatgcctaatcccatagcaatcctgggagtaggacgtgcaagacccaaggcccatgtcttcactgaccggggctcagccccctcctgcctcgcacaggagcgagagtttggcccgccccacggcgaccctcttctaggatgaggggccctgggcagtgtcggggtgggggatgttgaggtgggggagctgctctggggtggggccttgctgccacctcaccaggtgtccctctgttttatcctgcagtgaacttcgaccacttccagatccttcgggccattgggaagggcagctttggcaaggtaaggcagggcctggggtggggactgggctgagggggcaggggcagaaccgtggagtcggacatgctgtcccctgagcccacctactcccatcctccttgggagaagcagccttacctgggcagaggctccaggtcttttagggaggacgtgggcactcctgccacggaggcagctggctgtgccgccatcagactgggccccatggtgtcaccaactccgcagcgtccaggagccaccaggaggacaaaatcgcagctttggctgaactggagcctagaggccaggctgtgcctgcggctgctcctcaggacctacaggggacaggacggagggtgggtgctgagcgtgcatcctcagctggtccttgtcctcatccttatccctgtctccagccccgtccagagtgccctgctgctgtcctccagataggcctgtttgccggcctggacggagcccgttcctttactctccttttgttttctcttgaccagatctaacttcctgattgccgccttgtaatatctagagattgggggtaattataactcaaagaggcttaacgagcactcggaaaaggttggaattagccctccggcttctgcgcgcagctctgttgtggatgaatcacttctgaatggacagttcttttcagctgtcccgggaggcttagcagatgggtgctgcctccctcctgctcctggctgtacagctgcctggacactgtgtctatttaagccccataagccctttttaaagcgattgccatgctaccggagcataatacgtagggtatttgaatgcgattaattacctccatttcattgtatagcaaacgatggctccactgggttacttgaggcctgggatgatgaaaagtcagagcaaatgagcccctttgcgcagtgcattgagaaagctcccgtgcaccaagaagagagtgcttttgagtccctgcatgttgggaggcgcccgtggacctgcaccgttttgttgctggtgaggctggttgaccatcgaggtgaggtgctgaagctggcggagttcgtcagagacgctcagggctgttgggactgactcagaccctcctgtcctcccagctgagcctaagttctgtttcccaggcccacagcgggtgcacgaggggcaggcaggatggagttttgggggactgctcccctctggcagcggaggacggcagctgtgaccaggttcaggagaggtggcttagggggaccctgggagtcaccaggcatccagaaatcaggttcaaggagggaggttgggaagcctgggcccggccagcatgtctggagagggccaggccgagggcatctgaggggcagagacctgccctggggagcgaggctggcgggtgcaggtgctgtttcctggggcccccagcatctccccattgcccctgttgcccccgcctctgctggccctgcactcctgcctggggatggtcccctccttctcatgagcacaggtgggcagcctcagccctgcccaccatctgtagactgccagggttctactccttggaccagtccttaagaggctcggaaacgccagctggcccagaaatgggcggctgtggaatgcggggaacaggagcgagctgctgggtgccgtgttcagatgcggggtagtcgtgcacctggagggttccttccggctcacagttaggcctcctcatcaggcctgcaggggttctgtgcggcgcttgttgatgggtgcctggcactgaggggagggtgaggtgaggcctgtcactgacctggaggggtccttccagctctttcactggccaaggcaatgaccccatggcaggaaggatgagggctgagaagggtggttctgcgtgtggttgggctgtagctgtgtctgctcacatgtggcctcagttcagaggggctgcagcagcaggggccccagccacccctgtttccctgcaggtggtggtgggcccaggctcagctgtgcccaagccctgccagtgtttgagccacctgtgaaaatggctccgggttgaggggtgggatcccctggcagagcaccggagcccacccgttcagggcggcgcagcatttagagtctgaccgggtagagtcgggtcctgccaaatggccctggtgcagctgctctaccaccagggccatggctccaccctcggggccgccgctctcggaaatggattatctagacctggcccttggcttttgtttttgttttcagtttttaaaaaattacagtgaattacacataacaaatttaccattttcactgttttgaagacagctttgaggcatgaagtacatggtgcccccggttctgtccggctgaaagtggtggcggtagttaattccaggactaaccacttagcagggaggaatctagacttggagaaaatctgtttctccctgccatggacattcgtccagcctgccctccgcccctgcctgcccccttacccggcatagacttccgtccagcccactctccacccccgcctcgcccccaggctgctcagtgtgattagaagcctgctgcctcctcagcgtccagccggggttccagaggctgcggtgtctgagaggctcgccacctccccagcgctgcctaattgtgcttgttcagaatccaggacatcgcattccagccttgggctgtggatatctcaggctgagggccatgatcccaggagccacagatgggggcagccccattcctgcatcctcctgtgagctggtgggtgggtggcttggatgcagctgccccagggatgaggggaggtcgctgccccagggtctctctgggaccaggcttggctggggggtgcagaccagtgcaggttgggctgggcatgaaccccaagcccatgccgagccccggcccctctggcctgtaaggtgggccccatctctggacacgcatctcttaaaagccattgacctttccggtctgtggttcccctgggtgggggtacagcgttttcctgttctttgggcccaggtttcccaaaccaaacgtgccatggaggagccgcccctctggctgccttctgaggctgagagccaggtctgtgaaacgtgctgacagtaggcacaggggcaggaggaaaagcatacgaatttattattagtgttacgtgtgcagggcatcgtgggggaaaaagaaaacacccaaaacagtggtgggccccaagggctgatgtgcaggctgggagaagggggcgcggggggccgcatggggggcacacagcttttggggagactacagggccctcggagaagcagcgggggctgtgatggtttgtgactgagcctgaggcgggggtggatcctggcccctctcccgggggagggtccctcttcctgggccgctggaactgcaggggggctgtgctggcagttcctcttggagtgtctgtctttaggcagatgaggggagtttggagagagcccccccaacctcaggtgctgttttccagtggtttctgctccaaacagtcaacaacgcagagtttactggtgccgtcggagccccttcaccacccgtgcccttccgtcctcctgctgcactccccccactcgtcccgtgtcctgggtgccttcagccgccctcctcccagcagctcccagctcatggcccctctcagaggacaccagcccctggcccccatacatgcttgaaggccgtctgcacccagcactgcctcattcacgatcagggcaagaaacgttctgttctggggagaatggagtccatctggaattcagcattttttcagtcagggtctcactgtgtcacccaggctaaagtgcagtggcgtgatctcggctcactgcgacatccacctcccaggttcaagtgattctcattcctcagcctcctgagtagctgggactacaggcgtgtgccaccatgctcagctaattttttttgtatttttagtagagacagggtttcgctatgttctccaggctggtctcaaactcgtgacctcaagagatctgcccacctcagcctcccaaagtcctgggattacagctgtgagccgctgctcgtggctggaattcagcacttttaagttggcgggcttgaggtctggagctgcttgtggacagcccgtcgagggtgcaggcctctctctgggcttcccgctctgtcccctgaatgaagggttcgctgaccagtgagtccgcagtgttctggagcctcttctacactctgccaaaaatgccggctcttccttcgtgtttatttttccacacggacttctgaatacgtcttgtcaaggtcgaaagtaaccccgctgggatttggataggagttacgttttcagattaattgagagcaaagttgagatcttacccatctaggggtctagtgtcttttacccaaataggcgtctgctttttcatcttgattcttcacattttgttccgttgatgatacgtcgttcctatggttattctatgtcatgttgttacgtggaactttttgctgccgtgactaacagactttattttctaacttttcccagtgttaaattgtcgaccttgtcgttgagccactgcctggccctgagccctgccttcccgcagctgtcaaaggggcagtcggcgtcctctttggatgcctctttggagccacggctgtgcttctggctggaggagttgggtgggctgggcgtgtggctcttgcacccagcctgggcagcaggtgtgggtggagggtcgggtttggctttgccaagctgtggctggtgctcctgggaataacagccaggccctcacttaactaggagtgtttggggtgtgagtgctaagtgctgggagatcgtgtgttcccgttgacttctgtaggggcagaggccggatttccactcggccagaatgctgcagggagcaccaggacgccagcttgacggtgtctgatgggcacagctatcaggaggcagaggcgtgtctctaggggtgtggtgcccctttgggggttcgagagccccttgcccagatggatttctcggtggcacggctggctgttgggcagtgggcacagttgggtgcagccccgccccttgaccctaagtgggtctctgccctctcctctctaacccccctggctggctgggctcctcgccctgccctgcgcacccctcaccccaggccatccccctgtccgagggagagagagagaagcacaggcgcacggcgtccgcatttcccaggctgtggggaaataactaagaaaacaggtcaaaaggccttcaccacagcccccacccaccccgaggaaccgcctgtccttgcagtgaccccacatctcagatggacccaacagagaggcaagaagaggatgagcatgtttgtgggtgaagaaggtctgcctggccgggctccccagctccatgcccccgtgcagggcctgtgtacgtggcctctggattccaccttacctgggccccctgtgccgtctcagcgagaagacagtgcctgtggtcgctatggcaacccgccagcggctgctgtaggaccaccctgccatgtgtgactgtgacaccgtggctgagcctgtggcctctgagtccacgccgggaggagctggttctgagggttcctcatccatcggggggactcgctgcaggtggcgagcagcactggctgagaagagcttgcaggtgtccgggttctgggatgaaactcagttgccagcttggggtcatgggtttcaggccaccacccaggcggcttgagtcagcactgcctgtagcccaggctctgccctgggggggcttccctgggggtcttctttggggggggcctcgtgctctccaggccaccaggatggcagctccaccggaaggcagcctgggtgaactcagcctgacaggcagctccgtttcttcctcatgttcacagccagcggacgctgacgtcgattggaagctgggtgtgctgggggttgcttatctgtgacgtgtgttcccatggcgagtgatgcgtccctgtcctcactgtccagaccctgctcctgagatgtccaggcctggatcctgggcttgggacctggggaacccgggcctatgtgccgtgagtgacccctcacatgacagccccctagtgtccgggaagcctggctgaaagggagccatcagtggccgctaaaagttgacgatgtccagcagcgtctgctggcctgctgccgggctcccggggcaggggctgctgcagtcactgcgggcggctgggcctgggtttctcccagatggcccccactttccagcagcacaggctctggtttcctcaccagcccactgcctggccaccccgctcagggcagcaggagccctctgcggcggccaagtgcgtggcatggagcgacccccatctggcagggagtgtgcggtgcccctggggactttggagcaatggcgtttctggactccattagttgggactaagatggtttgatacaggctttgtttgggtttttgctgactttgctgtgattctgtgattgtgtgtgtgagatgggctcccccagcttggggaggaccgtttgctggtgccgggtccagagaatgtttactgggttgagctgacctgctctcctgtggggaccaaaggaatctgccggctggaccgagggccccaggacaggctgtggggaggctcagtgcacacagtgctcttgtcctgagccctcacaccatctataaaatacccaccagcatcctgagggttccagcctgtggctctcaggattgtggagtgcagtactggccactgcagaccctgtctggctttggggtttaaatggttaagtgcagtgtgatcttcctcccttggacctctgatggggagtgcttggccctgcatgtccagcctggcccagggcgagggtttcaggagcactgaggacccgacagggctggacagtcaccccggcactgcagcctggtctccgcccaagtgtccacccagcgtgcccgctcctctgtgtgtgcatacctgtgtacatgaacgtgtgtgtgcctgcatgtctgtgtgttgcgtgtgtgtgcatgcctctgtgtgtgcatgtgtgtatgtggtatgtgtgtgtgtgtgcatgcattgcacatgtatgaactgtgtatttccaacgctttaatgtcagggccttgctgaccctggagagactgcccctcctgggccagccacttcctagagatcagaaacacttgcctttggttgcctttcaaatgcaacccccagctcacccccagccgtctgctctatgctttcccaggcttgagcccacatcccctgcatgaatcacctcaggacctgaccccagacaaccagggcaggcctgtattcccacaggccagtctcaaacctgctcacctggctttccccgcctttccctgcttttcccgaggaagcctccactaaggctctgcccgtgtttccccttcacgtcgtctgcctccgagaccctggtctttgctgtgtggccccacggtgtggcatgcccctcctcctgttggtaactataacgaacggtctcatcaatggcaggcatctcctgatctcacccacctgtgtgataataaaacctacattttaaagcaaggggcatctcctgaatcatgtggatctcttggacctgctgtgtagcttcccgtgggggcctccgagagcagctgctgcaccacagtcctcagtagaagctgcctcggtcccaaggaggctgccccgtgccctggccagatggtgggaggaagttcccccgccagcactgctggcagttccccaggcctcgtccacttgcctgccacactgaggggcccagcttagcagctgccttttctctgggagggtcagggctggagagtctcgggggctccaggctgtgctgggtctgaccacagtggctttggagggaggcagagatgctgaggattaaacagatcacctcccaccaggccagcgttgggagggggatggcagcactgattagagaacccggaggagccctgtgtacaaggcagctggaggttcctaaatggtcgggaaagggggatcctgctctccctgctgtggggaagctgattcttccagggctggttctcctccaggctctaggggcagaggggtgaagccacaccgggccagccccgccggcacacacttgggggaagaggggtgaagctgcacttgggggcagagggatggagctgcaccggggccagccccgccggcacactcaggttcctctgtgcctcgccctctgctttgggttcacctccgccaccactgcaggagcaaagaaaccctgcgtggggacctcggcgcagagtctgcttaggaaggagtggttaccacgtgctcctaaatgggccaaaaggcggtgggaatttgccgggcccgtctctctgggtcacccaggctgcacctttatgccttaaaatagctgtttccctcatgactgattcaggaggaggaggagaactttcatatccattttctcattttcttccctcgacaggcgtgtgcatggtccttgcctttgccttagagctgcaaggaagctgaggccagagaggtggccctactggcctctggtcaggtcacctggcttgggaggagcaaacgccagtggagggcagaggggcccagcctgtgagcccagggagcacagtccagggagcacagtccagggagcacagtcagggagtgggagcccaggggcaggagtgggcatttaaaatgaaaccgcccacccagctggcagctccggtctcaacagtcgggaggctgtggccagagaccaagggatccatccacccgtgtgggtccctgagggccggcctcgtcgttaggggtggaactggggcagacagggtttccgtgatacaaccacagtgtggaagctgaagatcttctagtacttacagaccttggcgggcgcgtggcaggcctggtgcccacaagcacttggaggtcgggggcacaagcagggagtgcagggaccctggggccaacacgtttgtcgggtccacaggaggtctgcttggtgggtgaaccccaggcaccaggtcgagggtcacaccgtgatggacatgtaagctggcaggcacatgtctgaatggccgggaaaggaagcctctgttaggtgggagacacgcctctaagtttctatctctggctgccggctggagccactggggtgggtgggggatagtactggaaaccatgttgagggtgactgagccgttctggtgtggaaagttaaacttgtcatgctgcctcaggtcagtctcaaatatgtcataggcaccccctcctgggctgccttcctggctgtcctgcagcgagcccgcgagtgagaaggaagcttcctcgccactgcgctgggcccacacgtggcagacacagctgcccagtgtgtgtggggcccgtgcacggtggggctgccacctgccacccagcctcagcttcctcatctggaccgggagcccctggccaccccatcgggtcacccccttctgcgaacctcatgacaggttgtggcatccaggaccgcggggacattgttggccatttccggggcagtcgggcctccgcgtgggcccagagcccaggtcccagcattgaccacgtcccttcgctgaccaggccgtgcgcaggctctgccacctggggaaggggccaggggtcctttctgtgctcctgactgaggcccatgtgtgggctttggggccacggaagcattgcctcaactcttctctttttctagtttttagaagatgcaactcacatggtatagaggaggaacactgtgaccccccacaagcacccgggtccggcctcatcagggaccgacgcgacaccaatcctgttacagccacaaccttcgccacctcccgctgtgccctcggtatccgacatgaattccagagagtgtgtcattttatccactgatagtttagtgtgttatctttaaagatgaggactctcttcgtagccaccgccacggtatttttccacacctgaaacaacggtctttacgatcccatcacactgcgccaggcttgtgttctcccagtgtctgtgaatgtcttctgatggtttctctcaatcaggatctggatgagtctgtgcagtgaggtgggtccgtgaccgccggtcactctgtgggccctgtccttgctgtttacttgctgagggcccagatggctctgtgtcctgagcatcctgtctgcttctgctgcccacgtcacctggaggccccgacactgtcccttcctcctgccttctccttccttctagaaatatcccttgtaaaaaagattttagttcatatttccattgattgattgatttctttccttttttttttttttttttttaaggctgagtcttgctctgttgccaggctggagtgcaatggtgcaatctcggctcactgcaacctccgcctcccaggttcaagagattcccctgcctcagcctcccgagaagctgggattacaggcacacgccaccacacccagctaattttttgtattttagtagagacggggttttaccatgttgtccaggatggtcttgaactcctgacctcgtgatctgcccgcctccgcctctcaaagtattgagattacaggtgtgagccacagcgcctggcctgatttcttttaacatatctgtttaatctgcttctgccatcaagggtggcacaccactcatacagctcacaccactcacaccactcacacggttcataccagtcacacagctcacaccactcacacagttcataccagtcacacagctcacaccactcagacagttcataccactcacagttcacactgctcacaccgctcacaccagtcacagcttcaccttgctttcttccccaaccgtgtgtctggtgccccctgtacaatgtgtatccctgccctaggtcccttcacagccacatcacttgccctggtgggcgtgccacacaagcttcccacctgccccggtgggcatactgcacaagtgtccaatggctgctgtaacaaattagcccatgtgcaaggctttgaacaacacagacttcctgtctttacctgacctccaacccccaaggcccccccagcagctcatgagagccacaggctcgaggcagccagagatgcaagaagaggtggtccctgactgacaggaacggatggcagccacacctgccccggcatcccaccactccccaagcaggagggggagagccctggcatgaaggggccggaagctcagaaggggccatacagagcacaggatgcagggtgtggagggtgaaaccctttgggctcagagctgtgtggaaacaggtgagagaaagctctctgagtgaaggagcacccagagtccccccaagaattcatagagacctcacctagcagcagggcaaggcagaaaaagcgaagtgggcaaacctgctggaggaacccccgctgtttcagaggggaccgtggcaaggcatgggaatgtggcagaagaggaagggacgtggaggtgcctcccagaactcggggatgcatcgggaagtgtcaggaggacacaagggagaaacagcggcagagctcccttggaagcggctgtcaagctcgggcagcatggagggtggccctcaagatggatcacggattatgcacatcctgcacacaggtcctcgatcccagggcgaggagagctgggagtagccaggcaaggtgttaagagccttggttatccccaagtgggagagtccacgaggccacaggttctcagccactcaggagcagcatctccaagctctgtttgaagatagccaagaatcccagacctcatcggaacgatcgcttgcatgcaagcaccagaaaacagtatgtccatagtagttccacagtggcgaggactcagacggcgccccagcccatctgctcttccaagcccagtaaggctccagccagcatgaagcagctgaggggaggcagctgttgccgaaggggccatcctgcagtcgcagcaactgtgtgccttagccccacggcaatgttctgactaaacaagggctttaggcgggagcgcgtgtgggcctgggaggtagctccgtcccctgggaagccggtgggctgagtgcccctgcctggccaccaacacctgacagccatagggcatggggggttcccagcctcttgggacaaagacccccctctgccatctgcagtggatggaacaagagcctcagtgccaggtggtgccatcgcagcatggccactacagccgccacccaggccccttggtgagcttgccagggtccacctcttcttgagaggtttgtggcctcgtgaggcgtcttaacttcaccagccatggcctaggaagcagccactaggcatcgggggaaaactgaaaccccaaaacggattcccactcaccgcgttagaatcctgagctcatccagggagagggacctgggacaagtggcctatgggacacagcttctcagggacgtcaagagaacagcttcaggggggtctcaggaggggcaggaggagagtgagagatggaactgcctctggagtgcacgggagcccggttctgcctgggggacccctctgcctccagtgccctccccagaggccccatactgggctgcaccttcttcagccgctgcagacaccttctccagccccgtcctgggcactgaccctcccgtttttgtggtacccagcactgaaccctgggagggagcctgccttgccctgtcccgccctgctgtccccacgtccccaggctctacttctccttgggacaccagaagctcccccaggaaggattaggaggtggtttcattataccgtttagaggccttaggtacttgtggtcaggcatttgcttctggggaacaaaaattacttggaaagagaaagagcttgggtgaatcacttaaatctgccaaatgcataaacagcatttggttgaattggcagtcacatggctgcaggcaccagcctgttccgggtggcgctgtggcctccccgtcagtggcgtttcataggaaaagcccagggctccgggtggcgctgtggcctccccgtcagtggcgtttcataggaaaagcccagggctccgggtggcgttgtggcctccccatcagtggcgtttcataggaaaagcccagggctccggagcccggggttggcttgttcctctttgtggtgagacctcaaactccattttctctttgggcttaagttggtgattggaggaagcggctgggaaagcagggaccagtttcctggaggaagcgtttgagtcggacctgcctgccctcagccccccaggcctggtcataaaaggccgccggtttccagtcttttttgtaaacactgctctgcgtgatctcgggtgctgaggtccctccagacagagactgcaccaaacccagggctttacgccaccgctcgttggagcctcctgcatcaggggcccgagggagcctgccggacccgccctcttctctgttgtcttcacctaagagcactttgatgtgattgacttaatcaaatccatttcaacggaaaaccccacaccaccccaaaccaccttcaacgtgcctgacagtccaggcctcagagggcgggtcctagtgataaggggcaggacaggctccccacctgctggcctgggtcagaaaatggtgaaggagattaggggaagtgggctgctgggttggcaggtgctccggtgagggcgcagcgtgagcgcaggtgaggctgctgcctgcaggcgtggccgcaggtgctcagagtctgcagggtgttatcagggatgcagagacacaggaggcgtggagaaagcgagtttcccgccacaaccaagttccgtagctcagtgtctgcaaacaacagaagtttctcttgtagtcctggagatgggaagcctgagacctggcagggtgggccctctgggcggctccgtgggaggacccgctgtgccttctcccggcgtctggtggctgctggccactcgtggtgtcctcagcttgccgccatgtcactccattcccaggctggcatcttcacatcactgcctctgctccaccttcacactccctcgcccccatgcctgcgtcatcttctcttttctgtcttttatcagggtgtctatcattggctttagggcccatcccaattcaggacctccagatcctcaacttaattacatcttcagagacctttattccgaataaggccacattccgaggctcctggtggctgtgtcttttggggacgcactcgggcctgctgtgagggatcgaggcgtttccaccagggtctccagggaggcaccatggccactcaccctgcactgccagtaccttgcatggggctggcatataggaagacttgcaagcttttcttgaactgcagttgagctgagaatgttccaggacacagagcccaaagactcgggagacctgagtgtaaccctgcctccccttgctcctcagggcagctcctcccacagggccaggccaggggcttggactgtggctgatggctccaccatccaggcagtttgtttcccaggtggggtaacaggctggaggcaagtggatctgctgctttgttctggtggacagcagagccgtgggtgtgcgaggccaggccctgtctcgaggtggctcttctgtccctgctccctggctgtgggtgatgggatgcgtgtgacggggagagcaggcttgggtcacagggccaaggggctggtcccagatggagcccaggccacatgcttgggaaagcgggtggtcctgggtgagcctgtctggcaggagggtgaggtcctgtctggagtagacacccggtctgtgtccgccgcacatgtgacagggcccagagggcacgggaagcccaggtgccctgtcccctggtgagtgggctgtgggggttgagcaccccaagggaaggcgtgttcttccagagattcccccgtaagagctgagctgcatcgtgagcaggaggggcagagggagcctggagagggttgggtcgcctgggcaggcagctttctggggtggtgcacaagcgacagaaagcctgaggcttgggaccggctgaagacggccttgggctgcgggtgctggcgccgctccaggcagaggtgggctctgcagcccccccccccccgccagcttcccccccagcagcaagagccctggccccagccagtggccccaagccaggctcctgaggggcagagggtgagggccggattttccaccatatttgtctcacagcctgtctggtcccagccccagggcaacaaacagcctttctggagcagtttccagacctgcagtggccgccttgagcctgcagtgaccgtctgcaggaggccgcgggtgctggggctggcgcaggaaagcaccgttgcttctgcgcctgtgcagagtgaggctggggcttccatcccgggcacgggactcctcggcctcctgcggccgtgtgcatgggaggaaggccgtgctgccgagccacgcgactctgccccgttggcagtgggaagcggcaggagggggtcctgccaggggcagccaggggctgctgcagcttacgctcactgtcattctgaaaccctcaactggctttcaaaataacaatttaaaaaatggtcataggaaatgcaggaagttcaggagaaatcccgccccgccccgccctcccaaggcggcctcgttcaagcttagtctccgtctgttctcgggctgcctgcagctgcccccgctcctcagcaggtgtggccgcgtgttcaggagcccccatcagcacacgcgcctctgggcagcccccaacacaaggctcttcctgtcccttcaggctcagctttcccctcccaccgggcagggaggtgctgaggccacgcctgttgtcagcttcctggagaggccatacttagagcccatggtgccaggccaagccactgtctcccgcaccacagtgctgcagccggatccacccaggccaccgcttggcaccatcagacatgctttcttagtttgggccagcccggtgctctgtgcacagtgtgactcccagtggccccttgcgggagggagggtcaccgctttgcttcacaaaaggactgagtctcagggaggggtctccagtaagggccccggagccaggatgtgactgagacaggtgcctccagggccacacactaaccagtacaggaacctctgggggcagaatcatggcctccaaaacacccacatccaaatcccagaacaaacatgttaccattcgtggcagagaggaatgaagattgcagattgaattaaggttgttaatcatctgacttaatttttttagagacagggtctcgccctgtcacccaggctgagttcagtggtacagtcgtggctcactgcagcctcaacctctcaggctcaagcaatcctcccttctcagtctcctgagtagctgggactacgggtgtgtgccaccacgctttccgggcatgcagccaggagcccagggccatctgtggcccaccttgagatccagaatcatccatttcctccaggccccctgctgggctccaactccttgaggaccagagagcagaggttgtggaaggccttggaaacgggtctggattacctgtcctgggaaggtctctcccaacctgagtgtcagacaggggttagctctgctgctcacaattttgtgccttaattcctggcttccctttggggatcttcatcctcaattctgattgacatccttggccacaagggacccccctgctcattgatgcttctcacccgtcacctcactctcatcctcactgctaagcaattagccgtgtgtttgcggcatcagtgttgacaccgatgatccatgctcagagggtacaggcctgaagagctatgtggggactggcgccccggagggggtcccactgtggtggcagcggtggcccccaagccccacgctcactctgtgtgtctccttgcaggacagggtgaggggccttggcctcacggtgttgagacgggagtcggtctctggagtgtggagtgatgtgcgtccagggtgaagctgcagccatggttgatgaggcttcctgagcgcagggctctgtgctcagtgggttttcgcattcattccccagtacccctccgggctgcttgctgctccaagccctggaaaaggatgttggggtttaggaaggcaaaactccatgcccaggtcgtggctggtgaggggcgctccccgcacaaccagccactgcttggctccaactcacgcctggatgctgttaggctggaccctgtctgtttgcagatagcgcctgttgacagatgtgtcctgctgcagacttgaaacgcaggactgagtctcagggaggggtcttcactaacagccatggagccaggatgtcactgagacaggtgccgccagggccacacactaaccagtacaggaacctctggggggcagaatcacggcctccaaaacacccacatcttaatccccagagcaaatatgttaccatatgtggcagagaggaatgcacctgccgcgtctaggaggcagaggggctgcggcgcgtccccaggtgtccccttgtgtcctgacgatgcgtccccaggcatccccatgcatttccaggtgtccccacgtgtccccaggcgtcctcaggcgtcctgccgaacagccctgtgccctccaggtgtgcattgtgcagaagcgggacacggagaagatgtacgccatgaagtacatgaacaagcagcagtgcatcgagcgcgacgaggtccgcaacgtcttccgggagctggagatcctgcaggagatcgagcacgtcttcctggtgaacctctggtgagcctgccatggcctcgctgcagaaagacttaccgtcctgaagccgggaaggcactggctatcctctcctgcccttggtgctccttggccctcgtgcctcggagatgcctctgccacccacaggccctctctagccctcctcatctatcccccttcctgtgccccaggcctggcagtggcccaggtggccatgacatgctggggttggttaatgcagtgtctcttctgagcctgccggaagaccagggcttccctacaatggagatgtgctcccatggagtctctggcactagtcagagagggagagagtttagggactgaaaaactcaccactgtcatcaccatcaccatcaccaccatcatcgccatcaccaccaccatcaccactgcaaccatcatcactctcatcaccgtcatcactataatcaacacaatcactattgtcaccaccattaccaccaccaccacgaccacaatcactgttatcaccatcaccaccaccctcagtcctcactaccgtcatcctcaccatcaccgtcaccaccaccaccatcactgccatcgtcaacaccatggatgctggttgttaaatgccagctctttgcccaacactgtcaagagtggtacctacacggcctcattttctgtaacaaccctccgaggcaaatgtctgtatccccattttaccgaagaggaggccgggcagcctgaagcacccggagctggcactgtagctctgctctgcatttgccactcccaggtgcctctggccccagctgggccacctccagcacagggtggtgtgtctttcctcaggatctgggctcagagctgctctgggctggggtgcaatcagtgccttgggcaggcccctcctcctgggaatgcctggtggctgatgctggggtggggctgtggtccttagggggagtgtgtcagctgtgggagcagccatgactggctccccagctgtgcgcacaacaggccttccatcggtgcccacaggtactccttccaggacgaggaggacatgttcatggtcgtggacctgctactgggcggggacctgcgctaccacctgcagcagaacgtgcagttctccgaggacacggtgaggctgtacatctgcgagatggcactggctctggactacctgcgcggccagcacatcatccacaggtgtgtgcgtggcagacggcgcaggtacctgctgaggtgggcggggctgaagcagccttaggtcaggctgccggcacggcggccgtactccctcagagcgggtctagctcctctgccccacccttgcctgagtgcctgcccccagctgtggcacctgtgccgaccaggtcagccccatagctgtgtgcctggtgtccatctggggggacctcgtcccagcagccccagctgagactgggcacagtgggctgttagccctggtggacagaccaccaggctgggtcacagcaggtggccttcacctggtccatttaactgaaggctcctgtttgcccatccaccacatcccagggaatccaaactaattttaacattagcttaaagcagatgaaattaggaagcagagctggtgtgatggctctgaaaataaaatttaaaaaaagaaaataggaagcagattatgaaggaagtgaaattgggaagcagaaattaggctgaaattccgcagcaatggaacaaaatgaaaatatctgtgaggtatattttaaagtcgaatggactggtgtttgcatttctgctcttggggactcggatgtctgattatgacctaggcaccagtcactgagcactggctgtgtacctggaaaagttgggacaaagcaagagccgaggtggcttggtctcctagaggccgagtcttggagggggagggcagaccctgccagcaattgctctcgtcctctggggctccaggccccctcccagcatctggtgccaggtgtgtgctgctgcccagatgccacagggaacgaagtggctgacttcatcgcctctgcccccacgcaggggtgtgaggtcctagcatcatccaaggaccaagtcaagctcccaggcctctgcctcgagtgggttggtgggatgtcctggggactccagggattgtgacagagattccagggcagaaacagggcagattcccaactcaccttcccactttctgctctttctagagatgtcaagcctgacaacattctcctggatgagagaggtgtgtggggttgggtgtgggcagcccaggtgggtggtggcagggatgggcctgtcaggggaggaggatcctgcacgcaaggatgcatctctggtcctgggacagccacacctgacccctctctgcacaggacatgcacacctgaccgacttcaacattgccaccatcatcaaggacggggagcgggcgacggcattagcaggcaccaagccgtacatgggtgagcccgagctggggttccagatgggagctggcttcctccaggtgggaaggacaagacctcggtggcttctctgtcccaccctggaggcagcctggtctcgggatgtggcctcaaggtgccggccctgtgcccacgggtccgggctgtgaccccgtggcagctgtttttccttctttctgtcggaaagctccggagatcttccactcttttgtcaacggcgggaccggctactccttcgaggtggactggtggtcggtgggggtgatggcctatgagctgctgcgaggatgggtatggaccccctgcagcccctgggcttggctgccaggcccctgctctctgcccccaccagtgctggggagggggtggctgccccagtgtccaggtgcgcagggatgtctccactgtgtctgaggagtcacgcttttatcgaagtgtgtagttggtgatggaatgcctgagcaggaggaggaaggacagactcactgtggtttcccggggccgctgctggtgcctgcaggccagcctctgtgggggtggacaaggctgagaactggccagcaggggtgctgcctcggaactttccacaaaaagtttcttttggggccctgtgctcttacccttgtggccacggcgaggccagtcctggagaccgggaggctgggggtcctcttgtggaccgtacccctcagccctgcacaggaccccacctctgaggaagccagctccctcctggccctctggggctgatctacctggacccaggccccctgggatcccagccagatgggcgcagcagccagggcgcaggacccaggcgtaagctttatctcacccaggctcctccgcggcaggtggaggccaggctgtgctcagagctgtgcctgcacttggggtggggggagggggtcctctcagggcgatggcacctgtgtctggcattgttctgggtgtcctgggggccaggaggacctgcccagcactgcctccctgtctccagaggccctatgacatccactccagcaacgccgtggagtccctggtgcagctgttcagcaccgtgagcgtccagtatgtccccacgtggtccaaggagatggtggccttgctgcggaaggtgagcccccatccctgagcctcctcaccctccgagcacccacctccctccctcacttacctgcggctcgggacaccccctccagtgcacagttagtgccgcttcctggcaggcacagatcccttcactgcaacctgtgggggcctccgcagatggcagccccaagccccaggaagcgagctggtggcaggctctgtggccctctcatggcgagccctaccaggtcactggtgtcctggtgatcccctgagctgcgtctccaggcaccctcacagcaggcttgtgcgcccgccctgccggtcaccacagaggagccctgagccacgtccccttgtcccacgtattggaaggagggtgtcgggtgggtgggttcaagcccatgctatctccgggaccctttgccccagtgcctcctggggaaggtgggcagccactgcccactgcaaacacctctcaggggacatcagcctggcagggacacgggcaggggtgtggccatcagtagtgcctcccatttgtgatctggtgctaggctggggctgtgccttgactgggctgcacagctccctgttccgagcctcgcattaacaccatagggggttcggagtcagagccaggcccaggcaggacagggaggggagtgagtgtgccacacgggcccggctgcctcccggcccccgtgtctcaggcaggtggggcctcctgccctggaattgtagccaagcagcctaaatccttggggaggccttgcctgccggggcctctccccagccccgagagtctcttaactctgctgtagccccacgaagctcagtcacacctgcccaggtggctcacaaggtggcactgggctagagagggcctgcgtggggactggggatgacccacacgcccaagcccaggtctgggaaacctcgcacggggtctgggtctgcggcattttccctggaaaggcgggaggtgccagcgctgggatgttgcttcccaggccatgcatggctgccccgggctcatctggcctgtggaggtcccatgattcggtgaaggaagtggctctgggatagttactgtgaggccagccatgtgccgagtgttagccgctagccgggcctcggctgccacctcctggcaaatcccagcagagccttccctgcagatccctctgctgtcctctggcgccaggggtttaggtagcagcactgagaacaggcgtcccttgggccacatgctgagccagccacggtgctttgcctgatgtcggccgtcggcaccacccttcctcgcgtggccctgaggttcctgaattctgaacctcaggcttggtgggaccctcctcaaggtgccctggcctgggggtggcgggctattccgtgctggtgggctgtgggccctggaccctctgactcatgcctggttgcagctcctcactgtgaaccccgagcaccggctctccagcctccaggacgtgcaggcagccccggcgctggccggcgtgctgtgggaccacctgagcgagaagagggtggagccgggcttcgtgcccaacgtaagcctgtgggcggctcaggtggggggccctggggatggatgtggcgtcctccacgggccggggctcagcacccatccctctgtagaaaggccgtctgcactgcgaccccacctttgagctggaggagatgatcctggagtccaggcccctgcacaagaagaagaagcgtctggccaagaacaagtcccgggacaacagcagggacagctcccagtccgtgagtgccagggcaggctcagggcgcggcggcgggctgggcttggggctcctctctaccaccgagcaaggcgtgtggggacccctggcagcgcacacgtctcggaagtccagcagaccgtttcctgaagtcctgagaaggccagagacctcccttctgcctttcccagcccccacctcgctccttatgaagcaggtgggcagggacaaccagggctggggttatgagtgcacggggatggccatgtgaagccttcgtgcttgcccaggtgtgctggtgttggttgtgtgtgcggggacggctatgtgaagccctcacactcgcccaggtgcgtcagcatcaggtatgtgtgccgggacagccatgtgaagccctcacactcacccaggtgcgtcggcatcagttgtgtgtgtggggacggccatgtgaagccctcacactcgcccaggtgtgctggctttggttgtgtgtgcagggatggccacatgaagccctcacactcgcccaggtgcgtcagcatcaggtgtgtgtgtggggacggccatgtgaagccctcacactcgcccaggtgcgttgatgttgtgtgtgcagggatggccatgtgaagccctcacactcacccaggtgcgttgatgtcagttgtgtgtgcagggacagccatgtgaagccctcagactagcccaggtgtgtcggtgtcagttgtgtgtgtggggatggccacgtgaagccctcacacttgcccaggtgcgttgatattagttgtgtgtgcagggatggccacgtgaagccctcacactcacccaggtgcgttgatgtcagttgtgagtgtgtgcagggatggccacatgaagccctcagactcgcccaggtgtgctggctttggttgtgtgtgcagggacggccatgtgaagccctcacactcgcccaggtgcgtcagcatcagttgtgtgtgtggggacggccatgtgaagccctcacactcacccaggtgtgtcgacatcagttgtgtgtggggggacggccatctgaagccctcacactcacccaggtgtatcggtgtcagttgtgtgtgcggggatggccacgtgaagccctcacacttgcccaggtgcgttgatattagttgtgtgtgcagggatggccacgtgaagccctcacactcacccaggtgcgttgatgtcagttgtgagtgtgtgcagggatggccacgtgaagccctcagactagcccaggtgtgctggctttggttgtgtgtgcagggacggccatgtgaagccctcacactcgcccaggtgcgtcagcatcagttgtgtgtgtggggacggccatgtgaagccctcacactcgcccaggtgcgtcagcatcagttgtgtgtgtggggatggccacgtgaagccctcagactagcccaggtgcgtcagcatcaggtgtgtgtgccgggacagccacgtgaagccctcacactcgcccaggtgtgccggctttggttgtgtgtgcggggacggccacgtgaagccctcatgctcactcaggcatgctggtattctggggctgccaggacaggtgaccacgaatcaggtggttgaagaacagcaatgcgtctctctgagatggatctgagtcgtaatgaaatggtctccttcacagccggctgtgcgtgaactactctgtctcctgcagctcccctgtcttgataattggctgtctaggcagcgggtaaggtgaaccccttgggcagttatgtgatgatctcagtttctgtaaatcggaagtccaggcatggtgcagctctgttccctgcttcggggtctcaccagaatgtgagctaacattgaggtcgtggccttgtcaggtgcagctctgtttcctgcttctgggtctccccagagtgtgagctaatattgtctgaggtcgtggtctcatcagggatttgacaggtgctgtggttgaaatgtttcccttaaaactcgtgttggaatttgcttcctattgtgatggtggtagagatgggacttttgggggctgatggggccacgtaggttcttccagcatggatggggttaatgctgttgtagaagggtgactttagtcctcttttgagtctttgatcctctgctatgtgaggacgtggtgttcccaatgtggacgtggttcgtgttccatgtgaatgtgatattcacaatagagcatcaacaggctcccttttaatcagcagatttaaaaagaaatgtgttgtctcatggcttggaggcctgagtccaaagttaagatgtcagcaaagccgtgccccctctgaaggctctccggggaggaaaaccagtccttgcccctctaccctccggtagaggctgccttggcctagacgcatccccccagcccctgcttcgctgccgcgtggggtcggcctgtgtgtgcgtctccatctcctcccctcttctcataaggacaccaggcattggatttagggcccaccctgatccagtatggccccatcttatcttgatgatatctgcaaagacctcacttccaaatgaggtcacattcacaggtacccaggattagaatttgagtgtgtcatttttggggacacagtttggcccataccaccaggatgtggctgatattcaccaaggagtagctatggttgtgtgttgatgtcagggtgacggtgatgaccctgggtccctcggtggtccccttgcccctgagtctgcctgagcctgtggtggatgtcctgggaaactcttgtgcctcagcccccgtgcagcctcctcagacctggtgggccctgtgttgctcctgggcagaagacgggtgtcagtcccctcctcaccatgatgtggggggcaggggtggggtcatgccctgggtgccctgattttggggggaacacggccccccagtgggtcaggctcccatcctcgcccctcctccaggacggctgccggcagccctgggtgtcctcaggcagaattgctggtggagagctgctgtctgccaggtggccactgtgaggcactgctgagagccacaggatggttggaaggttctcggggttgggggttctttggcattgcccccattggatgtttaagttttccctaccagagcatgtccagagccagggctctggggtgtagaaacaggcccaggatgagttaggaaccctcatgggagactcagggatggacagtgtgcagagcccagctggccatgctgagttcccaggaggctctggctgggaacaggtaaggccaggcacctgtgagcgggaggagctcggctttgtcttgggttggttgtgtggagatgttttggcttgagggtaggaggtgttctgaaaggaaagcatcactccaaaaaaaaagtcccactgttaaccttgaggctgagagaggtttttggaaacagctttattttgatataattcacattccatgcaatatacagtgcatccatgtaaagcatataattccatggtttttaatatagtcacagggctgtgcattctccaccacaatctgattttagaaccttttcatgtaatgtaagagaaagaccccacctattagcagtcatgccccattcccctcttctcccctcccctggcagccacgaagctactttccgtctctgtagggttgcctgttgtgggcgtttcatggaagtggagttacacactatgtggtctttgcagctggcttctttcacttcgcaggatgcttttgaggcccgtccacgttgtagcctgtcagtgcttcattcctgttgatggctgagtaatattccacatatgtatcacctttcctttatccagtcatcagttgatgagtatttgttctttccacttgttaacatttttcattatcatgaataatgctgctgtgaacattcacatacaagtctttgtgtggatatgtacttttatttttggggggcacatacctaggcatgaacccgctgggtcatatgtgactctgtgcttcatgtttggaggaaacacctacccttttctacagcaggtgtgccattttatgcccctaccagcagtgtgtgagggttctaatttctccatatatttaccaagtcctgttattgtctggtttattttttaaaaaatcatagttatcttagtgtgcagtgattgtgtggttatggtttgcatttctctgatgatattgaacatcttttgaggtgttttatcaggcattgtgtctagagaaatgtctatccaaatgttttaaaatttttattgtcttttttttagtctactctgacaatatattttaattggcatatttattttactttatttttttttagagacagggtcttgctttattaccaaaactggagtgcagtggtgcaatgaaggctcacttcagccttgacttcctgggctcaagtgatcctccctgccccagctgccagaatggctggaactgtgggtgtgcaccaccacacctggctcatttgaaaaaaattttgttgtagagacagggtctcactatgttgtccaggttggtctcaaactcttggagtcctcccacctcagcctcccaaaatgctgggattacagatgtgagccactgtgcctgacctaattggtgtattttagaccattcacatttaaagcgaccagggaggctgaggcaagaggactgcttgagtccaggagtttgagaccagcctgggcaacaaggtgagacccatctgtattagtctattttcacactgctaataaaggcatacctgagtctgggtaatttatacaggaaaaaggtttaatggatttacagttccacatggctggggaggcctcacagtcgtggaaggcaaggaggagaaagtcacatcttacatggatggcggcaggcaaagagagagcttgttcagggaaacttttgtttttaaaaccatcggatctcatgagactcattcactatcatgacaacagcacaggaaagacccgcccccataattcaatcacctcccaccaggttcctcccacaacatgtgggaattgtgggagtcacaattcaagctgagattgggatggggacagagccaaaccatatcattctgccccagcccctccaaaatctcatgtcctcacatttcagaaccaatcatgccttcccaacagtcccccatagtcttattttggcattaactcaaaagtccacagtccaatgtctcatctgagacaaggtaagtcccttctgcctatgagtctgtaaaatcaaaagcaagtgacttcctagatacaataggggtacaggcactgggtaaattcagccattccaaatgggagaaattggccaaaacaaaggggctacaggccccatgcaagtctgaaatccagcaggcctgtcaaatcttaaagcttcaaaatgaacatctttgactctatctctcacatccaggtcatgctgatgcaagagttgggttcccatggtcttaggcagctctgcccttgtggctctgcagagtacagccttcctcccggctgctttcgtgggctggcattgagtgtctgtggcttttccaggtgcatggtgcaagctgttggtggatataccattctggggtgtagaggatggtggccctcttctcagagctccactaggcagtgtgccccagtggggactttgtataggggcaccaaccccacatttcccttctgcattgccctagcagaggttctccatgagggccccacccctgcaacaaacttctgcctggacatccaggtgtttccatacatcctctgaaatgcaggcagaggctcccaaacctcaattcttgacttctgtgcacctgcgggctcaacaccacatggaagctgccacagcttggggcttgtaccctctgaagccacagcctgagctgtaccttggcccctttcagtcatggctggagcagctgggatgcagtgcagcaagtccctagactgcacacagcagagggaccctggacctcgcccatgaaaccattttttcctcctaggcctctgagtctgtgatggtaggggctgccgcaaaggtctgtggcatgccctggagacattttccccattgtcttggtgattaatattcagttccttgttgcttatgcaaatttctcctcagaaaatggggttttcttttttttctctctttttttttttttttgagacagtcttgctctgtcacccaggctggagtgcagtggtgcaatggcggctcattgccactgcaacctccgcttcctaagttcaagtgattctcctgtctcagcctcccaagtagctgggattacaggcacgcaccaccacacccagctaatttttgtatttttagtagagaagggtttcaccatgttggccaggctggtcttgaactcctgacctcaggtgatctgcctgccttaacctcccaaagtgctaggattacaggcgtgagccaccgtgcccagccaggagtttcttttctattgcattgtcaggttgcaaattttttgaacttttatgctgtttcctttttaaaatggaatgcctttaacagcacccaagtcacctcttgaatgctttgctgcttagaaatttcttctgccacataccctaaatcatctctcaaattcagagttccacaaatctctagggcaggggcaaaatgctgccagtctctttgcttaaagcataacaagagccacctttgctgtagttcccaacaagttcctcatctccatctgagaccagctcagcctggacttcattgtccatatcattatcagcattttggtcaaagccattcaacaagtctctaggaagttccaaactttcccacattttcctgtcttcttctgagccctccagatggttccagcctctgcctattacccagttctaaaaagttgcttccacattttcaggtatcatttcagcagcgccctactttactggtaccaatttactgtattagtctgttctcacgctgctaataaagacatatccgagactgggaaatttatacaggaaaaaggtttaatggacttacagttccacatggctggggaggcctcacaatcatggcggaaggcaaggaggagcaagtcacatcttacatggatggcagagagagcttgtgcagggaaacttttgtttttaaaaccatcagatctcatgagactcattcactatcatgacaacagcacaggaaagacccgcccccataattcaatcacctcccactgggttcctcccatgacacacgggaattgtgggagtcacaattcaagctgagattggggtggggagacagccaaaccttatcaccagctctataaaagacaaaaaaattaggcaggcataacagtgcatgcctgtagttccagtgacgtgagaggattgcttgagtccaggagtttgagaccaggctgggcaacatggcgagaccctgtctctacaaaaaaaaattatctgggtgtggtgggatacacctgtgataccagctacgcaggaggctgaggcagtaggattgcttgagcccaggagttcaaggctgcagtaagctatgatcatgcccctgcactccagtctgggtaacagagagacacgctgtcttgtaaataaataagtggtcatttatatagttcaatatgatatctaccttatttgtaactgtagtctatttattgttcttcctttttccctatttttctgccttttctggttttaattaagcattttatattattctagtttatctcctctcctggcctgttaattatacttctttttgaaatatttttagtggttggcctggacattgcagtatacctttaccatacagtctaccttcacctgacactctgccccctcatgtgcagtgggatgccttgtgacggcacctctcgtgcaatcctcctgttcctgatgacattgctgtcattcatttcatttatctgtatgctataattgctcattacattgttactactgttattttaaacagttatcttttggatcaattaagaaaaattaaaaatttcattttacctctattcattcctcctctaaagtgcttcctttctttatgcagacccaagttgctgacctaaatcattttcctttcccctgaggaacttcgtttaacatgtcttataggacaggtccaacagagatgaattccttccctttttgtttgtccaaaaaagtctttactttcacctttaaataataatttcactggatatagaattctagattggtaggttttttactttcaacactttaaatatttcactccgctctcttcttgcttatgtgatttctaacaggcagtctgctctaattctttttctgtaagtagaattcctcgccaccccccacccccagctcatttcaagattttctctgtctttggttttctgcaatttgaataatgatatgcctaggtacagatttttttttaatattcattctgcttggtgttctctgagcttcttagatcctgtggtttggtgtctgtcattaatttcagaaaattcccagtcattattatttcaaatattctgttctctttctcttctcctgctggaaatccaattatgcgtgtgtggtgccgtttgaaattgtcccacagctcttggatattctgttcatttttttcactcttttttttttctctttgcatttcagttcgagaagtttctgttgacatttcttcaagctcatagatccttcctcatctggatccagtctactgaggaaccatcaaaggcatcctcatttctgttacagtgttttctacttccagcatttccttttgatccctccttggagtttccatctctctacttacattgcccttctgttccccatctgttcttgcctgcttttcccctggagcccttgccatattaatcacagttatttcaaatttcctgtttgataattccaacatgggtgccatatctggatctgttctaatgtgtgcattgtctcttcacactctatttttttccttaagaccttgtagtctgccttgtaatgtttgttgaaagctggacgtgatgtatctggtaataagagctgaagtagatgggcctttagtgtgaggtttatgtaatctggccaggtttggggcagggtttaaagtctgctgtagctgtgggcaccagaggcttcacatttgttttcatttcccgggttgcccttgggcttgcctaaatcctcctcctcagagagagtctgcgtcttgtggccctctctgctggaatccctgtcacactgcggaggccctgtgggtgtgttgggaagatggtggggagggaactgttccacagtctgtgaccaaatctcagtcttgggggcctgtgccccttcacagttgttgatctgcttttcccctccccttaggtgagacaggctaaagcggggtacaggctgaaaaacagtcctcccccaagtgagataagcctttcctttggagagcaaattccatttgctgtggagaatgctctgggtgtatttcacagtggtgactgtccccatcccatgccagagccaggaagggatcatccttggcttcattaagacctggcagggttcctggaggggaaacccacaaaacgttgggggcctcataagaccgcagccgcaggagttctgcacacggccccggccgctccccagagctgcccaggaggtgttcccacacaccatcagttctgctccaggccagcaggtctcagctgtgactttgctcacctgtctctccagacttgggggtcgccgcagcgctttgacctcagctctctgataggtccaggaaaagtcattgattttcattagttcagcatttttcctgtcgcagggatgggagtgaggccttccacgttgtttaccgcagagcagaagccagaagtccttgctcgtctctgtgtttcttcgtcggagtcatgtcttttatttcctgaacgcaggtgtgtggtcagacaggagattggcaggtatttcctcctgttccatgggctatcttttctctttcttgagggcatcatttgcagcagggaagtcttggaccttgacgttgtccgatgtggctgtttcctccttggctgctctgctttgtctaaggatccatcacctcagctgaggccacagggatttactcccacactttcttctaagtcttgtatagtttcagctcttgcgtttagctgtgtgattcattttgggttaatttttatgaacaatgtcaggtgagggtccagcttcattctctcatcggtggatatctgactgtcctagcaccatttgctgaagagaggattctttccccattgaattgcttttgacatcataccttgttttttgacttgccgttttatcccattggtccagacgtctgccctgcgccgggactgcaccatcttgataactgtagctttgtagcaagctttcaaatcaggatctgtgaatcccccagttttgttctttttggacattatttgactgttctgggtccctggcatttccactgaatgctgaggggtctgacagttgcatctgagctgccaagcaggtttgtggcggtgctagggactgaagcctgctccatttcccaggcccctcctcgctgtgggtgacatctggggtccgaggctgtgtctcagcatgtgtgaaggtgccacaggtgccctgagatggggattcctggtccagttactcagaaagtgcatccaggagagacccccgcccttctcgggatgggagatgccagcagagcttggctttcaagcagaaatctggaaatcctgtggggagtggcttcggacttcaggggacctggagcgtcacttgcggttcaagaggtccctgccctgagggagctgggctctcaaacacccacaccagtcagtcatgggcgaagggcccctctgtggccttctgactgtgtgtgtgctggcaaagggttccagccacccaaggaggaggcaggggctgtcagaggaagagcagggcagatccaggccaggcacagaccctgccatggggtactgctggcggcgctacacacaccttgggaagggagtccctgtggaaaggggtcgtggtcacacatctaggtgacacagcccggcttgggcgctgctcagagccaccccttccagatggttctggagcagctcctcaggcttctggtggcctctctgcctaggaaaacatggctgtggacgttgcaggatgaccaacagcccctgccactgggctgcacacagggccacgacgggcgctcatgttctgcatcactggcgcccaccccagcccctcccaccttgtgtcgctgtgaatcgcaggatcccagcggctcagtcggaccctcattcctgagtagtctgagccttaggtcaccgtcaccttctcaggccggcccgagtttgcagacttgtctgtctatatcagggttagaccagagagtgctgagacacagcagatcacccagcctgtcctcttcttgatgactaaggacaggtcccctgccaggatcgtgactcctttaggggaggccacagtgacagggcaaagcctggagggagagagccacatggagaggagagggctgcccgcagagagcgtgggagtctgccggcttcttctcgagtccttggcaaggtgctggccgctcacaccgtgtacgtgtggggaatgcccaggaccagggtgacaccaccaggaggagcgggcgggacagtccccactcagggctaggaagagagagtccacattcccgctgccagggtgaaaccctcacaccaccacagatccaggagagacacggagggcactgcctcggggtggggaacgtgagctgctccccaaacccaagaaatgtgttgagccctatgcttccttcctcgtgggaagaggcgcaaggtgagaccgcttgtcctttatcttggcgggcacgtccgagtgtgacgcacgtcagcaaatccctgaaccgttcatcggagaacagccttctgcatctcccacactctgttcgtgggtttacagggtgtccagagtacttgccacttggcaatcagcattaataggatccacagggccaggcatggtggctcacgcctgtaatctcagcactttgggaggccgaagcaggcggagcacctgaggtcaggagttcaagactggcgtggccaacatggtgaaaccccgtctctacaaaaattagctgggtatggtggtgggcacctgtaatcccagctacttgggaggctgaggcagcagaatcacttgaacctgggaggcggagttggcagtgagccaagatcacgccactgcactctagtctgggtgacagagcgagaccaaaaataggatccatggatagcaggcaagagtgtccaggtgttcgaggcacagacgacactgtgacagggaagagtccccttagccctggctggggccgtgaaagcatgctgttgtccgtctcgggtgaacgcagactgttgtcacgcattgcataacgatgcttccgtcactggccaatcgcatgggggggtggtcccgtaagatggtaacactgggttttgctgtacgttttgtatgtctagatagggttgagcgttctggtgtgtacccactcacacgtcccctccgaccttcagagcccagctccctccctcccagggccttggctgtgacgtgggtgacttcctatggatctgaggttctgtggtcctcacaagtgggcatcctctggcctcagctgcaggaggtgggggcccttttaatgccacccgaggcctgcgactccctgcacttttcactgtgacttggctcatctgggtctgtcatttgctcacgcgttggtagtgaccaacgtcaccatccaagttcacggtcaccataatgatgctttccccacaccatgccagcgctgagcggccagcaccccctccaccccacccacgccctcccccgacccctgcgtcctgggaagtggtcctgctgcctgaaggaagtagtcctgcctgcccatcacacaccagtaagggtgggtcctgccaggggcagcctccgtccacaagcttgccctgaggacctgcttctaagacagccctggttccaggattctctgggcagggccccagaagcaggcctgggacaggtgtgtgtgtgctgtgatgaggggctgggagaacccggtatgagacgggaaaggcccggcaagggagtggtttccagcaaagtcccgcagagaacagcttctgcctggtcctgcaggccccacggagcaagtccaagccatccacccagaggcaagggagctgggccttggcatcctcgggcttgggtgagtcacccgcagagatgcgagctcccgggcagtctggctgctggagggccggggcacttcaatagcccagaggccgtcatccaaagccacaggtggaggcccgatggggatgcccagacactcacttgaggggacatgggcggaacctggacagcgtcccccacgctcacgtgtgcctttccatccacaggagaatgactatcttcaagactgcctcgatgccatccagcaagacttcgtgatttttaacagagaaaagtgagtgtgttgggggtgggtgggcgtggtggcagagaggaggaaaatggggctaaggttaaggttttcttggccacgtgagcgggcacctgtgggcctggggtgcgtggccctgctctctttggggactctgagcagcagctatggaggggagcggcgggaggcccctgccaggctctggcatgtttgtgctccacgcggggcccgtggctggaatcttctggggagagacacatcatttgcccagatgaggggtggtgacttcctaggaggccccatcagagccacgtcaactcccccacccaggcacgccctcagtctctcagcagacctttcctgaatgtcaggccccaggggacagaaagggcacagatgactggcagcaggcaaggcaggccagaaatagcagcagctgccacggtggggcccaagggaggatggatgctccctctgcccgcacggggcaaggagggcctcctggaggaggtgggtctgagctcttatggacaggacgtgcagggcagcacgtgcagacggctgagggcactgactggcaccctggggatcagatgaccgggtgaagaatgaggcttagccgagcctcattcccaagtcactgacctatggcacctgcacagtcaggcctttcggcttctggctggaaacacgccgagcctcgccagcatgctcacgtgcccccacccgtccccaggctccctgccagtgtatcgggagcatggcctctccagcagacaccgagcctgtggcccacgtttgggcatccacgccatggcctaccccatgagcccgtgggcaggtcatgggaccgtgaggccagggaggtgggggcataacgccctccatgtgttcctgccaccccaggctgaagaggagccaggacctcccgagggagcctctccccgcccctgagtccagggatgctgcggagcctgtggaggacgaggcggaacgctccgccctgcccatgtgcggccccatttgcccctcggccgggagcggctaggccgggacgcccgtggtcctcaccccttgagctgctttggagactcggctgccagagggagggccatgggccgaggcctggcattcacgttcccacccagcctggctggcggtgcccacagtgccccggacacatttcacacctcaggctcgtggtggtgcaggggacaagaggctgtgggtgcaggggacacctgtggagggcatttcccgtgggcccccgagacccgcctagatggaggaagcgctgctgggcgccctcttaccgctcacggggagctggggccatggatgggacaggagtctttgtccctgctcagcccggaggctgtgcacggccctcgtcacaaggtgacccttgcagcacaggccgcgggtgccccaggctcggctcaggtcttggaggtcaagggcatgggttggggtagtgggtggggaggtgaatgttttctagagattcaaactgctccagcaatttctgtagttttcacctctgagaattacaatgtgagaaccgctcgatgttgca

SEQ ID NO: 303 - DNA, 56108 bp, Homo sapiens
  source 1..56108: mol_type = genomic DNA; note = NC_000014.9:c64505213-64449106 ZBTB25 [organism=Homo sapiens] [GeneID=7597] [chromosome=14]
aaagaaggtaactaatttgggaactagtctccgtaggggcttcgcctccgactcagggaggccgcacgcccgggacctgacgcgccggcaacaagcaggcggcctggcagccgcccgtcaccgggtcctcgcagcgcgtccgccgcgctccggctccccgcacggatcggcgcccctccggccccgcactccgccaggcccgcggcccgtcgccctccggcctgggccaaagttgcgcaaatagccccacaactggcaaatacttaccggccgcaacaggaaccagagctgcggagattttagggagtttaaggcaaatcagccgcgggaaaggcgggcgaaggcgaaggggccgcgagctgcagtggcggcggcgcgcggcgctcggcgctcgggctgggctgcgcggagaggctctggctctgccagggactgtgctgcaacaaaggacttccgctgccgcacagccgcgcctgccgcaccgcactgagccggccccgcttacgcggcgactccgggtctgcccaccagttcgctgcggcgtccgccagccttcccctccctctcgcccgcccacccactctgccgctggctgctaggggcacccgcggtcgcctgtttgttgcaacaagtttctgcgtcgagctccgaggaggctggcgcaacccgcaccgcgggggccgtcgcggcggcggcggcttgaccacccctcttgcccctctcaagggtaggcttgggacctcctcctcctcctgtttgcacagctggatggaactgggctcctcccgactccccagggcaggatgcgaggctgctttcccactccgtccagatgtcagacccctgcccgttgggcccagcagctgggccgtcactcgcggtccgcctcgagtgctccggcaacctcgccctgccccgtcggttcagggtcgcccagtccccgcgcccccccgaccccaccttccgtgggcctgctgcctctggccctgagtcacttcccccgccatgccccacctcgcccagtccgcctctccacccaggctcccgcggctcggcctccctggccccgcgccctcatcccttccccagcgaacacgcgggcgcatccttccccacccccaccttcaccccagaactgagggggtgcctgtgcttttgcacaccctggggaaagtccccgggtcacgcggttgtttgtggggagcctgtgacgctcaggcttgtccctatgcttccgcctacagagtcacaactgcgaactgtggcggcggcactcagagcgcgggccgacccccgcccggccactgaggcgggcgggcgggagggcgcgcacgtacgcacgcacgcacgcacgcacaccccggccctggcgcccctctttcccctgctaccagacacgcggtcacgtggggccatcgcgggctgccggcgcgggaagccgcgcgagaggcggccgaggggtgcgtgagccggcgccactgcttgcagtgcgcggcttgggagcccgcccctcctgcacggaggagtcggcctgccgccgcggcggcatctgggtaagcgacgcggtcctgcccctgtgggctgccccgggctcagtccctcctgccgcgagccacccagggcggcggcctgcagctgcaccagtcgcgggacagatgcaagtagctggggagaggggtgtttttggtccgattgagatgtcaggcagggcacaggaggaaaatacatccgcgagtgagcgctgggccgacaatacccagaaccaccctttgctgctcgtaggagcggctgccggggcctgattcagggtggcacacggggtgccgcgaaggtgcagagccgtcccggccgcgggtccgggtgcgacccccagcaggaaaccccagtaggcctgcggcctccctcgggtagcgccgacccctcttacgagcgggcgactttccagatgctgggaggacgctgcggctactgtttccactcccagcttgtgattacctcgtttctagggcaagaagacatcccccccttttctatcttcaaattatgtttatcttgttctaagcatatccggtttttctttttgaagcttgacccatcttatcaccgtcttctctggcactcagtatttggagtaatcagttgttaccagttgcggaggcagcgcatagcacaacgtagtacctggaacctgacggcacctagcatgtttcaacagttagcgcccgcatcaccccaagggattaaatttggcattctttctcttgagactcaagtcctggcagagctgttgatcctctcacaagattctgtcatgtatgtaaagtacactttggaatcttaaattttagagccgagaggtgccttatagaaaatctgtttcatccctctcgttttacagagaagacaccaggcctgaagagcgtgatgtagctggagctagctacacctcttgatagctaagactccaaggctccagacaccttggtgattgcactctccaccatgccaggaccgcagtgccagtttaccccactcacctgtagagaatgtatccggcggaggtcattatatatacttggcttgattcaggttatggagaagtcaggcatggccactgtgtgggtttgatggtatttctaggtgaggtaggccgcctatggtgtatttttggaactaaaagcctacaccccccagccacccctgaaagtttcattgctgttctctattatttgcagcattggttgcttccttatgttaaggcatcaaagtcttctttaacaatctggatatattttagttaagggtaaatcgtgaatccgttatcggacatcaactccttaatagggaacagaacactgatgggatatgacatggaacagattaattctgagagctggcagtcagtgaaatatcaaggtgtggtcaggaagaaaacagaaaggaacccacgtaacctgctaacaccttttttgtccagtcctaccttgaatgtcttatttgcatgtagtagagatggattctgctcaagttggccgctgtttactgagtacttgcagtgggccaagtatcatactagctgctttcgtagatgaactttgtgtctttaccaaaaaggagatggtactgtcttcatgttacaagcctgaggaaacaggctcattacctgggctgtggtaatacagtcattcgcagtagaatttaagcctagatcgcttatctctcaagtccaatcagtgctgttttgcattatatcttgctcctgtttcagccgggaagggaatgagagaatcgcctgtggctgatttattggcgcctgtggttgcccagagaggccaagcaggactttcagctgccctctatgccttacaaagtggagctgtgagcttccaccctatctcctgaggggaatgtgaaggagccaggctgtctagctggggaggaggtgccttggccgtaaaatatcctggccagggctgtgctgggaagtgttgcataatgtcctccccaccactgaaccaaagtgatttatttgctatggtccgtaggtggtgcctgaccaacttgtccattttagcaataacagggccagaaaagagttgggggttttatattattgcagggtttttccttgttttaaaaaagcagtgcaggtgctcttatcttgataagttataaagtgcttctttctgcaccacttcctgtgccccttttctgtgtatttattccaaatagcatgtgaacttcagtcttttaagaagagaaagctaagaaaatattgctccagtttattagcacaggctatggagacagacctggctttttatctccactttataccatttgctgattgtgtgtcctaagcttaggatttttcctcatttgtaaaatggaaatgaaaataatacattagtcatcacagtgacgattttaagagatagtgtatatagagcacttagcacaaggcctcgcatatagtatttattataataataggttttgaaaataaccagaatagtattctccctaaaaaggaaagatattgctacttgaacctgcttagggatagaggaggaagaagaaagtgtttgtaacaaacatcagtttcaggattattgattaaatttttttatacttctggggttttttttgtttgtttgttttttgagacagagtctacctctgtcacccaggctggagtgcagtggtgtaatttcagctcactgcagcctccgcctcctgcattcaagcgattctctggcttcagcctcccgagtagctgggattacaggcgcctgccaccacacctggctaatttttgtatttttagtagagacagggtttcgccatgttggccaggcgggtcttgaactcctgacctcaagtgatccgcccaccttggcctcccaaagtgctgggattataggtgtgagccactgtgcctggtccatgttttctttatccatttgactatccatggacatttgagtttttcccccttattggcaattcttctgcctcagcctcccaagtagctgggattacagacgtctgccaccacgcccaactaatttttgtatttttagtagagacggtttcaccatattggccaggctggtcttgaactctgacctcaggtgatccaccctcctcggcctcctaaagtgctgggattataggcatttatttaccgttctgctttccctttgctagcaggaattttctttctctctctctctcttttttttttttttttttttttgctttattgggagaaaaagtgcttagagtgttcagttattttttatatttttctaattcatttcttctctggttacaaatcagtcatgcatggatgttttattttttctgaaatctccaagcactttaagcaaaggtttttattagcccacttgagtagtgtgttcatgggagtatacttccattgcgaaagaagtattggtttacttgtatccagaagttttagttactcttgcctgtactgtattctaggtctgtactagcattataattttccatctttctcctgtcctttgagtaccttattttttcttttagaaatttggtttgtctttaatggactgagaggaatcttttcctttctttctccgggttctgattttttttaaaggtctattaacaatttgtgcttactgttgttagtattcttgtgtgcttggctttatcaggcatcctacaatgtaatgttggttagatgggaattagaggtgcttggaggttggctatgtctgccaacaggcaggaggccccaaactaacgtttcccagttccattaaaggtttctagagcataactactcttcctgtttcatctaccccctccataccctctttgctaacattctcagtagatcttaataagcagatgtctggaattacagcagattttacctcaaacagtattttcagatttagaatttctgtatcatttttaggtgttatgaaatccaatctaggtgtaatggagtaagagagtaaatatttctttttcctaaatactatttgaaaagaagtctgaaaatagtgtgttcctccacccccccacccatgcccatcctgccagtttaggagcacttttgattcttttttttctttttctttttttttttgagatggagtttcactcttgttgcccagactggagtgcaatgacacaatctcagctcaccacaacctctgcctcctgggttcaagcgattctcccgcctcagcctcccgagtagccgggattataggtatgtgccaccacacctggctaattttgtatttttagtagagacggggtttcttcatgttggtcaggctggtctcgaactcccgacctcaggtaatccacctgcctcggcctcccaaagtgctgggagcgagccaccatgcctggccatggagcacttttgtttcttaatctggccaatattttaaggttacaattagaattacagttgtttatatttgttcatttaatgtagtcaacataatttccatactttgaacactcttacggaattgtttatttatagagactagtataaagttgttctatcttacttagtttgaactaatccagagttatacaatctagaaagtaaagaaagtttttattgtctcttaaatatcaatgtaattgtagagtgtgaaataatttcttgggtttccttggtcccgtgttcttctgaggcagtggttcttaactgagcagtcacgttagaatcacctgggaagctttttaaaaaaagaatctgggctgggcgcggtggctcacgcctgtaatcacagcactttgggaggccgaggcgggtggatcatgaggtcaggaaatcgagaccatcctggctaacacagtgaaaccccgtctcgactaaaaatacaaaaaaattagctgggtgtggtggtgggcgcctgtagtcccagctactcgggaggctgaggcaggagaatggcgcgaacccgggaggcggagcttgcagtgagccgagatcgtgccactgcactccagcctgggcaacagagtgagactctgtctcaaaaaaataaaaataaaaataaataaacaaataaacaatctggccgggaacagtggcctacgcctgtaatcccagcactttgggaggccaaggcaggcggatcgcctgaggtcaggagttcaagaccagcctggccaacgtggcgaaaccccatctctactaaaaatataaaaattagccaggcgtgatgggcacctgtaatcccagctactcaggaggctgagtccgggagaagcacttgaacccaggaggcggaggttgcattgagccgagatcgcgccattgcactccagcctgcagcctgggcgacagagcgagactctgtctcaaaaaaaaaaaaaaaagaatctgtgcctcacccctagcaattcaattctgtttgggctaagcctgggttgggactcagacatcaatacagctctgcatagaaggttttacagtatagtcagcaataagaacctctgtttcaggataaaatgatttctacaaacattgtttcattctctacataattaaatgtcacacctctacagtcatgtgaaagttccattaaaaagttagtcgctatataaagtcttttatcatatggcacttgaaatattttgcttttgcctttgtatttatagccatgagtaagtagctcaaaaaagatgtacatattcctctgccaactttcctgtctccttgtctgaatgaaaattcatcataaagtctcagtggtaagcattgacagagaaaatacctaagactgttttcctacagaaacagtcgtcttgctctttttgttccttttttattaaggattcttacagcctgagagaatgaagagctgtgtagtccaggatatccggctggctaccatagatctgagagtccagtctagtacagtagatttttctaaatacataagaatcaaagatatgtattgaatatcaagccagctttaaacaaacatagatactagtataaagttgttccatcttaatttgaagtaatccagagttactacaatctagaaggtaaagaaggtttttgtaatctcttaaatatcaatgctaaaactattatgataatgtatcactttgataacagataaaacttttaaaaatgtagcactcatattttgattctggtatttataagtataataaaatactttatttttccataatttctctcacatcttaaaattctcaccagaaattctcaaatgtaacttctaagctctttctgtattcatgggaaactttagctatttcacatactagagaaaataaaatagacagtcaaagaatgatgagcaaaggctatacaaaaagtctagctaataatttgcagagtaggttgtattagaaaatgttctaataactcaatggaatggggctattgatttgaagtaaaatctggtatattacaacatcaaagatctcctattatgcaaaacaagtttgaatgcacctcatgtgtacttggtgttttttttttaatagattttaatttgtttcattttatacacttgaaaagtttactcccttatttgattcaacatatttgcaaaatctgccaacagtgtaaatgttgaaagttctagatggggttttgaagaaagggccctgggtttaaactcagtcttgatgtattatcagcaccatttaatagctagttgtttgacttcaggtatgtttcctgccttctctgagcctgtggtttctcagccataaaatagagctgatagtacctgctctactacctcacaagatttaaaagaaaaaaagatagtgtagggcagtggttctcaaagtgtagtccaaggagccactggaggtttcatgggtcaataaggatctcccttatgtaagaacagattctcaatatacttgaaccaaaacaagagatgacaacagattgaatgcagaatcagataagagagtccagctgtatctgttaaagccagatattaaagaggattgcaaaatgtaaattaatatcacccttctcacttgtttttgaaaaattttttaggaaaaaatatgttaatatgtaatgggtttattgctattttaaatattttaaaatttcttttaattttgaatatagtaaatattgataaatataacctatataaacaacagctcttcacaatctctaatactttttttttgagatggagtctcgctctgtagcccaggctggaatgcagtggtgtgatctcggctcactgcaacctcttcctcccaggtcccggttcaaacagttctcctgcctcagcctcccgagtagctgggattacaggcacacgccactgtgcccagcttttttttttgtatttttagtagagacggggtttcaccatgttggccaggctggtcttgaactcctgaccttgtgatccgcctgccttggcctcccaaagtgctgggattacaggcgtgagccaccgtgactggtctgtaatactttttagagtgtgagtggatcttgagaccacagctttttagaactgctgataaacagtaatggttgagtagggctgctctgcctatggagtagccattcttttatttattttctaataaattgctttcgtttaaaaagaacacaatgttgggggagggggtaatggttgaatagttcctatcaggacagtttcctgcagataactataaacttgatacactttttttttttttccttttgagatggagtttcgctcttgttgcccaggttggagtgcagtagcgtgatctcagcttaccgcaacctctgcctcccaggttcaagcagttcacctgcctcagcctccagagtagctgggattacaggcatgtgccaccacacccgctaattttgtatttttagtagagatggggtttctccatgttggccaggctggtctcgaactcccgacctcaggtgatctgcccgcctctgcctcccaaagttctgggattacaggcatgagccactacgcccagctgataaaagttttaaaaattaatagatggcatttgagaattacaaaaactagattgaggtctgcaactggaagaggagaacagcaatgaataagcttctgtttttatggcttttagactggcataaggtcccagctggtgatatgaagaggtggctacaactgtaataacaacctgtaatctctcttgaagaaaagaggacagagctcacagtgatcatgcagctggaaagtgcaggagaaaatcctagaaagaatgttggagtggcagaaccccaaacactgtttataaactctgcttgaatttcttgcaaacccctcaactgtacatgtgtggagcagcctccaaacagcacacttaaggctaaaggagcagagatttcagctgctgtccaccataggggaggcagaacttggagtttaagtccagctaaggtaattgtctgcaaaaaacaaaaacacaaacactctttggaagaatattacagaatctagagtgaattgtattaatcacaatacctagactataatccagaaacaatcaccctaatcagtggagactgaccccataattagccaaaggttggatttagcagagaagatttaaagcagcagctattataactatgctcaaggatgtaaagcaaaatgttgtatatgtgaacaaataggaaatctcagcagagaattagaaactttaaaaaagaatgaaatgaaaattttacatctgaaaatacaatatctgaaacaatcttgaatagatttaacagatcagatatgacagataagtcatttaatttgaggatagattaatagaaattatctaatctgaagtagagaaataagttattgtatatgaaagttctctgtaaacttcagtgctctatgtaagtttcagagtttattactccaggtttctttcatatgtaaagggaagaggtatgtttgggtcttctgatctgcagcttccttaatgtcctgtcctgtcatgtctgtgtctaagctttataccctctggtttctttatttttatttttttatttttttttgagacagagtctcgctctgttgcccaggctggagtgcagtggatctcagctcactgcaacctctgcctcctgggttcaagtgattcttctgcctcaacctcccaagtagctgggattacaggcatgtgctaccacacctggctaatttttgtattttgagtagagacggggtctcaccatgttgttcaggttggtctcaaactcctggcctcaagtggtccactcaccttgtcctcccaaagggctgggattacaggcgtgggccactgcgcttggcctagcctctggtttctaatatcccctgcagtcagatatttggcccttgctgctttcctgtactattgtcagaggttaccaggaatcttttggtcagtacactcgacatgtttgtaatgggcctcacccccatgtttctcttcagtgttttgcaccattgccatctcctttctgcaaggtcattgcctttcctcaatgacgatgttttcttttttctcctcctctgtcttattttgtcttttctgttttccaaagattcattcttagcttttttccctcttatttcattctactttttagtctactttattattttcatacttggttacttcagccttgtcgtttcagaggcctcttctccctctctggctctgctctctctagagccctgtcctgcttcttgtccccgctgatcactaaacatttctacttagatacctggtagacacttggagctcagagtgtctgaagtgaaacccctattcttcttcttcttttttttttttttgaggtggggtctcagaacctcttatcaagacggtttctgtacttcttctctaatgttctgggactctgcctttatatcaacacctagcacatggcagttactctgaaaatgtaatctgaaggaatggatgaattcttccaattacccaagctggaattctgagactcacctttgatttgatctctgtggtgacaagtcatgtcagttttgtgtctgatgtatctcttgtattccttccttcattcccactgcgattactttgataccatagtaggctcctagccagtctttctccatgccttttcccttgctaatattttttatatgttgctgttagagcagtctttactcacgcctaatgatggtgatgatgataatgcctagtatttattaggcactaactgtgggcccactgtttctaagtgcattatatcattaaattcaaataacctataagttagatactgtcattgtccatattttataagtgaaatggaggcccagagagttaagtgtcttgccaagaccacgcagctagtaaatggcagagctaaaattttaagctgtctgattttagttcaagctttaactaccacgctctgttctccctcccacagagtaagttaactgatcatgctgttcttactcaaacatcttacatagttcacttcaaacacgacactactttttagtcttatattctgtatgctttttgaactgaccacatttcattatttctgttactttttttttctatgccaagctgaatccttctgttatctaactattcatattcttcccagtaattttattcattttattttttctgcctggccttgtttcccatcaagttgcctgtgtttatctccctctgatagcatgttctctaactgctctgtgctactgaatgcatttatttcatattataattatggtttgatgttttatctttcctgtgagcctgtaatcttgagtgtagcatcttgtcatttttttctgtctccacgccttgtacaatgcaggcttttacacattttttctttattaaattgctcttcaaaaatatctgttgaataagtgaagaatttaactgttaccaacagaccattaaccataagattcctgtatgggtggcttattagtgtgctatgtctcatttccctatggttcagtagttcaatataatgggaagaactggtgaaaatgtttatgatccgagggtttggttttgttttttttttttgagacaacttatcaggctagtttaagatgcttcaatatgaaccatttcattgattctaagacacgtttttcacatgctgaaattgtcaatacagatttttagtttgttaggccgggcacggtggctcatgcctttaggaggctgaggtgggcagatcacctgaggtcaggagtttgagaccagcctggccaacatggtgaactcccgtctctactaaaaatacaaaaattagctgggcatggtggcgggcacctgtaatgccagctacttgggaggctgaggcaggagaatcgcttaaacccaggaggcggaggttgcagtaagccgagatggagccgttgcactccagcctggtcaacaagagcaaaactccgtctcaaataataataataataataataatataacttggggattattccacatcagtacattaaatatgtagttttaatagagtctgccttttttttttttttttttttttgagatagggtcttgctctgtcacccagggtgaagtgcagtggcatgatcatggcttactgtagcctcaatcttcctggctaaagctatcctcctgtcacatccacccaagtagctgggactaaagcatgcaccaccgtgcctggctaatttttgacacataggaagcactataaaatgttagctatatttattatattactgatcacttagctgtctgctgcccaagccactgccaatctttagacggctaaccctgcattacatcactgacctccttagaccttggtctggctggctggtgtggaaacctcattctctttttcagtgtctgctctttcaaaggatgttctcctggccacccaatgatgccctttatactacagctaccttctgcctaaagtaccagggctctctccacagtagggtagagaagatgatgtacagtctgccacctgcctgaaaccagggcacttctgaatgtttttgctgcttatactcggcttcttggccagaattctgcatgttcttcctcatataggcttccccgcagttgttccaccttgccttttacttcctttgggaacctacattataatatgcgtctgaatccagttgagatcagttctttcttttgtgtgtgtgtgtgtgtttttgagacagagtctcactgttgcccaggctggagtgcagtggtgtgatcacagctcactgcagccttgacctcccagtcttaagtgatcctcctgcctcagcccctcaagtagttgggagtacaggtgcatgccaccatacctagctaattgttttattttttgtggagatgacgtttcactatattgctcaggttggtctccaatacctgggctcaagcaaccctcctgcctcatcctcccaaggtgctgggattacaggcatgagccactgcgccagcttaagttctttctcaggaggctcttgggccacaagtaaattggggatgtggcttgacatctattttaagagttcctgagctactgtgatgataagtcccccaaacatttgatgagagttgggaagccagtatcccctgagcaccagaggatccctgaggaggagtgacatctctagctcagccaggataccgtgttatgttattaacatttatagctaacatcgaatagcagtttccattacaacatgattttcacataagttatttaactctgaggcaggaatcagtatctcattttcatttttctaatgaggaaacaagattagaaacattgtgttcacatagatggaaaaggacaggtctgtcttcatgtgtcactcataccaagctatcttcttaccagatgaaaaagggtcatattttatggttcagcagagtttatatcagttgtcataatggaggaatttagtgttagccgtgtttgcagtgaaagtaataggattgaaaacttgaataatttcatttaaatttagatctccttgttactctgtaggtttgtgtgaactgtagacaattttgtattaataaaaaataatgcgtatatacatacacacctatctacatttatcttgtcctttttttcagaaccacaatggacactgccagccatagccttgttcttctccagcagctgaacatgcagcgagaatttggttttctgtgtgattgcacagttgcaattggagatgtttacttcaaagcccacagagcagtgcttgctgctttttctaactatttcaagatgatatttattcaccaaacaaggtaaggatgtgtttttgtaaataagaatttttaatattgtgatttatataagctttattatagtatcattttggaaattctttgttacggagtcacactaagaagtaaaattataattttttttttttttttttttttttttttttttttttggcgacagagtcttgctctgtcacccaggctggagtgcaatggttcagtgtcggctcactgcaacctctgcctcccaggtacaagcgattctcctgcctcagcctcccgagtacctgggattacaggcgcctgccaccacgcccggttaatttttgtatttttagtagaggcagggtttcaccatgttggccaggctgatctcaaactcctgacctcaggtgatccgcctgcctcagcctcccaaagtgctgggattacaggcatgagccaccatgcctggccaaattataataattttttatacattagtaattaaactcagtgtgtaggatccataatggaaaataagaatgaaaataagaatagctaaaattggctgggcgccatggctcacgcctgtaatcccagcactttgggaggccaaggtgggcggatcacaaggtcaggagttcgagaccagcctggccaatatggtgaaaccccgtctctactaaaaatacaaaaattagccaggcatggtggtgggcgcctgtagtcccagctactcgggaggctgagggaggagaattgcgtgtacctatgaggtgaaggttgcagtgagccgagatcgcgccactgcattccagcctgggtgacagagcgagactctgtctcaaaaaaaaaaaaagaaaaaggaaagaatagctaaaatttattgaaggcttatcccatacccaagcactaagtatttgccctataatgtaaattctactgctgtccctatttcaggaaaaagaaaactgagactgagttaagtaacatgcccatgcaggattatacagctaataagttagatgcagatttgtctgaagctatgtctatgcttttagtcactaagctgttaatttttgtttcatataacacttttgttttttttattttttatttttattttttttgagacggagtctagctctgtcacccaggctggagtgcagtggtgcccaggctgaagtgcagtggcatgatctcagctcactgcaacctccgcctcccaggttcaagcaattctcttgcttcagtctccctagtagctaggaccacaggtgtgcgccaccacacccggctaattttttgtaattttagtagagacagggtttcaccatgttggttaggctcctcttgaactcctgacctcagatgatccacctgcctcggcctcccaaagtgctggaattacaggcgtgagccaccgcaccctgctgatttcaataggttctttcagaagttttaagatatctttattgtggctataaacatataaaatttgccattttaaccatttttaattatacaatgcagtggtgataatcacattcgcaatgttgtacaaccattaccactgtctatttccaaaacttttttatcaccccaaacagaaactttgtacccattaagcaataactccccatctcaccctctcaacccccagaaaccgctaatttactttctatctctatgaatttgcctattctagatattttatataatacttgtccttttgtgtctggcttattttacttagcatgatattttctgggttctccatgttgtagcatgtatcagaacttccttctttttatggttgaataatattccattgtgtgtgtaagccatcttgtgtttatccactcatcttttggtgaacactcagcttctttctaccttttggctactgtaagtaatgttgcagtgaacattggcatacaggtatctgtttgagtccctgtttttagttcttttgatcgtttacttgatagactgttaaattccttaagagcaggtacctattttattcatcagttttctaccgctggcatctagtatagtgcatatcacttaggagtcacttgattaatgttgaactattcagaatgtatgtctgtgtttcctaactttaggcagtagattgaatacatgaagactttttgctaggccataaagttggtataaaatgaaagtttaagcctttgttgccatgttttattaaggcagattgctaggttcgaacttcttaggaagaaattgctttagtctcagactatactgttaactgaaaggccagctaggttgtgtttcatttcttgtgggtctgtttttgtttttaacagtgaatgcataaaaatacaaccaactgacatccaacctgacatattcagctatttgttgcacattatgtacacggggaaagggccaaaacagattgtggatcatagtcgtttggaggaagggattcgatttcttcacgccgactacctttctcacattgcaactgaaatgaatcaagtgttctcaccagagactgtgcagtcctcaaatttatatggcattcagatctcaacaacccaaaaaacagttgtcaaacaaggactggaggtcaaagaagctccttccagtaacagtggaaacagagctgctgtccagggtgaccacccccagttgcagttgtctcttgctattggtctggatgatggcactgcagaccagcagagggcctgtcctgccacccaggccctggaggagcaccagaagcccccagtttccatcaagcaggagagatgtgacccagaatctgtgatctcccagagccacccctcaccctcatcagaggtgacaggccccacttttactgaaaacagtgtcaaaatacacttatgccattactgtggggaacgttttgattcccgtagtaacctaaggcaacatctccatacacatgtgtctggatccctgccattcggtgtccctgcttccattctggaaagtaatgaccttggtgaagtgcatccccttaatgaaaacagcgaggcccttgaatgccgcaggctcagctccttcattgttaaggagaatgaacagcagccagaccacaccaaccggggtaccacagagcctttgcagatcagtcaagtatctttgatctccaaagacacagagccagtagaattaaactgtaatttttctttttcaaggaaaagaaaaatgagctgtaccatctgtggtcataaattccctcgaaagagccaattgttggaacacatgtatacacacaaaggtaaatcttacagatataaccgatgccaaaggtttggtaatgcattggcccagagatttcagccatactgtgacagctggtctgatgtctccctgaaaagttctcgcttgtcacaagaacacttagacttgccttgtgccttagagtcagagctcacacaagaaaatgtggatactatcctagttgagtagcagcttctctttcagaatttttataccaattctgaaaaagaaaatttgcgtggcatttttaattcataaattattttcctcctcaagtttcattgactttttttcttcacagcttatccatggttttaaggttgtatatattagatcttctcataagacatattaatatgtggctattaaaatgtaacattcaattactactgtgaacttttcacaaacgaaataacaatttagaaatcagaaatcaatgtagaaatatggaaaccttaaatagttatttatagaattctaagtttttccagttatagaatcagtaaaatcaaattgaatataaagtaaatgaaatctgttttaaagcatattctaaactatcacttctgcctacatttcacatgaattcactcctaccaggattatttttaaatattttcttccatataggaaattaatagttactttaatgcataactgtatgttatacatatgttataatgtataaaaatttattttaagatataccaaatcatgagtagttttattttttaactactagctccacaacatcttacctacatggcttctctttactttttaacattgagtatacctctttttttttttgagacagagtctctctgtgtcgcccaggctggggcgcagtggcgcgatctcggctgactgcaagctccgcctcccgggttcacgccattctcctgcctcagcctcctgagcagctgggactacaggcgcccgccaccacgcccagctaatttttttgtatttttttagtagagacggggtttcaccgtgttagccaggatggtctcgatctcctgacctcgtcatctgcccgccttggcctcccaaagtgctgggattacagatgtggtatatctcatttttaataaaaaaaacagttaaagggagaagagtcagagagacattaaaaaatatttaagaaacagtaagatatacacacatagataaataagcatgcagagacagagactgagctagaactgcattgactaaaaaccccagggttgttaacttggtctagagtgttttcttagacaccttaaaaagtaatttgagattttatgaccagaggtttacatgagttgaaagagaatgatgataaaatataaatcatgtttctaccctcagcgtcaggatttttggggcttcctgggttgattttaattttctaaaaatcactgaaaaagtaatttttcagtggcacagttttcacttttttcctgatccataaaaccagcaaagtggatacattcagtgttctataactacatttaagatccatgatgttagcttttcctctataaatcaacttaactctcttttataatggtgacacttacaaagctaaaaccccaggaaaattaaagttgatgaaagaaataacagattccccggctctatatacctgggaaatagctggttaagcttcaccacaaaggatagatctaaattgtttctgaaatgtttaaatttcaaaccccgcatagtcaaggataataaaacagactcatctttttttgccctcttgttaaattctaagcttcacgggcatttgaatacatctaaaaaatttggtttgtgagccttagaatttaaccacttacaaaactcttgagctccctccacttctgaggacgtttcctgacacattcaacagcatcagcgtccaatcaggagggagctcaaagagtaatccagctaattctaaggacacaaaggttttctctaggtaaacagtttaggtaaattacaaagtggtaagtttttcttgaggattgaatgaagaaagctactggatattgtgtaaggcagttgagtttctgccttaaacaagtgagtaaaggctcctatggttaagactgatgtgtgttgagagcacatctaacttgataagatcaattgtattgggagtaattaaaacaaatgtatgttctttggggtcagaactttgtctaatcttaaacttttttctaccaattcacttaagcaactattgaaatttgtactgccctcaaaaatatcatctcattggaagaacacaagtattaacattgattttttgtattttaggctagttaagatatatttcctagccttcttcaattcaaattctattgttcttattaagataatttttctcctctatattcttccctgtttgcctactcattattattatttttttaatttaatttttttttaagatggagtttcacccttgttgcccaggctggagtgcaatggcgtgatctcggctcactgcaatctctgctgcctgggttcaagcgattctcctgccttagcctcccaagtagcttgggattacaggcatgcaccaccatacccagctaattttgtgtttttagcagagacagggtttcaccatcttggtcaggctggtctggaactcctgacctcaggtcatgcaccagcctcggcctcccatagtgctgggattacaggtgtgagccaccgtgccaggcccactcattattctttgacacaggaaatccttgtatatagctaaagggtggaggtagagttgtacatggttggttggataagacagcaagtgcctcagggcagagtttggataaatggtaagagtttgctagcagctgattggccgtgatagacaacactcatttaaagcagaaatatatctgttcgttgagagttaagaaaatagtggttaactgtatttctattcttatagttccttttaatattagaaattcaaagcaaatgctctttccttgttccttaaaacattcattctgtttaggaagtgggaaaatatcaacttcattttatagaaaaaaaatcccaaaagctgaattccagagatgcagtgaatagtggtgtgggactgacccccagtttttgttattgttgttttcatttattctgcaggcttttttttttttttttttttttttttttgagacagtcgtgctgtgtcgccaggctggagtgcagtggtgcaatctcagctcactgcaacctccgcctctcgaattcaagtgattctcctgcctcagcctcctgagcatgtgccaccatgcccagctaatttttgtatttttagtagagacagggtttcaccatgttggccaggatggtctcgagctcctgacctcatgatctgcctgcctcagattacaggcatgagccaccgcgcccgggtctgcaggcattttttaaagtaactgtcatatgcctaacactgtgccctgagtattattttttaaagacatgattgctcactgagaaaatttgctttgtattttaaaagttcttccagctaggccaggcgtggtggctcatgcttgtaatcccagcactttgggaggccgaggcgggcgggtcacgaggtcagaagatccagaccatcctggctaacacagtgaaaccgcgtctctactaaaaatacaaaaaattagccgggtgtggtggcacacacctgtaatcccagctactcgagaggctgaggcagtggaatagcttgaacccgggaggcagaggttgcagtgagcggagatcgcaccactgcactccagcctgggtgacagagcgagactccatctcaaaaaaaaaaaagttcttccagctaaaacctttattttttgactacatctccacaaaatggagctatactgttagccagtatcctaatagtatagtgcagtttgcataatgattaccaagcttgaaactggaaatgtcatatgcactttcgtgtgtatcaggcagatactaaacattttccccttgagtcagcttaaaatttttccttcttttgaaatctcacgcagttgttttctggagaaaaatagagactgttttagtatttgttcttattagcgtatcatcagaactcagcacagtctgccttataagaaaacaaaaaatttttttatttataactcttgagattgttacttcttgctctttctgatttcccatccgtaaagtgggtgtaagcaatacttacctcacaggggtgttgtgaggatttatattaaacgtgttaagttctctcagtattattgattaaaatcaaccatataaacgacatttattctgtagctagacctattaactttagtatttcagcctataaattctaaaatgttcttaaaagcagtaatgtactatctaatattcaataactaattgacagaactcattgttattttttacaaataactagaaacaatactgttgctagaattcctgttctactgtaatttaatcatcactgtttctttttagccttcagtaaggaggatactagttctttggcattattgggaataaaactttgtcaatttcagctttattgaaagttctcccaaatatattgtttttgtttacacaaaggaaaaggaacaaaaacaataaataaatacctttgtttttttttcttttttgagacggagtctcgctctgttgcccaggctggagtgcagtggtgcgatctcggctcactgcaacctccgcctcccaggttcaagcgattcttcttcctcagcctcccgagtagctggaactataggcacgcaccaccacacccagctaatttttgtatttttagtagagatggggtttcatcatgttggcaaggctggtttcgaactcctgaccttgtgatctgcctatctcagcctcccaaagtgctgggattacaggtatgggccactgggcccagcctatttttatttctttgatgtaggtgatctaaatagtagatgaggacaggaaatggggtgaaggtaataatagtattattagaaaagtcttcactgaaaattgaaggaaatacatattaatcgtggaaaaagatagtgtgaaaaatgtgtaatttcgttaacatttatttgtacaggcacattcttgatgttgtgagtcagatacttgataaatgtccattttttgtagtaattgatgtaaaaatgggccatgtgaagaattttcataatgtaatttgtgtctttgtatattttgaactacatatagatttgtggcacttaaattattaatttttgatttcttaagagtgaagtctgtaaatgatttctctctgctgtacttctgtgtttgtatggttggacattttgaaaactggtgagattgcacagtcccaaacctggatgtcttaaatacaaggaattacaaactgtgatttttgtcttgaagacctggaagaattcattgtgcttcagtatgtatttgtactgcacttgattaattagttaagtattggtctggtgcaattgacattaactgtcatcaactcctctattttgtgctaaataaagtcatttagtcagaatggatcaaatataaacttatactttaaaataaacttagattataaaaacttgttcaataaaaaagacccactgaaaaatcttcaaagtacatgtaacacatagctaatacaggagaccaaaatcaataatacattgtgtggctaaactcatccacctaatgtactgtgaatttgcttcagaaacattcttttagaaagttgtgtatctgccgggcatggtgcctcatgcctgtaatcccagcactttgggaggccaaggcccaggagtccgagaccagcctgggcaatatagtgagacctcatctctgccaaaaattttggccaggggcagtggctcacgcctgtaatcccagcactttgggaggtcgaggtgggcggatcaccagaggtcaggagttcaagatcagcctggctaacatggcgaaaccctgtctctactaaaaatacaaaaataagccaggtgtggtggtgcgcgtctgtagtcccagctacttgggaggctgagacagaatcatttgaacccgggagatggaggttgcagtgagccgagattgcgccattgcactccagcctgggcgacagagtgagactccgtctcaaaaaaaaaaaggcagggtgtggtggctcacacctgtaatcccagcactttgggaggccaaggcgggcggattatgaagttaggagatcgagaccatcctggacaacatggtgaaaccctgtctctagtaaaacacaaaaaattagctgggtgtggtggcacgtgcctgcagtcccagctactaggggggcagaggcagaggaattgcttgaacccgggaggcggaggttgcagtgagccgagattgcgccactgcactccagcctggcgacagagcaagaaacaatgaatttcatatattttatcaagacaaattaatgtgacttaatcaaaaacaagtttattagcttagcttatagaatgtgttcttattttacatcagtgtttgccaaatgttgtgttcctagtgttgaggcaagtagtctttgtactgggtaacattttggaggtgtgatgcaaaaatgcatttgtggacctaattcttaccgaccataatctgtgttaatcgaaaattgacgtcctaatcaaatgctttccaactgctgtctctggaaagaaaggtagtatttcgtcatttcccagaagtttcttgctttgcttcttcttttttttttttttttttttttttgagatggagtcttgctctgttgcccaggctggagtacagtggagtgatctcggctcactgcaaccttcacatcccaggttcaagctattctcctgcctcagcctcccgagtagctgagattacaggttcccaccactacactcggctaattttttgtatttctagtagagacggagtttcaccatgttggccaggctggtctcgaactcctgaccttgtgattcacctgcctcagcctcccaaagtgctgggattacaggcgtgagccaccgcgcccagctgcttctttcttctctatttacagtctactgtatcgccttttgcccccagtaacatgatccacaatagtagttctcaactgaggtatattagtcaggattctccagaaaaagaaagaaacaacaggtagaactgagagagagaaagagattgattgattataaggaataggttcatgtaattatggaggctgagaagtcccaagatctgcagttgggaggctgagaggctggggagtcagtgatgttccaatctgaatttgaagacctgagaaccaggagagcttatggcataagttccagtccaaaagctggcaggcttgaaactcaagaagagctgatgtttccatttgggtccaaagggaagaaaagaccgataattgcagctcaagcagtcaggccagagaaagtctctttttttattatattctggccttcaactgatggaatgagagccacccacatcagggagggtgatcttctttacgcagtctactgattcagattttgtctccctccagaacaccctcacggacacacccagaataatgtttgactaactattggggcagcccatggcccagtcatttggacacataaaattaaacattacacagggctatccccccccatagagacatttgacgatgtggagatgtttttggttgtcacagttgggtgggcgatgagggaggctgctgctggcatctagtaggtggaggccagggatgctgctaaacatctcagtgcagaggacagcctcccgcaatacagaatatgtacctcaaaatgtcattagagctgaggttgaccaacccttctgagaccttaaagtaagttttgtgatggctgtcaggaataaaagaatacaaagaaacccaatttgggggatttctattctagtcatgtttagagcaagtattggagtatgagatgtgttcagaattaaattctatttgtattatccttgatcccagcttttaaaagataaaaatgtgattattagaaataaaaggaaaaaatgtgattattaaaaatcagagatgtattaatcagcaagacagttttgaatctattcatataatgtttgaactaaataattgtctccccaaagaggtctcttcatgaaattgagattgtaggttataatttctgtgaatttttaatctggccaaaaggtggcaccagtgtacctttaaaaaaatgttcattatacttgaattcagcattactattaatagtaaatattatttagggcttagctacttttggatcatgctttatagagtcaagactaatgagaattttcttaaaatttcataaggtactgcaatatcttgacatccctctttaatcaagatgcttctgatttacatgtacatatctcagcagataactttttaaaatatcacattattgtgctacattgagcatttctgaagatttttccaagccattaactgtgaggccttggaatttgggctcttttaatcaggcatcacactcagtttttggtgttctgcctggtcaagacatagattgaaggacatttgagtaaatacgctcccttgctcctttcttgccttttgttcattttttgtacatccacaatctatgaggtatgttacctactgaaatttactttcttttccaactgtggttcaacaactgactttcttctctcatactttccaacccattccattctgaataagttaagagttttcttaccttcagctcttctcaccttccaatactaagtgaatacagcctgcctcccccttcatttctgattacaatattattctcatcatcctaggactttgtacctaatcaccagttgcttctcctaagtttattttacagctgataagccaacttggaaaatgagcccactctccctcagatacattctcttccgctgtttgaaacgtttttcattgaaacaatttggtgatattgtatcaaaataataaagtattaagctactggaacaccatggtgtcctttcatgtcaaacgtctgaaggaatgacagtcctccaagagagattctctgtacaaatggtgtgttcccactgtcctggaaacaggagaggcttgtgccagggggctggagaagatggctctcacccactgtggtcgtcatcccttgtctggtctgtgttattaacaagtttcaggaggttccgtgtcagatttatgtgcatccagcaggcctttgaggaatgggatcttgtgtatttagcactgccacattttttctatagtggaagccatgtgaaacttagtccaaaccatatgcaggtaattaaaaaaaaatttttttttgaactggcatttatggtaactaccatatagggaggaaaacctgaagaacctggagtggttctgtagaaagtgaagtcacacctgttactttttgaaggtgaaaacatatttgcaaaggcaagggaagaggttttaaaatgcagatcaaagattcgaggggagtgaatctcaacagtattcctagctaaccacttctcatttcccaacattgctcttttttcacatgtgtgctgtctggtggtgtgagctcagtggtttctgtcccctctatcacaatattttaacgtctatgaggaaagacatataaagggaagagtcctttttttaaaatcttaaatatctcctatttcactattaacataccagttttgctgctctctcaaactggtggctatgctcagagccaccatgatggccatgcagacaatgcacaacacagtgctagggggtgcctcgattgaatgaaggcttctcccagagttgtgctgtgccaatggcacagctgtgcgtgacagccttgcctttccttatcctggtttaaacactgggtttaagaagcccttattttgaatttctgcagcaagtagcagttttcactgattagtcaggattaaactaagatagacaagtggtatagaaatcagaataagatttaaaattaccccgaggtgacacaactaatggcttggtcaaaattggtagaacttgtattaaaagggtggattttgctgtatgtaaattataccttaatgagaaaaagattcataccactcagaaaaatataagtcttagagtttgatgaaccctagtgattatcattattcactgttaatccttcaggaaaaacacaacagccagatactgagggttttttaaagaattctaaacaaattcaccctgaaatcaggacaattactgataaggctatttagggaacatttggataaaagatcaaaaactgagtttgacttttttttttacctgaattgagtcgtgaccaattgttttggcattttctgcatctcagccatatagagtacgaggcagttctaacttagtcattctgtcaggaggatagaaatactctagttttgagctgggcgtggtggcttacgcctgtaatcccagcactttgggaggctgaggcaggtgaatcacaaggtcaggtgtttgacaccagtctggccaacatggtgaaaccccgtctttcctaaaaagagaaaaaaattagccgggcatagtggtgggcgcctgtaatctcagcggcaggctgaggcaagagaatagcttgaacctgggatgtggaggttgcagtgagccgagatcactccactgcactccggcctaggcaacagaacgagacttcgtctcaaaaacaaaaacagaaatactctagttttggaagacctgtttaaacagaagtgatattctaaagttcttatgttgcaaatggccattccatatggaacctttgcgttgtaatttatatatatttgattagcagcacatgcatgcctgaagctgcattgtgatggtgattttatcacagatgtggtacagaaacccacttgtagtcatactgagcagacctgtgacctgtcagagtagggatttgggaataaaaggttcgggtacaagtgtagaaatgactgcatctgctttggtgtcaccttttgtttcctatctcccaggagtgcagaaatggaaggcctgggtcctaagaccacaagtatagctgtgaaaagtgtataatccttctcccatagtagcactgtcatatcaaggccaaaagttctttttgagtttcaccacaaagcaagtggtggggaaagtgcatctagttttgctaaagtcctgaaactgctggacactgctcccattgttatgataggctggagtttacggagacagttttaaggctgggagtttcccagacgcggcgccacaccatcctctcctcacctaggtttcccttcactgctcattgtgcccacacccagttttgcagaggattttctgtgaatgtgtagtgcacagacacgcatactctctttcctaagctcgggaacttaacccccagtaagcttaagctttcaggaaggaagaaagaaagaaaagtaggtattcacaaaagggttggggactccagacgtcagcattaaaggtaggtctaaaaagggattagcagaattgcctgtgaggacaacttttgtgaagtgtagtgtatctttttttttttttttaaaccaagaagagatttaataaaacttttttttgagacagagtctcgctttgtcgcccaggctggagtgcaatggcatgatgtcggctcactgcaagctctgcctcccgggttcacgccattctcctgcctcagcctccccagtagctgggactacaggcacccgccaccacgcctggctaattttttgtatttttagtagagacggggtttcaccatgttagccaggatggtttccatctcctgaccttgtgatccgcccgcctcggcctcccaacgtgctgggattacaggtgtgagccaccgcgcccggccataaaacttttaaaaatcctgcaaaatgtgaaatattagctaccctattacagtgtttgtacattaagaagacattttgctttgaagccagattcgttttaggacttttaaggtattatcaagttttaaattggttccaagatttggaaagtacagtccttcctagagcctgattgttatcatcgggctgtggttacgaaaagatagagtgttaacattaccaaaatgaaatcagtgtcttagtaaacacagaactttttaaacacccacctttagtatgtaccgtctgaataattctagcattttcacattgattagtcttttgaaaaatcataaagatgaacaattcataggttaatgcagaaaataatgagtatatcaagagatgaaaacagtgtgcttttgtcaaattcacaaatgtcatcaaattcagaactgcccttttggctgaattagttcagcattgtaggtgtttatatttgtcttgctgaaggactgttttaggagtgttgttgtaaaatctctgtccaattcccaattagcagagtagaacttttggtagtgcgaactcagtagttccatcaatgtgatctttacagttataggaaatgaacatagtttgcccacagttcttttaaaagatctgaataaacatgagtcaatataacatttattctgtattaataatcagtacataaattaattcaacttgaaaccttttttctacagagtactatttaatattatcatctgatccatagtaatttagtactaattttaatgagaaaaaatgaaacttttactttcataatagctcatccacttaacatttttacaaagaactactataaatatgtaacactatgcaggcttttttctacacctagtcacaaatcaaaataagcatactgtttatttaaaaacggaacactttcaaactgctgctgtattcagatcaccaccttccccacaccaaattaattgctctctctgtgtactcccctctgtgccactcatgttgcagcattatccatggctctttgccttaacccaacccggtttctgttgtcactgctccctaggttgagttcttggatggcagggagcctgtctcccttatcaaatagtgttaggtatgagttatgcctaatacgtgtgttgaatcaaattgaatttaattaggacacctgaattttatgtagcttccttctaatttttgtaactaaggagcattacaaattttcttttcaaaatgtaccataaaatataccatggattgaaattttgaattatgtataagagagttcatgttacccaataaaacatcataggaatttgaacctaaagaactctaaatcttaaatgaggatttttttttaaatgcacaaatggcaggcagaaaaatcaaatcctgctatattatcagatgaaattagaaagtagactacatatttcaataaagttgacattaaaaggatcttttcaaacagtgggattctaaagcctaacaattattttttaaattctgttgtaaacctcgaaaaacattcttaactataaaaaataaggtaacttgaagttagaaatttatggatgaagttagaaatgtatggatgaagttaatgctggattgcatacagaagccaaatttggtgcctccatgatccatatctttaatgcctttagcaagcctgttcacatatactggtgaaataacaatctctcagaagtaaataaaagagattctaagactccgctgagtagtagaccaagtaagatcatcacaaacttcatgctgtcaaatacattaccttgaaggaaaattatgcagacagcttttctgaacaactccatttatgccacatgcttattattctttgaggtggaggaggtggcagggaacataatttctgtttgaaagttcttttgttttctgctacctttacttaaatgttaccgggtactatttttatatcctataaagtgctttgaaaaaatgttaagtgaatagtgctacataaaatagaggagaattttcacattctctgggttgtaagaagcaaagtgaataatacttgagtcttaaaagaggaatgataatatgctgaaaaagttaacaagtagctaataatccccctccccaacccccagctttgcaaaattctgggttcaaagagaaactgaattttggctaataaataaataaacattcattaaaagcagaatttataccacagcaaatgtaaagaaaattcatgtggtgttcctaataattattttaatgttgttaaatggacatgaattgaaacagaacttatttatattcacttaacgtttgcatataaggtcaaattgcttaaatactattacaagaaaaatattttatgactctgaagccatctgatttctgcatatttctataacaataaaacaatttgaatcaccttagaattcactgtaataggatttggccatgtagcacatataatcagattgagaccagttaatttcggaattcctttttctaactgaaatcctacttaattcaacagatattctcaatagaaaaacagaaacctcttaagaatgaatgcaagtaaaatatacatcttatcataaaaacaatcagtacattctaaccaaaaatatatatcaaaccacagtgaaaaaagtaaaaacctagtattagataaaattttactttcttaaccaaaaaattcattgcacatatttaccatttatctgtttttttaaaaatcccccaaaatatttccaataactgctaagtactatactttttgcttgttcatgagattactaaacatttacaatgcaagtgtattggcttggaggcatccttgcagtaaatgagggcaggattcttcaatacactgtaaaatgcaccaaccttagtcaggtttttaaaatggttcacttttaaatatgatagctggtagctgtccaagtccattagcaccacatatagtgagttaaagagtgttttcagagaagatgactcgtcttttttgtttttaatgtttaaaagttgtacaattaaaagaaattgacttcttgggtcatgtgttttgaatgacacttttcatcttgctcaggatttccaccctcctccccggattataagcatgaaggtaggaaaatctgggggaaatatttttgcacttcagcaaagaatcttgctaataatatccatgatttggttcaatttccaagtcagattagtttcttttgttagaggtctcaatatgtatttacagaaagaaatgaagatgattctgtaggacaaagtagcaaatactttctatatgcaatccatacacaatgcaagaattcacccagatcatttaaaatcatctaatgtgcattatttcctccaagtggagctcttgaacaaataccttacatctcatacttcatctttattacttcatctgtttcaagtagtaacacaatcactcaatttacacaatgggggaatacacactttgaatcctaacctgtgaggtagggaagtgcactctggtattatggccatttcacacaaggaaagattgaaataggattactttttcaaaaaatatggcaatcattgatgagatcagatgcttccctttcaatatgtaaataaaaatgcaaataagcccttctcatttttgtaaagtatatctggattgaaaatagtgatgaaggccgggtgcggtggctcatgcctgtaatcccagcactttaggaggccgaggcgggaggatcatgaggtcaggagatcaagaccatcctggctaacacggtgaaaccccatctctactaaaaatacaaaaaattagccgagcgttgtagtgggcgcctgtagtcccagctacttgggaggctgaggcagaagaatggtgtgaacccaggaggtggagcttgcagtgagccaagatcgcgccactgcactccagcctgggcgacagagtgagactccatctcaaaaaaaaaaaaaaaagaaaagaaaatagtgatgaaaaagttaactttcaatattcatgtaaaatgctttttactggtctcaacacacagacatgaaggaatactgacatttaaattataatgtgctttagcaataacttttcacttttctattcacccacattcatggctcatttttggccgagaataaatatttgcactagattattaggattttccaggaccattactaccaggctggctttgaatctactctcccctctttggagagaagttgatgaatatggctcttaaagaagtaattctgcaagatgaatcctatattatctgtgataatttacttgggaattttcccttctcctggatgaagaataatattccccttgttttgtttttgctgtttcattttttaacttttcacagataaatccatgcagaaatggatatatacagatctgttgaggcagaaagaaaagcgggggaaaaacccactctccctgtttctacacttttgcacttagtaacaatttgcctgattgaaggatttgtgaatggttctctttttttttttttttttttttgagaaggagtctcgctctgttgcccagactggagtgcagtggtgcaatcttggctccctgcaacctccacctctcgggttcaagcaattctcctgcctcagcctcccaagtagctgggattacaggcgtgcaccaccacgcccagctaatttttgtattttcagtagagatggggtttcaccacattggccaggctggtctcgaactcctgaccttagctgatccacccgccttggcctcccaaagtgctgggattataggcgtgagccactgcccctggccaaatagcgcttataagagacttaagactaggaaaccactcacgtttaatatcaatatgcatattctgcacactatctgctgaaattgggaaaatgcaatgtattttttgagttaagcctgctgcttaggaatgtaacaattacaaatcacattcacaaaagtagctcaccttattcaccattttaaacatatatgtgcactgtaaaaaataagtttttaaaaacttaatgtgatgttagcctatacacagagctgaattatcaaaaggaaaccagactttgttatatcagaggtcattaaaaagcttatggcataccataagtgctcaataaatacaccttcctcccccaaagcactccaatctccatatgccattttagcaactccctgtatgttatgtcattttacactgcaatctgtgctgacttcctccaatccagaagtgactgcatttcagtggtagagttttataaacttgacttaatctttagcacttctgcgctggaattgtaccttttaagttctagagatgataaatctctcatttgttactgagtaagaaatgccacaaatgtataaaagaattcttcattaagcttgttttttctgccgtgactctggagagtaagtcactgtagaagattgtttattttattatcatcagaggccatttcattaaccagctgttctattgacaactgaatagcattcttgactagagaagaggctgtttcaattaagagtgtttcatattgttctgaagttctatcctcaaaaccattatcattagcaaaaacccctacttgctcattttcagctgaaattaagaattgcttagggacatttttagattttgtaacatcaaattcactgatttcagtgtctgtaataataatagcaattggctccattcttttgctttcttctgatttggatttctcttcagtgatcccattttctttaaaatctgattcttggctcaattcagtatcttttggcttagtttcttcagctacaatctctgtactttcatagtcttttccatttggtgcactttctagggtactgttactggcttcttccacaatttgttgatctggaattgcaggtaaaggaggaacatcagaaagtactggctgctgatggtctgtttctgaagtttcaagtgggcttgcttgctggggttgaacatcttgtttttccttgatcgtttcaatttcttcaaggattagagttcccgtttgaatagcagaatgcccattatctaatccaagttctactgaaatcactttctctccagaagttgtgctattgctcacatttgattcacagacctcatcaccatctttccgtgagatgccttcacttagatcctgggttgacttagcctttgttgcctgatcattcaatggggtctgtgtttgtatatccaaaatttcagcttcttcctggactttgatgctgcagtctgagtcttctataattttggaatgattactcctttttggccctcttgggaattttatgcagggaatcttaagtctagattttgcctttttcttagaaagatcagcatcctcagcatttattgcaggttgcatttcaccctccaatggcttttgctgctttgaagactctgaccttttcctgcgtgttacaagacgtttgagtgaggcccaggccccccgtgtgggctctggctgatcagaagctcctgcttcttgtggacacttccttgccacatcagcagcttcagagccagctttgggcttcagtgctttggctgctttctttcttctcttgaagcaaagcatggatgccttttccttctgcctttcagccccaggactaccttctgctgatctcttctcatccttgttttctacatgaatttctgaaattgtggtttccatttttacactgcactcttattctctagaaaactgtattctctcttccttagcagccttttgtgacaaaaagatgagcaaaaatgtcacactaggtaaaatttcttccaggcatattcatacctttcatcttactccatacagttgttttaggtggtttctctagtatagaaatgcccagtttctctatggcttgtaatttctctctttaatttcttgatgaaagcccttctttggataaatttttgctttatttaaagatcaacctgatgagagaaaagaaagtggtattttatttcactatgagcctattattttctgtggagactatttcagtgaatgtataagattctaccaggcatattttccatataataacttaatgaaatgactggagaataaacattggggtttactttggccctattaaagagttcagtgtgattctattttgttttatcctccttgttgaaacttcattttggattaccctgcaagtctgatattatcagttctttagttgtgttgtctgtgtgaattgcttatgactctaaagtgcaagttaagcaaacaacaagaaccaaaaatgaagtgcaggatgaaaagcaagctgatgtaatctttatcacactcaatagataattttaaagctgcaaaggactttagagattatttgagattactcaaatccagccagatgacaaaactgaactccagaggggagcagttgtcttgtcaaaagccatgcaactagataaggtcatagccagagttagaactagagactttgactctctagttttaccattataacataaggtttctgttctaaaaatgtatgttccatcaaggaagtgctatttttcatacatattcttaggaaaatttagcattactgtcatttcccactcttaaattagttgtacaattttgacattttcatttaagtactgtatctgctgtatcacatgtttccaccataatctgcacatagttggaagtcagtaagagtagtaatagctgacatttattgagcaattcttgggtattaggcagtgcatgcacttttacatacatctctaatcctcaccacaatattacaaagatggtggtatcaccacgtacagatgaagcaatttggctgagattacggcagagctgtaacagagctcagattaacacaagattgcttgttgcttaaagcttatgttctgaaactgggctttaagagtttcgtcagaaaatgaattgtttggggatactaatctgcagtgtttcattagtaaaaaaattaaaaaattgattaatggtcatttaaccataaggcacttatcaactcataattgaaccacgagtagactgagttcttgtcatttgaaaaccaagcttttgaaattctttatattttatttttttggttcaggaactaatttaaaagccaaaaataagttggcaaactatgcaattggcaaacttagataatataaaggtgtattgaaaatttaatccttagaatggtatgatggcaccaaagaatggaaatgggaggtgattatccaacaaagatcctatgaattttagtgggtggatgccctaaaataagcaaagggactcattctttatattgtttttatgtaaatccttcactgaagtttcatttgggtaacccataattttatgaactgtagaaggaactggaaccctgaaaatcagtttatgatctaagtaaatattatcttaggttgggtgtttcatactgtgtgcctctaacagaaagataaagtcattctagaacaatgacggaactaaaatatgaacatttgacagtgtttctcctcacaatgtttcagtgagcactagaacctaagctgataactgtttaaatcttctcacctcttgtgagttttcagcacctgagcatttttgttaagcagaggctgtattaccacataatagaaatattgaaatgagatgtttaggagtctgtcattggaaactaacctggattgcgcaaagacaatcgtttgagaagctcacttgaatgtatctcacatactagaaataaaacgaatacccaaacagaaacttaactaacgagggaaaataatgcagtctgtagacaataaaactttgcagaatgtcagactgcaaatgattcgctcttaaccagcaagggtagctttatcgcctcaggaaatcttaaagtccctgtgctcatttcctgatggaattgcaagtctcatgtcacagaaaacaccccctttcctttttcccttgagcagccagtacccgaggaaagcaatgcatctttcccagcaccagatacggaccacgaagcttcctcctggaggaaggaatctcgaattctggcttgacgccccttatggcaggagacagagcgcaggataaagtactcaaaaaggaaaatgccgggggcgtggaacagataacccagcttcaggctgtctgcagaattataatgtaatggccagaaacccaaaatcacatttctcaaagagggataaagaaggaaaaaagccaccggcaacccatgcttctaagacaagctgtaacgcgaaggggataggtgggcagacctgatgagggtcgccctggccgcggattccagcggacaagcgacctcccgcgttcttactcccagcacctcagagggctcggataccccgtatccagtgggcacctcttgcccactccgcggtccgcggaccggacattgcccccgaccctcctcccccgcaggctccccgccctgcctttacttacgtagggcgtcggggtccttggccaacactgctcccgaggtggcggcgcgctcgcggggcccgccgcccaggcctccagggagccgcggtcgcacccggagcaaggcgccctctgcagagcccgccgccgggtgcgccccctccccaccgcgcggggacagacagcaggcagcgccaatgcgagcggagcggagcgggcgggcaggggcggggcgaccgccggaggcgcggggcggcgcgggcgccgggacccacctgcagcagcagcctgcctgcctgccgcggggaagcccatcgtgctccgcccgggcgccaatctccactgccagaccacatcagcgccgaggcggggaccgcaagagagccagccggaaggttcggggggcgggggaaggcgggggggaccagggcaatgaaccccgcgttttctgagacgctaaatagtgaggtccggtttcaaattatagacagtcgcattacacatctcctctcctccccctcagaatatttaaagacaaggcagacatcgcattttaaaagcaggattcaaaactgtgcatagaatagcgaggtcatgtttgtttgaagcgaaaattacatatataaatggaaacagaaagaaacccgactttctcaggagtggcttgagtgtcagatcatcgtggttcatcgccaaacaggctttcaaacctttgtctcccagtgggaagcaggtggaggtgattggtgcagaactttggcctgcaggagcagctgcatctctatgcggacaaggtgagaaaggcacaggaacccagctccatccatcttataccttacatagttccaaaaataagttgaggtagcttacaagttacccatgattcccttcaggacattccctatgagggcattcctgggagctccagctgtaaaatctagtaggatccatcacaatcccagcctcctcctctggcccccatagcatagcatccagatgaagaacctggtaaggtgaagtgaagaactactgaaaagcagccgcgttcatctcctttcttcaacaggatcacgaccttagggagtgtaaatgtcaggtgtccatttttgtattttttccggaaatgttttatatttgtaagattctgtagtttccacagaggcttatcaaggaaagaactcttgagacacaaaagcaaagccaaatataagctgtcaagatcttaaaattacagataaaagaggcaagagttgtaaaacaggaaaatccataagcatctagtttagttgtaattaagaattcagggatgggcgcagtagctcacacctgtaatcccagcactttgggaggccaaggcaggaggatggcttgagtccaagagtttgagaccagcctgggcaacatagggagacaaaaaaatctaaaaaattagctgggcatggtggtgcacgtatggtcccagttactcaggagctcaggaggctgagaagggaggatcacttgggcccagaaggtcaaggctgctgtgagccactactgcaccactgcacgccagcctgggcaacaaagtgagaccctgcctcaaaaaaaaaaaaaaattcagtcagccttgttcactcagcaaacacgtctatcgaaatggtctgcgtatctctctatgggttgctagcgctgcttgttgccagttttgaactttaagccaaaagaaatccattatgcttataagcaattgagaactattccttattgagatccaaggtttctcaaaactagcagacctgggagtttgcaagagtttcaggcaaaaaataagatgagcttatttaggtgaagacagggtaaaatagctgtcttatttttatttttatttgagacagggtcttgctcaggctggagtgcagtggtacaatccctggctcaagcaatcctcccacctcagcctcccatgcagctgggaccacaggtatgcgaccacatgcccaggttcttcttcttttttttttttttgtagagatggcgtctccctatgttgcccaggctggtcttgaactcctgagctcaagtgatcctcctgccttgacctcctacagtgctaggattacaggtgtgagcccccatgcctggccttcacttgcctttcttttaaacaaaattagtaaaagggaactgaaaggcagtttgaggtgagagatgaatttatttagtatttgaagggcaaattcggacagacttccttaaggtatattacaaacaagtcatccctgacctccaccaacacacatacacacagagtcactcacacagagtatagtactataaataacatagcgcaccatagtttttctttaggatatgactagaactcaatgccatatgtgtgtgtgtgtgtgtgtgtgtgtgtgtgtgtttaatgtatccagtacctcatgcatgaaagaaacctgtcattcctgaattcaggtaagtgacaacgaaggctgtttaagctattacccatatcattgtctactaccccattagtagcttttcattatataacaggaaataggctataaatgtatttctgcaatctgatgagaaattatcctacctatagcttatcatgttaatatcactagatacagtgtgccagtaaaatagcttacatatttatctgagcaatactctactgatcttaccatttatcccatcttgatctctacccattgcctgggcctatagctaccaaaaatgacttataactccttgttaatagctcttacatttcagaggccttctgggaataagccctccaaccccgttccctgggacaccattgaatgaacctgaggctccaagtctctggtggtttcatctgttcctgggcaccatgagggttgcacagagccaacacaaactcaatagtaatactgttgcaatctgtttaatgtggcagcacataaatgctatctcttttgaattaagactgtgtgtacatcttcagtgcacagaaacagcctctgaagtgagatcagagaatgtacaatttgtttatcagtaatattactaataaggggaaggaaggcattagcagcccagagaagagaaagggcacgggaaagccactaatctggagggactcttagcaccaaggtaaaggcactagaccttctctgccagcacatgctaatagttaccccaagcactaatgcttctataggtcttttttattttgacacagggtcttgctctgttgctcaggctggaatgcggtggctcagtcatagctcactgcggcctcgaactcctaggctcaagcaaacctctcacatcagactcccaaggagctaggactacaagcgtgcaccacacactcagctgagttttggggttttgttttttgtagagatggggtctgtcttgtccaggttagtcttgaactcctgggctcaagtgatcctcctgcctcagcagcctggacaagacagtgagaccccatctctacaaaaaacagaacttcaaaactcagctgagtgtggtgggattacaggtgtgagctaccatgcccagcccctaccagtattgaggatttaaacccatgtggctgttggcgatattaggaaacctaaatcctttaagatgatccttaagtcaccatatctgacaagactgcatccttcccttgtctacaaaatgaattcccagcaaatcccattccaggtgaagtttcacaggacattaagaaatgtaccagaaagcggtcgggcacagtggctcacgcctgtaatcccagcactttgggaggccgaggtgggaggatcacttgaggccaggagtttgagaccagcctggccaacatggcaaaaccccatctatactgaaaatacaaaaaattagccaggcatggtggtgcgaacctgtaatcccagctactcgggaggctgaggtgggagaatcgcttgaacccgggaggcagaggttgcagtgagctgagatcacgtcactacactgcagcctgggcaaaagagcacgactcttgtcccaacccccctaccccccctgccaaaaaaaaaaaaaaaaaaggaaaaaaaaagtaccagaagcaattaactctgcaaacagggcctggaggatgctgtgcaacaggaactgacaagtgcttacaatgtgccaggccctgtacaaagcatcttagatgatgtgtttgagtaattccagaaccgccctcacgaggtaggtaccaacagtgctcctatttccatggtgaggatgtggaggcagggaggtgggtgaggctctctgccatagagctggggctctgcactgtgacccctttgccatatgcctctcaaggcagcgctatcatttctgtggactgtaaaattgactgtattacaacattgacatggacctagggaattaaaaataataaaaccaaggtcactgggaaaaatactgctttgccaacatcagcagtgtttagcactggcgccagtgggatgcagcatcctctggaaggatccagtggagggagacaaggggaaaaagggaaggaaacaaatgggagaggaagaacagagatagaagataaagaacaagaagagaaggaaaaatatttgatttatttttttagacagagtctagctctgtctcccaggctggagtgcagcagcatgatcctggctcactgcaacctctgcctcctgggttcaagcaattctcgtacctcagcctcccaagtacctggggttataggtgcctgccaccacacccagctaatttttgtatttttggtagaaacagggttttaccatgttggccaagctggtcttgaaccccagacctcaagtgatccgcccacctcggcctcccaaagtgctgggattacaggcatgagccacctccacgcccagccagaagaggaggaaaaaaaatattaggttggtgcaaaagtaattgtggtttttaccaacctaatgttttaggaaaaagaaagtctgggccaggtatggtggctcatgcctataatcccagctacttgggaggctgaggcaggagaatcacttgaacccaggagacggaggttgcagtgagctgagatcgcgccactgcactccagcctgggcgacagagacactgtctcaaaaaaataaaaataaaaataaaaagtctgtagggaagggtggagcccaggcatttagaagaaactcaatgaatacttgctgcaccaacagaatagaggctcacctaaggctaatgctgcatgaccatccttcttgagcactctaaacatagacagtgctaaagctgtgacagaaatgggaattccaaggaagttcaggcaaaaacttgtataagcaatacttcctcagggtagaaaaacaaaattcaacaatatagaaaggtataagattaaaaggtaagtcatcaacttccaacccaaccctctcaggaggtcccctgaattatgtgtcctctcagaaatacacaagcatgcatacatttccctctaaacacaacagtatcataaagggcacactgcaacttgcatcttcagcccaagggtctgcctgacaaatgagctcacaaaggatggcagagacctgtggcacagtctgttaaggctgtaattcatattgcaacaccaagatggcaaacttgtttccttttattctgtggaacgtcactaaagtaaacagacatgcatgatttatgttaatttatacatgatgagaattaaggctgaaaatgacttctggggaaactcctactattagtttcagatcttctgggcaggggctgacttctcttggcttacttatacttcctaactcccagtgggcctgaatagacactggccagactttcaaagtagcttcttgaagatggatggtgatctggaaggaaaaacaagaaataaatgttttctctaagcaagcactgaaatgtttcctgttccttccatactgcaccattacccactcacattgccaaagctgttaacatttacatcctttcctgccaccagctcttctagggcgtgtccataaatggacttgaaaatgatgcatggtatttccatagtactgtgtgaatactgttcaagaccagaccaagccgtgagccatgactgcatttcgagtatcacacataccctctcaaagaatagtgttctagcatcaaactacagtttgcttctacttggaccttaactttctcaaataatgcaagagcttttgttttatactatgaccctttgatatccttgtcttttctagctttttctagtttttctcaggtgctcccccaacctgttccacacaggatttgtaacttcaggtcatttgcatggttatcagaatgccccttcgctaatgtccaaatgagggttcagtttcccaaaactcacgtcttccttttttcttggttaattcctcattttgctaagtacattgctaaataacttcttaggaagagatgtggggtggcaaacccttgcacgtctgaaaatatccagatagattcggctaggtgtgagcacatgttgaaagtcatcttccctgtgaccttacaggacactcctccattgtctaaaagcttcttattgccagtaagacgggcgttaagtctagttctcattcttttcataggcaagccacttttttcgtctctggagaaagatgttaggattttcatgtttgatatttttgcagtttcaacaggatgtgtctagggatataagtgcacactgcaacttgctgcttcagccccaagggtctgcctaaggagagacacgtcctgttgaaatttcaaaaatatcaaacaatgcaatgtcactcattgcagtcggtactcagggccctttcacctaaggccctaagaactgccagattggtcctgtttccttctcttttctattatacttcctaagacatttgctaattcttgccttctaactacctattcagagtatacagaccgtcagctgttcctgacctgcaatgtgtcatcaactctgaaccccaagcctcctggggcttcagcagagggagtctaacctctcctgtagtttcctctgtagtttattggacagcagttttctcccctacactgtcaacctgtgacaagccatgctgcgcttcttccaaaaatgtgttgaaatataaatatttcaattcattggttattgccaactctcattactatcccctctcccctcagggaagtctgaaaagaaatgttttgaaagcattagaatgtgaatttttatagcgtcagtttgagccctataattcataaataagctacatgaggaaaaaagccaaattattacccagtaacaacttacctgtttagaataatccattcacctgttctgtttcagggtccaaatcaatatcataaaaacagggccgggtggggagtccaggcattgtgctcatctaggatgtaaaaaagcattacaaataaactaatgctgggcacagtggctcacgcctataatcccaggctgaggtggagaggatcacttgaggccaggagttctaaaccaccctgggcaacatagtgagacccccatctctacaggaaataaaaaattagctggatatgatggcatgtgcctgtagttccagctacttgggatgctaaggcaggaggattgcttgaggctaggaggttgaggccacagtgagccatgatcatccgattgcctgggcgacagagcaaggccatgtctaaaataaacgtaaagtcatctttactttcacttttccttcagaaagaaagcccaaggcataaagatagaacatcattttatagttgtcaataaagtgggtactcttgttacatattaaaaatcaagtcactgatcctgttaaaaaactcagaaactgatccctgccgggcgtggtggctcatgcctataatcctagcactctgggaggccaaggcagatggatcacctgaggtcaggaatttgagaccagcctgaccaacatggtgaaaccccatctctactaaaaatacaaaaattagctgggcatggtggcgtgtgcctgtaatcccagctacttgggaggctgaggcaggagaatcgcttgaacctgggaggcggaggttgcagtgagccgagatcttgccactgcactccagcctgggtgacagagcaagactccatctcaaaaaaaaaaaaaaggaaaagaaaagaaactgattcctcatgtccttctgcaaaccaaatgccagccttcactatcatcttccatgtggtcacaagcagtagcaggaggtgtttccaccttcaccttacaagaatgagtgctggggagtagaggagttgctcactcgcctcctcagctcacgctttgcaagaccaaaaggaggtacagggcttgcctgcttttaaattttgtttcgttcagtcttgctagctgagctgcccatgtgatttttgcttcagcaacacgatggtaggagttagtatcctttaacttgggccaagacacttttgtacataatctagatggttttataatcaccattcttactggcccaaaatggccttctaaaactaaacttgtaatgcttacaaattatatttgtactcactacttttctaaagactcggctttgacaaatttctacttagatgcaaatatgtacggcttgcaagtgaaaactccgtatatttttatctgtaacaatgtcctatataatgaatacacacaagttccaaatcaaatctagacaggaaaacagcttaggttacttctaaaacttaactataaaaaggttatttaaaaagagtcatcttctgtaacacaaaacatcatcaatactttagaaaacctcattctgactgacttctgagtaccaatcaatattccccaaaacacattatagggatctgacaactggtttatattcttatattgtgtaagaggtaaggaggtgctaggtgtgagacaagtaggagagaggaaaggatgggtccttagacacagcagaaaaaccggaagatgacattataaagataaaagacacatgcccattgttgtagacgggcatgtgcatgtcagcagaaaaccctaaagatggttccctaaacagtgatgagtaggatttttgatattttcactcattccccaagaggattttccctcctaaacactggtcactgataatcagaaaaaatacaaaaaaagacaatattatgtgtacgcacatgtatgaacctagatataaagttctgaaaataagccatcacactttgaattaatatagaaaatattcaaataatctgagtctcgttaaggccccaacggcaactggaaggtgttagaatagtgattaaaccatttgatcatgtgtggaaacgccttggtccaacttaaagttaaaagcctctgacacatactttgttctaaatgagaaagtcttgagttcggcaggctgtgtctctctccaccttacagcctgactctcactggcctgactgcttccagatttgctttcacctctactgttacccttttcttcatgtgaagatcaaaagtgacaagaaagagtacagctacccgtctttcagctggtagctgctgacaacttctccaaaaagaacaacacatatttctgcactattcaaggtgctgggtaaaaatggtggaaaattcctaccacaagggatttctacaaatcctggagactgatgtacatcatagcaagtctaagccttctgctctctatagagagctaaggaggcagtgagatgcaggcatttgtgctaagcaccactgtgatgtgatgatgttgcctacagtgtgagctgagggcagcagggctctcacctttcataatttgcccaaggccaagatctgaagaggtgaaaatgaattcagctctaatgtcctacgttttcaactctataatgccacctcctaccactttcttactatactgaaagaatgacataaatccaaaaggatgtatgttggtttcttttccatgtgtgttgatttagtttaatatttcagtcctgtattgcatggcagtacaatctgtagatacaggatacagggcagatttaggggataacctagattcaggatccaagttaaccttggaacaatgtcagcccaaactatgattatgtccttaagcatccctcccctctgcttcccaactggcaatattcttctttgaatatgcataaaatctgtaagataagaaagcaatggacaccttgttcaccttgaagcgtaaataagcaacctcacctttcatatctcaagggtccatttgcattttttaatggggaaattccttacttaaaaataatgaaccccctgaatttcagacgtaagttctaggcctgtcagtaaaacctctgtccctacctcctagggctgtggggggactgagttaatctatgtaaggctcccaataaacattaactgtgattatgttagcactaccccagcctatcaactgggctcatcctagattcagtgaagagcatactgtccctgggaaacagaattttttattcagtatgagtagtcctggcatcattcttgatttgacaccaagatggtccacagcaagagctatatagctcctgctttatagcttatgatccacagcaatcataataggcccgattccaattttcttctgggcagtgaactctgctcacttggcatttgcttgatggtttcggcaacacacttcagacgagaagtgcagatgcgcccactactcccttgcagcatgcacttaccgttcctactaaggggtacagaaaaccagccccaacgctggcgcggatgtcgcgaatgggcagaatgaagcctgtagggacacctttttgctctgggttgtgagacaaagacaagtgtgttttagccatgcagatggggagattcccaaagccctggggaaagaagggaagagagggaggacaaatgaaaagatgacaacccagcaatgaccatctgggccctgtgattacatggattcttcaatttattcgaaacatccaactccctttatatacatctctatcttgctgtcctccagcttatttattaagccaaaaaaaaaaaaaaagaactgttgggtgagggagttaggtactcacaactgtagtccacaagtgaatattttatttccatctatggaaataacataaaactaatttaaaataatagtttggagtagatatgagaataaaattggagagggtcaggtgcagtggttcatgcctataaattccagcactttgggagactgagatgggtggactgcttgagcccaggagttcaagaccagcctgggcaacagggcaaaaccccatctcaacaaaaaacacaaaaattagccaggtgtggtggtgcgtgcctgtaggcgcagctactcaggaggctgaggtgggaggatcgcttgagcctaggagtcagaggctgcagtgagctgaaattgtgccactgcactctagcctgggcaatggagccagaccctatctcaaaataacaaaaactggagacgttctcaatattttggtaagacattctgtatttcctcatggatttctacacattcatataacgcctatgggtaaataaagaaccagggactgtgccacctaatccaaactcagtatttcagaggagagaaggctgccacccagagaagtgaagcaacgggtacttggcagggctgggaggacccagagattgtgactccaagtcctgctttgcaaagagttgaaaggacaaactaaccaaacatctacctgcttcgtgtagacttcagctttgtgttgagcttcgggaagtaattcaatgtcatctgctccatagatcttctgtgcaatgatcctgattttatcctcaactgggagctaatgcacaagaaagagatggggacaccatgactggacacatgtgaggacatttaaccaggacatagccacattctaggtcagagtccctaaaaggggcagaagatggtttttatatacatatacataagcaaatagtttgaggttgatgattgggttaagaacactttctttttgtttttttgagacggagtttcgctctgttgccaggctggagtgcaatggcgcgatctcagttcactgtaacccctgcctcccaggttcaagcgattctcctgcctcagcctcccgagtagctgggattataggcatgcgcaaccaagcccggctaattctgtatttttagtagagacggagtttctccatgttggtcaggctggtcttgaactcccaacctcaggtgatctgccagccttggcctcccaaagtgctgggattacaggtgtgagccactgcacccagccaggaacactttcttttaatatcaagcctcagattttataagtgaaaatgtcccacagaggtaaagtttttatatctatatatgcagatatacatatacacacatacatatatatatagatatagatacacatattaatatatattaaggttttaaatatatacttacataagtacatatttaaaatctctcgctaagtacatcataaacagtgttgctgactacccaagaataattatttcttcataaataaaaagtagatgttcaggctgggtatggtggctcatccctgtaatcccagcactttgggaggaggccaaggcaggaggatcacttgagcccaggagtttgaaaccagcctgggcaacatagcaacactctgtctctttaaaaaataaaaattttaaaataataataaaaattaaaaagtagatgttctattctaatactggagatcagtcctgtcaaaccagacctggggacactgtttatgaaataagacaaccaatgtccatctacataactcccagtctgtatatgagaggcagatgccacccttaacacaattgattaagtgcaagcaccaggaattaggaaatagtcataaaatcaaaatcacccaggtattagaaaaaacaacccagtgatttacatgatcaacacgcattgggcatgtccactttctgtggcacctgaagcaaacagtgcagtggacagagaccagtggtctaactggtgagggcctcagtcccatgggctgtttcctccggggcaaagccttcagagaagtggagctggcttcttaaatgctgtgtagactagttcagggcattaagattcaaagagaacagcatacggagaggttgcctaaaggaaatcagaagcaaagctactcatgggtaatttggatgagcaaattacaaaaattaggcaatatatctgtctttatagcaactaaagctaaaagaacatattaggcaggttcttatttatttgagacagagttttgcacttgttgcccaggctggagtgcaatggcgtcatctcagctcactgcaacctccgcctcccgggttcaagagattctcctgcctcagcctcccaagtagctgggatcacaggcatgggccaccatgcttggctaattttatatttttagtagagacggagtttcaccatcttggtcaggctggtctcgaactcctgaccttaggtgatccacccacctcagcttcccaaagtgctgggattacaggtgtgaccacagcgcccagccaagttttgtttttaaaaggagcaataatctatctataaaaacaaaaattcccttttgaactaaacaatgataatttatgaaggggctttatataatgggcatgaataaagtgaacattcaataaggactttataaagatgaaacacagattattttcatatgcatctcataactggagctctataaatgccaaggcacatttagaacttctgaagcaaaagcactttggttgaagggtgatttaagactagcagacgctgagtaagacaaaaagtggcagcctcctgtttgccagaatggataaaagttgcaagtagaaatgggttctaaagtccatatgtccctgctctttcaggtctcctgctggttttcaaggactgggcttccagccttgggtgctatgcattggagcctggagagggtgcctataaatgctttgcatttgtgtgcaaatttgtgtttatggcatttttctaaaaggatgattgctgaacagattttaaaacttgcctataaaatcaaagctcaacaggagaatgtcaatgtcaatgttaattaactgtaagtgtattatatctgcaaggggcaaagagaaataagagaacactaaaactcaagagtaataagtttattccttctgcttttttatggctgtttttgaaagtctatgattatctattaaaaaccaagccaggccaggcacattggctcatgcctataatcccagcactttgggaggctgaggcaggaggatcacttgaacccaggagttcgagaccagcctgagcaatatagggagacccagtcactacaagaaaaataaaataaaataaaacaaaattttttttttgagacgaagtttcgcacttgttgcccaggctagagtgcagtgatctcagctcattgcaacgtccgcctcccgggttcaagcgattctcctgcctcagccttccaagtagctgggattacaggtgcctgccaccacacccagctaattttttgtatttttagtagagatggggtttcaccatgttggccaggctggtctccaactcttgaccttaggtgatccacccacctcggcctcccaaagtgctggggttacaggggtgagccactgtgcctggccaataaaacaaattagccaggcttggtagtacatgtctgtggtcccacctactcagggggctgaggtgggaggaccacttgggtccaggaggttgaggctgcagtgtgccatgattgtaccactgcactccagcctgagcaacagagcaagaccctgtcttaaaacaaaaaacaaaacaaaaaaatcaagccagaaactagcctagagaataggaaaaattaactacagcatatatctcatattcctaacaaagtttccagttgttgtttccatactacttaatgtcaaatcacatcctgaaatacactggacagataaatgaaaacaaaacacaaccctataataagaaccttttcctgaactaactttattgtatcatagagtaagcagggctctacttagaccaggtgtaatttaatttgcttagtgatggaaaaaatgatgaagcttcctggagtactttggttttgcatgtgagggccctcaacttgaggcagcaccttaccaggaagtgaacgtgggggcacacttctttcccctattactgaaaagccatcagaaaaattttgtaagctcgatgcagccccttaccaatctgctacatggttggtgccttgttttaaaggctacagtgaattacatatttggtctatatgtaaccttctcttctgccacctgtactttgacccttttcgaagttaggatatgagcaacggttccccctccaccctggggtattcctgcttaaatcccctctgtaagtaagcagtggcatatgtttataagaaggctgtctgggcggacgcagtggctcacgcctgtaattccagcactttgggaggccaaggcaggtggatcacgaggtcaggagttcgagaccagcctggccaagatggtgaaaccccatctctactaaaaaaataagaaaaattagctgggcacggtggcagacgcctgtaatcccagctacttgggaagctgaggcaggagaatcacttgaacccaggaggcagaggttgcagtgagctgagatcatgcctctgcactcgagcctgggcaaaagagcaagactccgtctcaaaaataaaaagaaggctgtctacagctgggagtccaggctgtggttgtgtaagtcacctacgtgggaatcaaaccgcaaggctgaagctgcgaagcatggggctctaatagaagtagccacacagaaacttcactgtgcccttttcgtcttttttctttttttgcagacagcaaatcacccaccttgaggtcataaaggagctggaagctgctgggtgcttgtgctgctctctggacggcctgagccagggctaaggcacccttgcccccttctgcccagtgagtgcacttcacggcatcaaaagccccatgttctctggaaaggcggctgatgaggtccagctcagactctgtatccgtcctataaaggaagcatttcatatcaaagcatggaaaatggctggagagacagaattgtcttctttttgccattaaacctcatgtgaattacccactgataaacgaacactaaccaagaaatttggcctgggtttgaatctcagctccgaaacttactagctggtgacttttggccagttacctaatctttatgtgcctcaatttccaccctggtaatacgcgaataatcacagcacttatttcattgggacgttatgagactcagatggtaaatccatgtaaaatacttggaaaattcccagcactccagaaggaatcagtaaatactagcatttaagaa

SEQ ID NO: 304 - DNA, 39482 bp, Homo sapiens
  source 1..39482: mol_type = genomic DNA; note = NC_000010.11:114938195-114977676 TRUB1 [organism=Homo sapiens] [GeneID=142940] [chromosome=10]
actcttgttgcatcatcagcgtgcacctccacgatgaaacaggtctgggctacaaaagtatggccgcttctgaggcggcggtggtgtcttcgccgtctttgaaaacagacacatcccctgtccttgaaactgcaggaacggtcgcagcaatggctgcgaccccgtcagcaagggctgcagccgcggtggttgcggccgcggccaggaccggatccgaagccagggtctccaaggccgctttggctaccaagctgctgtccttgagcggcgtgttcgccgtgcacaagcccaaagggcccacttcagccgagctgctgaatcggttgaaggagaagctgctggcaggtactgcagcccgggtggggaccaggctgaggcggtcgctgcgagaggggaagcacattaggctttttgcgacgctcgtgattcaagagacaaaaggaggggaaagggagactgaccattgaattagctctggacaggaatctcgggcatctcgggcttggacttgccctggcacgaactcttgtagcctacttggcagttgtagttctcaacgggaggaaaaaaatcccgtacttacacaataaaaccctgcccttgggcgtgcagacctgttttctgtaatctgatcgatccctcaggaggcttttgttgggttcatgtggatgaaccccaaaaggaagtactggttctgcacccctaaagttgcattcctcaaaatgtattggaaatgcagatatacttcgttaaccaagacttaatatagtcgttttcacattttaatgggcctaacaattacttagagtctcttgtacaaatacagattcctaatccctgccctgtccgagattgtgattcggagagttcggggtatttttaggaaactgcaattctaaatagttgctccaggtgattccagtgtaagtagtttatggaccacatttgaggaacactaaatataacttggccactaagctgagagtgttcattttattgattcgtttattcacgtacactgggaaaatagtagaaaagcctagagaatcaccccgttaatcagctcggatgatttcacacataaagcatccaggatccttaagttcattggacatatacaataagccaggtctgtgctagcctatagagacttgaagatgaaagataactctcttaccttaactgagctgatagcctagtaatttctgcaccttgtggtggtaaaactagttagttaggttattcaaggccctccagagtttggccgtattctgtctcgccattaaaccagtaacagggactttcttacattgtttagtgtcccatggaaaactttacactttaaaaaaatgcaaaaacaaattattctgatgggaattataactgacagtacagatttaagtgtttatgggcaaataggtacactcctgcagatgtttaattccagtatcacgactacttattcttttattaaagttttgctttgttgcctgaaagtatgggtcatacagaggacgtcaaagtgaggaattgcatcaaggatatgtattgtggtatcatcatagttttttagttttccttcatagaactgctgctttcctgatttgttagctaaactctgggtttcttttcttttttttttttttttatccttaaggtaatgattaccattctttcagacaagtttctgacaaagccatattctggccttctggctaatctgcctctaagaactgaagtttcttgttgaatcttggttaaaatgtttcaaggctcttgctaggctagaacctttagctagagacattctcattatcctcgatttctatattgcttgtgattggcctattttgtatttatgttagttaggctagggctttccaaatgtcattgtaattggctgtcagaattgcttgggaagtttttgtttttgtttttgtttttgagatggagtttcgctgttgttgcccaggctggagtgcaatggcaagatctcggctcactgcaaccttcccctcctgggttcaagtgattctcctgcctcagcctcccaagtagctgggattacaggcatgcaccaccatgcccagctaattttgtatttttggtagagacggggtttctccatgttggtcaggctgggctcgaactcccgacctcaggtgatctgcccgcctcagcctcccaaaatgctgggattacaggcatgagccaccactcccggccttgggaaggttcttaaagatacctacattctaatgccatgtttgacaaccatgatcagtggttgtgtcctctaataccattccttgtctttctttgcattgattcctattatgctacaatctctactgtttgtctgttgggatccttcaaagccctaagtgtaccagaattttatagctagaaaataataaaaatccacgaatacttagttcagtggggtgaaccaaattccccactttatatagtagaggcagtacgtctgcaagttagaaggaggtatatttgggcacaaagggaagatagtatatttatggggccttcttactccaaggggtgtcaagttgaaaatgtaaagagttccccaaaaggtttctgttaatttatgagtgagagatccatgatggattgcaagtgacagatcaagggtttgaaactgaggtctggccttagaagtttatgtcaaagcagacaaccatacccttctaagtatggtgatgtcataattagggaatgacgccagggtgttccagagaccatggttctgactcagtagagtggtaattttgttgggaggccgagccacccagcatatccttttggccatttaatctggcttctgcatttccactgttgctttgttttccctcctcccttctctgtccactcgtttcgttttctttgctttattttctttctgctcagtgtcagtgttgataaggaaggtttgatgggcttgggggcaggtatagatcaatgtagcagttcctgcttttctcttctttctcacttgaagtctaatagccaatactctctcagtatgttatatgccatcatcaaaaacaatttatatttatccagaaggaagcactggctctgtctccccaaagtactttcaagtaacattattttgcattatcttttttttttttttaaacaggacaggatctcactctgttgcccaggctggaatacagtggcacagtcttggcttactgcaacctctgcctcctgagctcaagcagtcctctcacctaagcctccccagtagcaaggactataggtgcacaccaccatgcccacctaatttttgtattttattttgggtagagacagggtttccctgtgttgcctagggtggtctcaaacttccaggttcaagtgatccacccatctcggcctcccaaagtgctgggattacaggcatgagccactgtgcccggctcactttatgtttacaacaggaatatgagataagccgggctggcatcctctttttaaaaatctaaatgcttaggaagttaaggtgcaacttaatcttagctgctttccacataacgttttgttgagattcgcttcctttgtttatttatttatttttttttgagacggagtcttgctctgtcgcccaggctagagtgcagtggcgtgatcttggctcactgcaaactccgcctcccaggttcacaccattctcctgcctcagcctcctgagtagctgggactacaggcacccgccaccacgtccggctaattttttgtatttttagtagagacggtgtttcaccgtgttagccaggatggtctcaatctcctgacctcgtgatccgcccgcttcggcctctcaaagtgctgggattacaggtgtgagccacagcacccggcctagattcgcttctttaatgaattgaaaattttggttaggagaaggagacagcgaatgcagggagtttgggaatttagtgtatttagaagtagccctgcatgagatgtactcgcaatgttaggtagctggagatagcagcaaagaccatggaagagattcagaaatggaaattgaggacttttaaaagtatctttctatataaaaattaacttcttttcatgattctctatctaacagcccaccactaccaagaatttactagatttttgcgggttagcttggatatttacccaccttttaaaaatgccgtttttctcttagagaatgaattctactgtcttgatagctgattttggaatactctttctttataatttagggaatgtccattttaaaatcttttctttgctagtaatgaggtcatagtctcttaacatgtaaagtttgtataatactttttgtttgttttgaaaatgccatccccttttcctcccaagtttatgaagatcctacttcatttgtcttggtgatcaccttttttcatccccatttctctcatagaagctggaatgccttctccagaatggaccaagaggaaaaagcagactttgaaaattgggcatggagggactctagacagcgcagcccgaggagttctgggtaagagatatgaaaggcagttaagtgtccactgtcacttaatatcagaaagaaacactggttgagaacagatagattgactaaagccttctatttttcagtcattttggaatgtttcagatctactggatatatatagtgccatcttttaaagaagcccttaaatggtacaaggcctacaaggctgttagaaatagctacttttatgtgtggatgggactttgaaaaaaggtttctctctgtgcagaaaagagttaacatagcaggcctgaaattactatctttagaaaggcttgcttggacagcttgcccttggttggtatctgggaacttggattttgggagtgttcccacccttctctgtctgataaggctggttggctgtgcctcagatgttctgagaacaccagctttccttctaggaatctggaattttgttccactgctaaggcagagggtgcctgagtgatcatcctgtcaaatccccaataaaagctttgggcactggggccgggtgcagtggctcatgcctgtaatcagcactttgggaggctgaggcgcgtggatcacaaggtcaggaattcgagacgagcctgaccaacatggtgaaaccctgtctcttctaaaaatacaaaaattggctgggtgtggtggcatgtgcctgtaatcccagctacttgggaggctgaggcagaagaatcacttgaacctgggaggcagagtgttcagtgagccgagatcgcaccactgcactccagcctgggcgacagagggagactgtctcaaaacaaaacaaaacaaaacaaaacacagctttgggcactgagtttctaatgagcttccctgagagaaacattgcacatgtgttaccgctttttttgttgttggagaaagcagcacgcttgagcatcccctcacaggagggagagaggataaggaagcttgtgcccagatttctctgtgtctttttctcttatggtccagctgtgtattcttactacatcactgtaaaattctgagctatatatcaatcttcgaatgtgggctggtcttggggattcctgacaaggtagaaggctctgtttgtctgcctatctctaatctaatctctgagatcaactctcttgagaaggggaagcttgagagtaagtcattttcggctggagatgtattagttgaccgttttattgcttgtgaaggaaaattggtagaattgatcgaagggaataaaaatattttatccttttttattccatcttttttttttttttttttttttgcacctggtagagattctgaagtccaacttaatggactgctaaagtgtgtatacacaggctagggtatattttactctgtaactgcatccttagtcacagaactacctacatacattgggatccctctcagtgcccccttcccgacatatgagaaacaaacttttatggaacaatacttatctttttacatgctctggtattttatattttattcagtttcatttagagcaaaaattaggtacaaagaaacaacagcaaaccttgatctaagctatccaaagtaaatgagcgcttatttaaaaggataaaatcggtgaagaaaatagtatgcttcaagaacattatatactgtatgattttgtattttctaaaattatagatttatgttggcaataatatttttacttgaggttaaaatagaaaaaatcagttcgagaccaatctggccaacatggtgagaccctgtctctactaaaaatacaaaaattagccgggcatggtggcatgtgcctgtaatgccagctactcgggaggctgaggcaggagaatcacttgaacccaggagacagaggttgcagtgatctgagatcgcgccactgcactccagcctgggtgacaagagtgaaactcttgtctcagtaaataaataaataaacaaacataaaatagaaaaaaatcaggctgggcacagtgactcatgcctataatcccagtactttgggaggccgaggtaggtggattgcttgagcccaagagtccaagaccagcttagacaatgtggcgaaaccccatctctataaaaaattaaaaaattagctgggtgtggtgacacatacctatagtcccagctacttgggaggctgaggtgggaggatcactggagcctgggaagttgaggctgcagtgatctgtgattgcaccactgcaccccaaaaaaacaagcacaacaaaacaaaaaccccagttaataataacaagcatttattgagcatttactgtatataaggtcttcagttttgggtattcataagttctatagtttaattctcattgtaacctataagagaggttattactatccccattttacagaagaagaaaggaagaccctgagagataaagtaacatgttcactgtcatagaattagtgagtgacaaagtcaggatttgagcccagatctgctcagttccaaatcatctgccctattgtggatggcagatacctggtgctcctgcttttgttcctcatgccctgtgctcttggcagaaattagggcttcatgattcttaccagcttagcacttcagtagcctataccagttgattagagttggcctttgagttgaagcctgtgtttctaacccttctgctttactgttttccaggcatggcaccacaaatacaaggaaagagaggatcagatcagttgcttgtttacgaatagatcaattctattaatttcgggtggcggttcttcattggcatgcagaaaatagtgatattcaaggcagtgaatgaaagtttagtttttaccctgaacctaaggctagcttgtccaacctttggcctgtgggctgcacgtggcctagggcagctttgaatgcagccctacacaaatctgtaaactttcttaaaacatcatgagtttttttgtgatttttattttttttaagctcatcagctatcgttagtgtattatgtgtgtggcccaagacaattcttctttcattgtgacccagggaagccaaaagattggacactcttggcctaagggatcttgttgaagcttccattttagtattgtgaaggggctgagatttgtatgcgtggaagaaattgtattggaaacagttttctggttggaggctcaatttatatttgatcacacagggaattttatgatgatataatatgttcatatgtcagatgtattaatttttcttttaatgcatgtgatttccgaggagagagaaagtttaaaaaattgtaggtgtttagtcacagagtaagggatgtttgttgtccaagttagcagttctggaaacttatgagaagtcgatttttgattgtgtgataaaataaacactgaactctaatcatacttcggtttgtacactggctactggctgctttagttactaactgtatacatcctaagaaaatctcgtaacttcactgaacgtgtcttcatctcttaaaagaagataacgtctaccaaaactaagtcaaaaggttttcaaaaatattttacaaaatacctatagtatatagatatatactttatcctgtgaagtgctgtatacaggtcttttttatttttatttatttatttttttgagatgagtcttgctcttgttgtccaggcttgagtgcggtggcgtgatctcagctcactgcaacctccacctcccaaattcaactgattctcctgcttcagcctcctgactagctgggattataggcgactgccaccatgccctgctaatttttgtatttttagtagagtcagggtttcatcatgttgaccagggtggtgttggactcctgatctcaagtgatctgcccacctctgcctcccaaagtgctgggattacaggtgtgagccaccatgcccggccaaaaggtcttttttgaaacaaacaaacaaacaaacaaaactaaaactggacctatgcaaaaaaaatatacttttactttcaacatttttttttgcaatattaatggtgcagattaagaatttagctgacaatttaagattataacctgaaattcaggtttataattctatagcataattgctagagggttcacaagtttctcaaaaatacgtggtaggcaaaataatggccctctaaaggtgtctgtgtcctaatttccataacctgtgaatatattaggttacatcacaaggaacattagggttgtagatggaattgatgttgctaatcagctgactttaagatagattatcctggaatttccaagtggacccaatgtaatcacaatattctttaaaagtggaagaggaggcagaagagagagtcagaggagatgtggcagtggaagcagaggttggagtaatgtggttgctggctttgaagagtgaaggggatcacaagccaaagaatgggggcagcctctaaaagctggaggaggcaaaaaaaaaaaggtcctctacggaggctctagtgaaggattctcccctagcacctccagagaagaacacggtcaagccaaccctttgattttaagcctagttaaacctgtttcaggcttctcacctccccaactatgtgataaaaagtttgtattgttttaagacagattggtaatttgttaacagtagcaataggaaaggaatacacctatttatcataaatcacttaaaatgtaaataaaatttctatataccatttcaaaaaaatttttttaactttagaggttatagaaacagtgagaaaatttagaaaatacaagaaagttgcaaataaaaaattatccattttccacctttcatcaatagtcagttaacatttttgccatatttccttgtagctttttgtctatgcagatttttaaagttgagatctacttcactgtgtatacttatatatccatttttttaaacttaacattgtaacataaacattgttcatgttgataagctctttgtaaactttatttttaatggctataaaatgttccatcatatggctaaaataccatttattaaccatttccctatttgaggtcactgaggttatcaccagagttttgtcagaactgattttgtgagagatgtctttatagatagaactttttgtttgttttgtttttagtttttacccacacatctgtatcagccagatgtttcagattcttaaaatagattcctacgattggaaagatacaggtcttgtaagatgatcctacagaaagctggaaatacatgtatagagtccatgcctgtcctaaagagactctcatcataaacaaattctatctttttgatttgagaatgggatactaggacattggataagtttggagatagttatttttgtttttgtttttttaacggaaaagacatttgagtgagcacagaacacttgggagatagagtaggagagtagtaattgtgcaacagtgcatggaaaaccccgttattcatctgctctctaaattctccacaccttttcaaatgtggtgcctttgctcatgtttttcttttataagctgctcatctctctcagcacctttggttgtagaagtcctactgacctttccaggttcagctgaaatgccatttcctacctttgaagcctgcctgctgctcttctatactgctaatgtaaaatttcattttgttcttttagtttttgttaatatctgtctccctattatattgttaaatcacagctgaagccaggtcttatttatttctgtacctacacaataagtactggatacaattttgaatgattgaagggaaaaaatgccgagtaaaaattctgtccgggaaactaacctgtgaatgaaaagctgctggttggctaggtcccaactccagataatttttctatatgccaccaccatattagtcttcctaaaattctgctttcactaatcacctcacttcaatggcatttggttattcttaggttaaaatgagaggattaagctgggtaactctaagatggcttcttttaaattttatccttctgggtcactaaactagctcagaaaccatcatgagttcagtatttcagccatgttaaagtcaaacatgtcagtctgcttctaagacaccctgtgttcagttgataaacctactgttctcatccttgtatctgagagtttgtgcaattattttcttttttagaacatgcttctcttctctctgttgtgttccctatacatccttcaaaggcctaatacaaactccgaaatgcttgaatgaagcattctccggcctctttagccgtttaggatgctcccacctttgccctgctttggcagcggttctctctctgttcatttgacacttaatcatatactatcatattgttatttagcattattcactcattaggcaacatttcttgagcactgtgatttttctgtattttattttcctgatgagattataagctgtttcagagttaggaaatgtgtcacaggtttctttgtttttccattggaagtattcctcttgggattatgtgcatagtagttgttcaagaaaaattgattggagatttatttgaatggaatcaagtcgcattgaatctttcctgtttgcctcatcagcagcagtatctacaagttctgtcatttgaagagtattatgctcttcagaggattactgaggacagactgtttttgatcttagaccttgaactatatgacttagaaggacaatacagatgagtgtcatagaggttttgaggaggttggaatagactttatgaatgagttggggcttgagctgggcttcaaaggattgactttgaatactttaataaggagttggtgctgtaggcactgggaccctactaaggattgtttggggggctttgtaatgtgaaaaatagggtttcagaaatggttatgaagtggtatgaattggaagaggaagggataggatgtagaaccgtcaggtttgcagggatgtaggctggttgcagtgaggagaaagcctaggtgagttaaggtggcagagggaatggaaaggaaggggggtctgttcttagaccatttggtttgaatcttaactctaccaggtactggttgtgagatgctggacaaagttcttagtctcttattcctgtttcctcatctatcaacaggggtaattatactatcttttaaagtttttttttttttttttttgagacagagttttgctcttgtcacccaggctggagtgcaatggtgtgatcttggctcaccgcaacctctgcctcttgggttcaagcgattctcctgccttagcctcccaagtagctgggattacaggcatgcgccaccatacctggctaattttgtatttttagtagagacggggtttctccatgttggtcaggtgggtcttgaactcgtgacctcaggtgatccgcccgcctcaacctcccaaaatgctgggattacaggcgtgagccaacacacctggccttttaaagttgttataaggattaaatgggataatgaaaggagagcatttagagtagaatctgatacatggtaaactcactgaatggtatttgctgtaaatattggagatattttttctagtttgccaatcagtagtccttgtttactcttataattctgaattgtggtgattgtattgtgttcttatgcacagttatatctgttgatgacaaatatttctatacttacaaaaatgtggcttcttaacaaaaagagaagtgactaaatcctctcaccctcaccaagtgaaatgtgttgacgtatgaataatgtttgaaatttaagagaaaggtaggccattgttgtactttgggctctgtaaatacattcttcagccttcattttaccttgtattctttgtgttagactgatttgttatgtttctcttttcttgattgtatatactgctgggtgctaatcatctttaaatggttcattagctgtgataatggcttttgctttgtttaataatgaattctgtcaaaagactttatcatacccacttgaacatggttaattgtgccgtgtgtttttcactggtgcccatataaaattccagtgcgtcctttgagattgttctaaggcttcattgtctaattggctgggttaaggtttctactgagtttaatactttgagaatggggagaaaggtcttctcttgtcccttctttagaatttcttagttgcatgacaagttcaactgtttggagtaataggagccctaacattttgctaaatatctgttctttcccacttcacattacctaagctgggaaattatgaccaaaaaatatagctattttaaaaacctagttttcagaacagagtgtcataatatttctttctttgatttgtagttgttggaattggaagcggaacaaaaatgttgaccagtatgttgtcagggtccaaggtaagaatactgaaatagttctatttttctttaatgttcttaatgatctacatgtattgggtttttatcaaataaaaaataaactgagtaaactgcatgaatgggtatcattcctgagtattaattatgtctataaacatatctgagattgaaaatatcgagactgaaaattggaaattcttaattgaaaaaccaattagacttaaagaaacaatgctacagtgctcatcatttaacaaaattatatttagacttttaaaacatcatatttcttagatgattgggacttagaggtcataaactctagtgacagacttttttaaaccttggaatttttatagaaacaataccattttgtaaactgtgccctttgagcaaaaatatgctttgttcaatggttataaatgtttattaaagaaaagagtagggcctctttaagatgataaagtatgttcatatatgagagtaaccttgaatagatccaaaagcacttttccaggcacttgatagaagagagaaggggttatttggaggcaggagaggctggaaagctgtgaactgctggtagaaggggtctcttccatctctcaaagagagagtaatatctgtatcctaatgagtaattaggtgctggttataagtgctgggactaagggtcaatgaaaatgcacgtggaaggaagcttagtatgccaagaggtagcgaaaaatttcattatgttcctggaataaactttgttttaaaactcttgctctaaatgtgatataaattgttgataaaatgatttttgtttctttaaaaaaatctgttgtcaaagaccatttaaaaaacaatttccagttcattgcagactgattgatgacttttgtaaaatataattaaaatacggcaatgtaaaattgctaaataagtttctacgcaatctcattttctgaacttattatagataactggcctgtggaaaacacttgacgtagtagtggtttaagtattaaaataaaagccctgaccgagcgtggtgtctcatgcctgtaatcctaatactttggaaggccgaggcgggcagatcacttgaggtcaggatttcgagaccagcctggccaacatggtgaaacccatctctgttaaaaataccaaaaaaagtatccaggcgtggtgctatacacctttaataccagctactcggtagactgaggcaggagaatcacttgaacccaggaggcggaggttgcagtgagccaagatcacgccattgcacgccagcgtgggtgacagagtgagatgactccatctcaataaataataagtaaggtaggtaggtaggtaggtagataggtagataggtaggtaggtaggtaggtagatagatacatagatacatagattgattgattgattgatcgattgattttaaaaagcctcggagaacatattgcatgtgatgtctcattttggttatcaactggcataaaaatctgtgccattcaattggaaggaatcttagtgcctctgataaatgaaaagcttcagtgtggcttgctctgtaatcttcaaaatattggtgttgaaaaattacagagtataaaaattgcattagaatgaaggtgtttgacagtttctcagtaaatttttatactgtgcttactgacacatagagtttagaatctgtttctgatactggtttttgccagttgtttaatatttgtttctgaactcccaaagatgaacaatgtttactttaatatgggattatggatgatttttttttcacattatttggtattttctaaaatctatacaataaacaagtcacttttatgttaataataaaaaagatatatttacgttaaggaatttgtttgggtttttttaccaagataaaatatgttgagttcattgagatattcgttgttcacccctcctcccccaaaccacaaacacagcacactatatattactgaaagattttacttgtaaatttcaggcatattttcagaaatattatgactgaaaatgtaaatacatcattgactctggtataaattttgtaacagccaatttgctgttcagctacgaaagctgaatgtcatacagtgaaatcactgatcctcaaaatgactgtaacataaatagaataccacaggcacgtcttgttacagaaacctagttcttaggtatttcaaaaataggcatcgttgtcttgttagctatttatatttcttatccttttaattttatgtacctgttaaaagaactaaatcattaagagtttaatgttgaagattattttttaataaaaagtagttaaaaactgttaataaatattttttctttttttaaaagcactagaaggaatcttagagatcatcttatctagtgactttcaaaatttttttgactaagacccatagtaagaaacatattttatgtaatgaccatatagatacatacatttatgaaaaggaaaaattttatcaaacaactttgtgttagtctgtttgtgttgctgtaaaggagtagtcgaggctgggtaatttataaagaaaagaggttcatttggctcatggttctgaagtctgtacaagaaacaaggtactggtatctgcttctggtgagggcctctggaagcttacacttgtggccatgtcgcatggtgagagagggagtgacagagagagaggcggaggtgccaggctcttttaaacagccagatctcgcgtgaactcattgcagggagggcaccaagcaattaatgcaggatccgccctcataacccagacaattcccaccatgccccacctccaacactggggattatatttcaacatgagatttggagggggcagacatccaaactttatccaactctaaccctatgtatgatgtattcttgatacttttccttctatttcattaaaaaaaaaaatgtggctgcagccccctaacttggcccagatctaatgtccactttttcttcacttcctattttgacagatgaatttttatttgcatcacagtgcaactagaaaaattagacttctggtatgtgtaggatggagttacgtcaagagtagaaatatttagttctaggatggcaaatattcagtgttcttgttacagccatattacagaacagccttctctccctagccagtcgtaattggagatattgctaattgaacatggcctaacatttcttcttgctgaatcaagaaacacccttagaatcttcttcaacatggtgccacttcatacaactactgtcacttactagatgaaattctggcttttaagtaaaatctttaggccatcacattattttgcttccatctgtgaagactagacactaatcagaccacccaaatcatttcttgcatttcctcccattcagatcagggtaaaagttaagaaaagagccactgctctgtgttcctcattgtcttcctctcctgccttggagtgagctttgttctgccagtgatcatatttctcaagtctttttttttttccctgtgcctgatcatttaggattatgtgtataatgtgtgtgaaaagcatgtgaactttttgtacagtgccttgtgtatggaaattgctcattaaatactgttattactattcccaagtattttacttatccccaagtctctctcttgaggtccaggcctgttggagctttctagccacatgttctgtagacacctgaaattaattttactcaggcaagttctgttggaactcttgaatacagttaatttcttttttttttttcatggctatctgtgattgctggtgatgtaggcaaaatattgcactcatcagaaagagaaagcatgccagttctttaagggagagacagactttccttggacattaaagccagaaagaagtttctgacaataagagatattaaatgacagatagatggtgattttcaaaaatagttttacaacagatgtagaaatggagctacataaaatacagtttaggtaaaattctgagaggttaggctgatgtgttcctttggcctaagttgatctaagtataaaacgttgcttacctagaggagggcaaatagcccctcttatatcttccctaaattacactttctttgagccagtcattcagcaaaagctggatagcagatgtcgtactttgaaggaacagacagaaggaacagaagaaaacagatgaggttttggagtgctgtctttattagttttctatattgttgatcaaagttggttactttataaatgctttagaaaccagatggaaaggttatgaaaacctgaataatctaactagcatgtccagatataaaggtacctccatatctctgtgcaggtaaaccatagtggcacctgcaggcaaagccagcatctcctcagaaggcaactttgtatccccctccagtagttaaacaagtgtcatcattggagtgaatgaagtttccccttcttggtgtggtcaaaggatagtaactttccccaagaacacagtaacatttttaggttaaccagttatgagaactctaaagtgtggcttgagtaatgctcctatgaaacttagccaactcttgaagatttcagcatttctaatcagttttctccagaggctagtccagtttgtaccttttctatatacgctattaattttcatatatttcataaatactgtattgaaaattttaaagggcttatacttatgaactataaaaaaggactgttccttcttaatgaagacattcaaagccacatgtttttggtttgataggttttttaaaaagtgttctttctcatcctcagtaatatccctattttgtttgtgaaggtttaaatcacaagctttcaaaatcacacctcagttgagatccaaggaaatgattgtgtgtatactttctgtagtagaaacatttttctttctcctaaacagaacagaagctgatttgctgctagagatgtctagctaatacctgctgtggggtttagggagcttgacgatgagtaaagtagagagtagaataataccagtgagaaactgtgagtcccagagagtacacaggtcaatggaatgttcttcaggacctctcttttgttgcagtagaattacattgtaatgaatacagtagtagaattcacggttcccaggtatacgtcttggagaattaacaactccaaagcacagactctacgtagaatttaagccagtgaaaagaaatattttagactccataagataaaatgttagggttgaatgtgtgtatctccatgtcttttttcttctatcccaatatctttttggtcgtgaggctttgtttcagctgaaggcttaactgtgtgggtgaatttttctaaatggtttgtggataattgaataaaattgaaggataattataactagatgccaggacaagggaaagctaggagacagctgatttcaatcatcggttcgcagggtgtggtctaaggactcctgagactctttcagggtgtctgttgaaattgaaactattttcatagttttgcctttttaacttgcaatcccacaaatacatggtagagtttttcagagattactagatgtgcaatgacatcattgctctgatggctaatggaagttttaaacatttttcagctttaatttctaatacaataaatctaggcagatataacatgtttttaaaaaatgtgtgccagggtttctcaataagttttaagtgtgtataggagttctgaaagcaaaatgtttgagaacattttgatttgatttgatttgagaatgttgatttagatattgtctcccctaaaaagaatccagcacgtagctacatacaatataattgcagaccctggagtgggttgagacttagcagatgaaatctagatattcaaaactatggtgaaatgtgaagaattgcacacataggcacttctctagcatgtgtatcattctgtcagcaactttttattaagctgctactgtgtttctatttaggaaagaacacaatagatgagcaatgggaaactctagctgagagttcatacttgcagaaagtaaggatcaataaagtatacttggaaaacagtgaatatctctgtaggtcatcatgtgctaagatgtgtgatatgtgtgatatgagagctcagtgagataaaccagacatgtctgttgttgccattatatccagtcctctctgcagtagttgtgtttattgaagttttcctgttacactgtaacctcttagagggagagcaatctatcttatgtatctgtgtatccttccctagcacttaggagaatactttggacattcatagtccttaagaaacatgatcgaatttgtggatttgatatatgccttccttctttctatgtatggaatttgtatcgagcacctactcttagtcatgctgtggaggtgggtaaatggaagttgggatggattaaggggtggctttgaaagctgaataaggtttgatccttagagaagagtgggagttcaaggccagggaagtggcatatgtgccccaggtgcacaaaacaccaagagtccagagactagaatgggcattgcatacttgggaaacatgttaaggttcctagttcaaactcgttgcagagcagaatactgcagatacattcaaggcatagtctgcaagattgcaccatggttttcttatgcaactaaacagactctaaagacaaaaaaatcataaagcattttgatgctttgctttccttatgggagctgactgtaaccagatgagtcaactctagccactgttaactgcgaatcattctgtattttctttcttagaaaataaagatgatgatggtattattatctgttatttaccagggctagatattgttactctaaactctttgcttcttctcatgaggcattattgttttccacattttaagataaggaaattaagctccagccggaaagactaacttggtctacaaattgtggtacagtcagaattcaaatccagccagttgaccctgagcctgtgctgttaccattgttgtacttctctcatacttccccctgtggtatgcttagtcgaggttgattgtcccaaaatatagaagcaggaatgggtgtctcaggtgatgagactgtgtttagttacaaaaaactaatttttgtcaatacctatgaaactttaaaaaaattaattgaaatgcgttggaatattcccttctgtattatatttatttttaaaaaatctgagctagataatattaaggtgatttcatcgaagggccttaagctgttataaaatgtctgcatacttacaaggttttgaagttttaatatttttctcatttttgtcttgggtcccttcactagcctcataaatttgtcatgaataagcttatatttctgcaaagtactttgagttttcttttataaaattgctcacataaatacagattattttcagtgggaaataaagttcttgcacttttttcactacttcatgtgatgccccaaataaaatttgcgtttgaccaaagtgaaaagagtacgtactacaagtgtgtcctaagatgagaaataagacaatcctcacgtaactaagaatgatctaattcttcacttgtgaataaagatcagttcttagaaacgattcttgttcctgagatcttaagtagtaatttatctttattaagaaaacacatggccgggcgtggtggctcacgcctgtaatcctagcactttggctttgggaggccgaggtgggtggatcacctgaggtcagaagttcgagaccagcctgacaacatggtgaaaccccatctctactaaaaatacaaaaaattagccgggcgtggtggcgggtgcctgtaatcccagctactccacagggtgaggcaggagaatcgcttgaacccgggggacggaggttgcagtgagccgagatcgcaccactgcactgcagcctgggcagcgagcaaaactccatctcaaacaaacaaacaaacaaaaaacacatttaatagttaagtcactaattctgtgactatactggttttgctctttttctacagatttagcttttgtttaatacatgacctagttactaagaattgtcttagtatttcatgtaagaagtactaagttggcttatttaaaattaattttaattgtatatgtgggaagattattgaatcttatgatgaccatggagtcaaggctattgtaccattctctctactcatggatagacttgaacattttccttaaacaaacttctcagtataaaggtggtttgagaaatttgcttacaataataatggtcataattattaagccataattatcaataaaatcaggtttatctttctcatattggctagtgtgagacgtttgttaatgttcttcagtttacacaattgctttccacatattaaaaacaaaacaattgcagtctgttgttttagcctgtattttgtatcaggttggtagtagtagtgaaattctgtgtaaacttcaagacatgcataacagtttttgtttgcctcacggcccattttctctcttgtttcccttcctctagagatatactgccattggagaactggggaaagctactgatacactagattctacggggagggtaacagaagaaaaaccttacggtatgaagctcatctaatgtaggcctcttttctaacatttaggaaaagtttctgtgcaggtagcattttaaaacaaatctctgatattatcagccattttaattctcagtgtgtttctttgggctaagaagattggaaattgtttatcgcattgttgcttacttgataggagtttttgaataaagatttattgtgattgcctctttttctatagtgatgttttaagtgttcagaattattcttccaaataacctccttgcaaaagcatgtatggctaggatttaggttattttccctagtaaacgagaaacaaagcagagatactctgttagatttcatctgtcttgccattaaaaaaaaatatattacctgtcagctgttgaaataaatgtaccaggtttagtactttaaaacttgtcatgtttttgtgctttcggactatgtaaaaagaggacagagggcaagctatttctctggaagtaaaccagaactcactggggcccaccttaagtttcctactatcccttctttcactaccgtaaggaagaatagataaattaaatggtctcctagcaactctcacagtgcttatgctgtttataatgcagcaattgcagttttctaagtcagttcacctgcatcattatgtcaccaatttgtggactgtttttttgtttagtgttatctcttagtcataggcaagccagcatttggcccccttatatttttgtgttgattatccttattacgtactgcatattgccccagtagtgaggccaacctttttattgttcataatagcttcattttttctgttaacatttatatgtagcttagtatcttgctcaattaatcaagcaacataatgaaaagaaaaattactgattgatttcaaggcttttcaaaaacagatgttgaaatattcttggaattattattattaataaataatagcagaccctcacttaactgaaagccagctataaccttcaaccagaagactttaagattaaggaggcatagggcaataggaggacgtcagagacttccagaggatactaaagtatttataagtacttatgtaattaagtctcctgtatctctgactccatttaccaaaccataataaggagaatgattattattcagaacagtagtcctggggtaatataattaaggctggggggtgtgggtaccacgtggtgaaaaatataaggcgcactagagtagacaaatctgggtttaatttctagctctgcccttatctagctgcgcaaatttgaaattttcttagtctctttatgttgtagtttttccatctccaaaatgacaataatgatagcaacctcatagtgtgattatgaggattgattggaggagaatgaatttggaggtctcatagacaagtcatgaggctcttatagtagtccaagcagagatgatggtaagttggaccagggtgccagtggtagagacagagttttcctattagaaaaatttcccatgattaggaagtaaaattagcaagacttgatttttagttgattggacaggatagcgaggaagttgtcaaccatgacctaggttttggggttttaaaattggttacatgatagtgtaattcattgaggatgctggaaggggcccagggtgacaaaaatacttaaacatatcctttcttcctattcttaagcattttagtattttaaaaagctctatgctgtattaggtaatttgtaaccttatttacttaccttaaagaaagctcagtttgttaaatcatctcattgtaatgatgcagtaaatcatagagaaactaagaacgtttttcaggctgtgaagagaagagcttcctacagtttattgaatagtatttatagtcccggaaaatgagagctcagagaattttgctgattggcatgatttttctgtgtgctttcagtaaatcaacaaatattttttatttgttgaagctgctatagcaggtaccaagggaaagatagataaatgtaagacctagcttgtgtccttaaggaacttactgtctaatggagaactctgaccaatattctcagccttctgagacctaatacagagacctatgaccaatatcttataatgccttctttactatcctgaaataaaattcagagatacttgaatttacttatacattgagaaaaatcaatatgatgtagtaaatggaatataagtaagaaataaaagtaatttataataaagtaggtgcattcatatgtaagcacacagatattagcagactaaaagtcttttggctggggtgcagtggtgcactcttggctcactgtaacctctgcttcctgggttcaagtgattcttctgcctcagcctcctgagtagctgggactacaggcatgcaccaccatgcctgactattttttgcatttttagtagaggcagggtttcactttgttggccaggctggtcttgaactcctgatcagcactcaaacatacagcataattgtaaatagtgaaaaatgctatttaggaataatagagtgttatgatagagaacaaagggaaaggccctgttacatgctttgatgtttgagtctaagccagagactcattttcttattcctctgagctagctttcagctgtctgaaataacagttaaaaatagtatttgtctagataggacaaaatgacttaagaacattaatttgccattgactgcatactgagttactttagccaacatcagttgttcttgacaggtcaattaaaaactgtgtttctagttgttacaatgactgggtggggtggtgacaccagctgccttcagtgggtggagaccagggatgacagatgtcctgtaacacagaggatcgtagaacacaatgaagaattgtcctgtgtactgtcagacttcaggatgtctgccagatagtcatgcaggtgtatttcagccatgaggctgaaaccatgtctcttttggtcctcagtagtgtatttttggtgtggtatacggcatacagaatgacatatatgacatatagagtttgaatcaaaaaagataggcagcagaggcattctcagaaaagatgactgcagataagccgggaaaggcaaagcatcttcctgccttctgctgctgtcttctcatccacatctaggtattaagtgtctgctactattgccagtgtctctgaggacacacagcttcagtgtgctcatctgttctccgctgagctaaggacactaagaccatagcttcccaggctagatgtggaccaagcatccgggaaggcctaactgtccctgtactgggagtagttttttctgtccctcccatgagtcaacaaaggtagaaagaaaagtggaatctcatgctaatcttttattctaaacaccaccaccccttagtcctgagatcagatgttaccaaggtcttctcaaatggacgtagctgatgttgtatctaatggtactgtctcctcttggactgtatatggtttggctgctgagacttatcctggagtaagctcaagagttgaatttagtttcaaattgtgatatgaaccaatagggtatatgctataattggactagtgtgtagctgggtataaaaattcttacaaagctgtttgcatttaaacttttcattataaaatgtacaagtaaagaaaactgaacaaaaaataaaggtacagctctatcaatttgcacaagacaaatatctgtagctagctatcacccttagtcaagaaatagaagattgctagaaaccacacttgtgccctatctgtcattaccctgtcctccttttgcaaagataactactgttctaacatccaatgctatggagatggttttaaaactaaggcatagttttgcctgtttttgaatttagtataaatggaattaaacactatgtgtcctttggtgtctaaattcttccacttattatatttttgagatccatgttggtacatgtatgagtattttggacttttttgttgctatgtagtatgccactgtgtgaatatactacacacatactctcccagtttggggctttgtgaataaagtgctgtgtatattttatacctgccttttggtagacacatttctaccgtcatttcttttgggtatatacccaagtggaatataggtcgtgtgtgtgtgtgtgtgtgtgtgtgcgtgtgcacgtgtgtgcctgcatgtgttcctgggttatagagtgggtgtatatttaactgtactggaaattgtcaaacagttgtccaaagtgattgtacttggaaaactttgcatttccactaggagtgcataagcattccacttgccccacatacttagctattaatagtgtttttaattttggctgttctggtgagtgtgtagtgataattccattgtggttttaatttgattattgatgagatttggcaccttattaagtgtttttggcttattagccatcttcttttttgtattgtctgttcaggtctcttacccattttttgttttttctttcccttttgagttgcctttttcttatacatttgtatgagtttttgttttttattaagcaccttccattcgaggatgcataggttctttatatagtctggatatgttctcttcttttgcctatgtgtgttgcagatattttctcttactttgtggcttgcctttttcctctcttgtcttttgaaaaacacaagttcttagttttaatttagtccagcttatcaggccttctcctttatggttggtccttttggtgtcctgtttaagaaaacttttttgactctaaaagtgtgaagatattttcctatgttctagaagctgttattgctttgcctttcatgttccctctgcaatccaccttttcttcctgcatggatgtccagttgcttcagcactttcccagtactcttgtgttctcttctttattacacatcaagcacccacttaggctattgtttaaaaaaaaatctatttttttacattgatcagtttgtttatacttgtatatacaccagactatattaattgctgtagttttagactatctggatatctggaagaacaagtccttcctgctttatttcttatagatttttttctataggttttttttttttttttttgagacggagtcttgctctgtcgccaggctggagtgcagtagcacaatcttggcttactgcaagctccgcctcccgggttcatgccattctcctgcctcagcctcccaagtagctgggactacaggtgccagccaccacgcctggctaattttttgtatttttagtagagatgaggtttcaccgtgttagccaggatggtctcaatctcctgaccttgtgatctgcctgcctcagcctcccaaagtgctgagattacaggcttgagccaccgtgcccagccttacaggtttttttttaatagctttcttatcaaagtaaagaagttgccttttattcctaatttgctgagttctggttttttaaaatcatgagcagatattaaattgtatcaaattttttttctgtatctattgatttttctccttattcacatattaaagtaactttacatttctggaataaacccaacttagttgtaatgtgttatcctttatataaattgttgcatttgttttgctaatatttagtttaggatttttgcatctgtgtttgagtgagattgccctgtatttttctttcctcttaatgtcctggactggctttgatatcaaagttatgatgacctcatacaatagtttgggtgctgttctcattttttctattctcaggaagaatttctatcagattggtatttttttctaatgtttggaagaatttacaggtagacatctgttcttgagttttctttgttaggaaggttttaaactatgggttggatttttttctactagctattggatatactattttttattgcttatatcaatgtagataattttttctcctaggaatttgtcatctcatctaaaatttcaaaaatattggtataaagctgtttataatagtcccttatgaccttcgttttattttgaaataatatcaaacttacagcaaataacttttgctaaattacccaagagcaagctcagccatgatgtcccaccaccccaaattcattactgcaattcagtttgaagaccctatttattttttaaaaacagctttctgaagtataattggcatacagaaatactgtatttaaaatatataattttaaaaattaatatacattcacctataaaatcatagctataatgaaaacagtgaacatatttatcatcataaaagtgtctttatgcccctctctccattgtgagttaatttttgaatatgatttcagatatggattcaaggtcattttttgcatatgtacatcgttttgtaaccattttttaaaagactatcctttctgtggttgccttgaacctgtgtcaaaaaacagttgtccatatctgcatacttttattttgagacttttaattctattccattgatgtatttatttttaaaccagtaccacactgtcttgattattgtagctttgtaagtctttaaattaagaagtgttagccctccaacttgttctttttcaaagttgcttttgccattcttggtcctttgcatttccatatgaatttttgaatcagcttgtcaatttttatgcacacacacactcaaaatctactggcagtttgagattgttttgaagctatagatcaattttggaagaattgacatctaaacaatatcaagccttctgacccatgaaataagatatctctcttcatttatttaggtcttttatagccatatttttgtagttttcagtatcagatctttacatcctttgtttatgaaatctctgagtacctcaaattctgaagtttcaatttctaatagttcattggtggtatatagaaatggagttgatttttgtatattgatcttgtgtttttcaaccttgctaaactcacttatttgttctagttgtgttttgcatagattttatattaggatggctctaaaatagactttttttccaggtctagattagctctgcttctaaagcatgacttttctggggtgtctatcaaatgacttgtgcattcaacaaagtttcttcattctggatggttgaaattaaaacatcccccagccttgtaagagctttggtagtatttctttagttaattttgtagagaccctgtatgtatgtatgtacagcttagaatttagtcagagtatcaagggtgccttcatagacatttctttgtctgtgtattttcctcaaattccagctgccactacttcctcagattctgatctctgttcagtgagatcactgtgctttgacgttcccctctctgtcccacagttaagaaagcacctccagacaaaaacaagtgatcatgagacttgctttgtttgtttctttttcctcagggtttacagtgcttgctgcctgttgtctgtctaaaaactgttgcttaataattttgtccagtttaacagctgtttatggtggcaagatttgtctagtcacagttactctttcgtagtcaaatatgatttttaactcaatcatattgtttttagctctgtagtccagttaaatctcaactatgatgttgtgagttcactggaagagtaaaattttaagcaaataatgatgtataacatgatcttgtatatattcattttatgaaaatgattttaaaaaattaatttcaaatgaatgctgtcacattgatggcttattaatttactaaacaaaaaataattacccaagtcctatgacacttgtacctcttttaccaaatatgtttattctgcctagttattggatatatttactgtggacattttattctgtttctttttaaatactttggaagtacagtctttatacttatgtcataagaacgattattattaatttgattgaacttatatcatgttttagatatagccagtttgtactacatactcatgtaccacaagcttagattttattataagataacttgctgtgtaggctgcctagtaattcaaacatcagatggatgattggcctaggtgacttttaaatgcccttcagccttgagattctattattcttcagcaaattaaattcagcagatgtcttgagtgccattttaatagtgtatgttatatacgaaaaattgtctttgagaagcttagaatttcattggtgggataatacgtacgtgtgtgtatgtgtgtgtgtgtagaaatcaaatatgtagaaagaagagagaatatagaaagaatagttaaaaaatgtgtatgattaattacagagtgaacagcacaaaccacgaatgcttgacatgttcagtcagagaaagagacaatatggcagaagtagaatgagaaagaacacatcttgtcatcttgtgtgtgatgatatcagcaaaagagggccaccaaagcagcataaaggagaacacagttgcaggagcgtcagtagagagaccagcgtagcagaagtagaaagttgtttggccttgtttttaaaaatatgtggctaagttgttaactattgcaattttatcaacagtgacatttccttcagcaagtgccagcatggtgacagcattggctgtctagatctggaaatcttacatttgtatgactaaggtgccgctagtaataatgtcttaatgttgctgtagactaaaattttttcatagaaaaatcctcatctgtatcatgagatacatctgtttgagaaacagtatgaacagatcagccatctgaggtctgccttgttggagctgctaggtgctagagaaattcttttgagtgttatagctcttctgtctgtttgagtctagtagattctagtcttttgtttgtgtttagcttttaagggtcaaggtcatactgaggttaaaactgtcttgttgggttgatattaaaatctggacatagtattccatgctgacttttaattctggtattggaagaataattcaaagcatacttgtttttatttaatattgttcaaataaattcaaatttaatacacatataccagaataaaaagtttagataaattttctacaaaatggtaaaaccactgaaatttcttaccattggctgtgaactaaacagattatagaatatttctgtgatttagtttattactaaataggaaatatgtatgaagacatctttgagtatgaaaattctaaatttcagtatatcatagattttagtttttaaaattatagaactgtattttttgtctttttttttttttttaaatatggaacacggtcaggtacagtggctcacacctgtaatcccagcactttgggaggctgaggcaggaggatcacctgaggtcaggagtttgagaccagcctgaccaacatggtgaaacccagcctctactaaaaaatacaaaaagtaggcatgtgtggttgtgcacgcctgtaatcccagctgcttgggaggctgagacactagaatcgcttgaacccaggaggcagaggttgcagtgagccaagatcacaccactgcactccagcctgggcaacagattgagacctgtctcaaaaaaaaaaaaaatagataaataaaaataaaatatggaacacttcactaatttgcatgtcaccctcgctcaggggccatgctagaactctactttaatattgcatcattttgtttgaagcaataccaaacaaaagctgaaaacatgattaacagatagtaaaagctttatgtatatgtcttcattcatattttctaaaatcattgtttaaaaaatgcttgtttagtaagcatgctaaaatccttgcttatgtgtgttttttttttttttgcactggcttatttttgaggccggctgggagtgttcatgtaaaacaagagagaaattccaacaacagagaagggggaggctggggcggggggacagataaatgcaattttacttgacaacagagttgaatgtgagtgtgtaaaatttctgccataacataaaacagatttgaaatcttaccaggtaaaatttaaaatgtggataatacttgttaagtgccacattaagttatttacaatatttgatccctagagaaacttagaaaagaacttacggggattattttgctgcttgtattctgatcacttcattattaattactgcaggatcatttctatagctaatgtgggattttcctcagatcttcttaaggccatagtcagaaccaactgaatatatatataagatgattgcattatttttattggagaaaaattgaagcaaatgaaattgttttaataaagaatataagactttctccctcttttatcttgttaatgtatattttattctttttaacaaggtagaattttggctataaaacatatactgtaatatatgcttttggaaaaagttttaaatgaattttcagggctgttggtgctgtgaaaatagtacatgtacttctgtggttgttttagtgtcttttttgttgatttttggcagataaaataacacaagaagatattgaaggcattctacagaaatttactggaaatataatgcaagtgccccccctgtaagttcaattagtaaatttggaaaaatgtttacttttcttttccaatggttaacatcactctagttaaaatacacgagtttcctcttagcatatggcaaggcaggttttaaatctgatgtgccaaatgttaaagtgaaggtgagacaggatgtggagcttttgacactctaagaggcagtggaatgtggtcttctttgtttctgagtgtggccccagcctggcatctgtgctattacagtgtttattggcttttctgattctatcaacagacataagggcagttaaggagcccagagatgtctcttttcctagaactgttgtgaagggaccagtcccgtctgggagggaagtcagagctgtgagtcagagtcctaatgtgcactgcatgtcaggtgctgggaccattcctattgggcacaatcttttgcttcactattctctgcagccagcgaaaccgatgagagttacaacttattaaaaatacaagtatattgctttactgcttgtcttagtttgggctgcagtaacaaaataacataaactgggtagcttataaacaacagaaatttatttctcaccattctggaggctgggaagtcaggatcacagtgcagtgggctcagcgtcgggtgaaggcctgctttttcacagatggcaccttcttaccgtatcctcctagtagaaggggcaaggcagctctctggagcctcctttataagcgtactaatttctttcatgagggctgcgccctacgacctaattacctcccagaagaccctacctcctaatatcaacaccttgggggttaggatttcagcatataaatttggaggtttggcattcagatcataataccatgtagccatattttcgtgcacattaccatttcaagcaaattgcctcttttgaaaaaaatggctgaattggttataggatatgtcagggtaagtttctgactttttttttagaatttagtatttattttgtatttaaaatcttgagtttttttcaggaacattgaaatatctctgaggagacgctttttaatgattttgcctcaaatgtaaaaatttaaaaattttagcaagatctgcataaacgttattttggatcattgttaaatttatttatatttatgtataagaattgttttaatattttctgtgattattgcaaggattttgttttctagtaaaattttatcacgaaaagctaagatacgctaagtaggttatttgcttattagcttcttagaaatgttttggtaacttatataaaaatgaatattatagtagagattgtttcaaggaaatatagctgagagtattatgaccagagtctactaaattccttgtgccttttaacacagaatgaggactagtaaggacaagacatgaatacattgtctctagaaagatgattaaagaataaaattggtaacactgcatattgtgtgccagaatgaggttatatcagccttagaaatatttagaaactctatccatgacagcattatggagtagattagaattaaaaattcattcattttttagaaggattttcattgtgaagcactgccagtcatccttcctttccatgctaaatctgaaattatcatctcccaatccttccaaatccctctcaattcttgctctcctttccttccatttctccttctctcatctcacaagctattctgcattaaagaaagatggacaaagactttcgactttgatgaagagaggtgaagtcgtagaagcaaaacctgccaggccagtgactgtatacagtatctcccttcaaaaattccagccaccatttttcacattaggtaagatggagaaatttgaaatcatttgtatttacgtgtatttttaatttgtatttggctacttttgtgtcattttaatagatccgtaggatgttggagattttttaaaatttgaatttaaggaaagttaggatttctttataccttttttggtaacacatttaatgagatacctgtagctatatggaggttcagaaatgcgtttctaactgggctgactttttcatatattgtactatgttatcttactagaaagttgaaagtaacatactttagatctctatagagaagagtaggtaaggagtgtatatactttttaaattttaggtttttattatcttttggatgcttttcctcccattttggctagtacctaatacattccgttttagaactgacattaattttccaatgaaaacaaagcatttttagtttttggacaagaaacccctcactcccttcttcaccacctatcacttactattaaagatcctgcaaatatggaaaaacatgggtaaggcagaaatgtattcctgaatacatggtcacatttttaattcaagttatgaattttaatttctaatatatatttgaaatgtaaagactaaaaagttcatttctgttgtttggaaattttatgatctggctgcagaaagttgtaaacatgtaagatctgtgaagaatccaaagccgtggttcttaatcctcagactcctttaaattgagcctacccttagtttcacagtgcactgaataggattccgtttagaaataatgtccccaaatcttttaatctaaactctattgcttttttattggcattattgttttatctgtgttgtgtttctgcaggatatggttttgtaccattagaaaaaaaaagtcactttgtttcttcatgttcctgcttctaaaatatttgacagataatgaaaaaaacacacttaggaaggttgtgctccattccatggaaatgaagcagctggtttgacacagtagatattctctatgaaagcaagaaaaaactcagatttttcagattgcatttaagtcagaaatattttattgactagggagagtgtaacgggccaaaagagctgtcttttcactcaagtcaaatatcacgcaagagtgctagcgcgcctgcatttcatcccagtgcccactttcaatttcagcagtggcccccaaccatgagctgactaaagaaagcagggggtgattaaaatccccaggtggtgagttttgattaattcccccaaatggctttatttgtaccagtaagactcgaagcagctagaatatagtccttttgtgtggaaatgtggcagctcttttcaggaagtcttgctgatggataaaaataatggagagctctgttcttaaccaataaacttgtgttagattgtgttaagaagatatttagatttacattcagttctgggacattgtgcaattttaagttgttttatgatttcttcaggagtatttccaagagaacatttaaataaactgagttcttcatgtgtagtacggtaccctaaacataattcttgtcactgtgaaaaggggtttttggttggttggttggttggttgtattttttttgaatgtacaagtcagaaaatattttaaaaatctaccgctcatgatggcaaagctgccatttctaaccatttacaacctattaaatgaacaaggcatataaatctgaaaatattttttaaaatctcaagctcatgatagcaaagctgagatttctaactatttaaaacctattaaatgaacaaggctgaagtattaaagtggtatgccttgccagttaatttaaaatgtgttcatgagtttgtgctgtttgctttctccacactctgacttttcagtctcacaaacacatatgctactggatgaataatttatgttttagtgcataaatattttatcactcaattgtttgcatagtgcatttttacatttgtttagggacatcatttctatgtaaagtggatttcataggaggttagcaatttactatgtcactgttaacattccagatgttgaatgtggaggaggtttttatatcagaagcttggtcagtgacattggaaaaggtaagcataaaaatgaattatgaattatcatttagagaataatactccttttcaattggaagagggaattttccgtttttcttatttctgagtactggccttaggaactgaactcttgctgccttcagctttaaaagcattgtaggtttctggcttgcaattatcagcctcagcagctgcagtgaaatgtttgtaatgggaaagaagagaaagagagaacagaaaacgaagacaggaataatgaacgtagggccaacatcttttcaagtacaaaagattttaactcaaactagggatcaaaaaaaaaaaaagatttaaccttctaaaagttattttcaaatttttttaaactggaagccgtagtcttataaacagccagaaggtttcggttctggctgtgccatttactggcagttgtcgcactggacaggtcatatgatctcatctgtaaagtgcggctaatctttactccatggggttggctgcatgagttaaataacaaaaatgtgtgcaagttctttgttgattttaaagcagcttataaggtggattattaagtattattttgctacttaatcatttctttatctgaggcctcttggttcttatattggattattatacttttgggtggttttgagagatttcaattgagtacggtcatttgaacaattacagactatgaaatactgaatcgtttatcttctggattttttttctaccttttgttgccatagaactatcttcctgtgccaatgtgctagagctgacccgaaccaaacagggaccatttacgctagaagaacatgcccttcctgaagacaaatggacaattgatgacattgcacagtctcttgagcattgctcatctcttttcccagcagagttggcacttaaaaaatcaaaacctgagtctaatgaacaggttttgagctgtgaatatataactctaaatgagccaaagagagaagatgatgtaattaagacgtgttgagattggcctgggaatatcatcattttctagttgacatttgaatcctgtgtgcagatgcagaatgacaagctgcattcaaaagacaaacaatatgtcttttttttttttgcatgaagaaaaatgtctatcatttacagtttcaatagcacataatttattttctatgcattataaatggccttgcagttggctcagttgtttgttgtgttgtgaaatgttttaggattttttgtattgtgaaaatatgaatatgattggattcagaaaaattaactttctgaatttgatctgtcttcagtcttgtgaaaaagttgaacaaatttcctaatcaaagaaaaaagtatgagctccatgtttctttagtttcacaaaaatgaccataatttagtgttatttttactttatttaggcttcctggtggcttcattttattgaaattctttaaattgtttaaagtggccattattgatctctttcttctgttttggagagtttattattaaaaacatttctttgataaaatggccatcatctagtaatacctgtgtttgtttagatcttggaaatgaataagctttgataatatttgtaaatgaaccaaattattactgctaccactaacaggttgtaaatagaagactaatacttaattaaagtcaccttcctaccattagagcagaagacagctcctatagttttgtattttggcagctatgagatattttcatggtaatgtcaacatggtcaagcactttgtaccaagttattaagtaacataatttttaaaatttaaagaatgtgtcttcaactaaaaactttattctttagcatttatttatatttctctgtagggtgttccctgtgacattgtctctttagtttgctctttcaagagatacttacagatgttgagatggctgccctgcatttccagctaatctcttctgctctaaatatttaaaaacagttcttctcaaacattttcattcagatagctttctgaaagttccctatccctctttaccataattttttaaatgtagccacattgtaatagtaaacttcatatataatgagtgcttcatatttttgttatgggaaagcaatatattatgcagccagtctgtagaaacattcagatccctcttcctttactcaaatacagtttcaaaaggaagactcatgagaaatttcataaaatacaagtttttagatgtttatgctttgcctttctttttaaaggtgttttcctgctttgtagtctctaactctgaaatttaaaatatgtaaactaaagtggttttatttgtgcttaacccaatttaaactcaatgtaaaatgttatatatgcatcagtacagcattttcaacatattggcaacatattttaaatgaaaacactaaaacaattcttagtatgagacaaaactgtaaggaaaaagagtgttaataccatgatgcattaacataaaatatcaaacacacaaagtcataaaatgaaaatttacagttttacctgttcatatctagtgccccacagtgtgtgtcaaccaaaggtggcagtggctacatctgcctgttggactggtacaggttacaatatgtcctcttccattgcaaattaaagtccaaatagagaaatacttaggttttagaacacatcagaggtatttctgctgtatttttcaccttaaaaattgacacagagtttactaatagaggagtagagattgttgaccatttttaaaaaacgatagccactctttttcttttatgtttaaaactgaagttttgccaaatgggaaaattactgttacctctaccatcttaatgtagtaactttagaatttaaatttttatattactattttcctttttgttgttcacatagtcttaaggcacctatacttttaaattgactttttcatttgatattatctatatgtatgtagttgtgataatgattattttaattatattactttatactcttaatttatttagagtatttctctattgctgaatacttaagtagttttaaattttattatgataaattcctgggagggggattatttagtgaaataatatgaagaactttatgacttatgtttgccttattgcattcccaaagagttgtaacattttacagtgttaccatttgagtaggggttttatatgttgttgctaatttagtaaacataggagagaaatcaaagtttttctgatttgcttttatgtgatttatctgtatactttgttcatttatataaataaatgtcttaatggtttctata

SEQ ID NO: 305 - DNA, 49907 bp, Homo sapiens
  source 1..49907: mol_type = genomic DNA; note = NC_000003.12:141876643-141926549 ATP1B3 [organism=Homo sapiens] [GeneID=483] [chromosome=3]
agtcggctcgagtactccccgtaacgaggaggtgttctcggccgtcccacccttcactgccgtctccgggctgcgccgccggagccgggacgcgcctccgcagccctcgccgcctccatccccgcggccgcagctcctctcgccgtccgcgcgcacaccatgacgaagaacgagaagaagtccctcaaccagagcctggccgagtggaagctcttcatctacaacccgaccaccggagaattcctggggcgcaccgccaagagctggggtgagcgggcagcagctgggcgtccggggccggcctcggtcccgggggcgccgggcgcggtctggtgggaacggaaaggcgggaggcggctcccagcgccggggctcccgaccgcccgaccctaacccgggcggcggcggcgcagtgcggccccattcattgctccccgggccggccggactggccgcagctcgctcccgaagcagcggggcccgcgggcagcccggccgggccgcgctggttcctccctccctgctgggagcggggcgcacgtgctgcccgggcctcccgcccggcgcggcgccggaagccggggacccctgcccgaagccgggccccgagagtgcaggagccgagcccccgggcctcctttgtacggagcgctccggcccgagaggccctggcggaggcgcccggcccgctgagcggttcggagaagccagaccctgccccactccaggggagaggaaatttccactcccgccgctatcttgtgactcgtccacgctgccaccccgaccggtcggaagagtgcgactgagtgttaagtgtgggtgtgggttgcttaaacgtgtagcggtgagttaatcacagaagtacattgtacaagaaaatgcacttgaatttggacagtgaaaaggcccttaaaaaggttggttcctcccggattcctttttaattacagaggttttcttccttacaaatttgcttctttggggaaagtaaatcctgtctgaacaacacaggttttttttttttttcccgtgtcttcaaaacaggagagtgatggttgtatgttagcagattttttctatgcgtgagctctttgttttaatatatttaaaccatctaccgtgtagagtagctttaggatgcctttttttcctaaaattgtatcaatctctgaatgcaggctagagcttttttttttttttgcctttatacttaagtaaactaattttacctttttaaatccttttgaaacattttgttagtgggtcttgaaagaccatttctttctgagtgggaataaatctcgagagcttagaactatttgggcacaacatttttaggataagcatggagaaataagctgtgactcagaaaataaactgttggtgcagactgaaatggactccttcagggtgaaaaggcgacttgaagtcttatcacaagctgaaaggggccttggaggatttttagcccaacccccactttagagatgagaaaaatgagacccagagaggttgtgatttttgccttgtgtaaaattacatatgccacaaagccaagaaaagaacccagttctcctttaatcctagtccagcggttgtattattttacagatgccttgcctaactgcatggtaatcactcatgatttttatttaaattgctgttttcttttgggaacccactagtgtgatgaagaaataaatcttgcatccagacttacatgggaacaaaagatgaacatttataaagcttaattgcttgtttctagagtgtactaactttttgctgaagaaatttttgagtggtggagagagattaattttgataggctaccttcctccctttctcccttccccagtgcttcctcatttccagaacggagtaactccactttgtgttagaatgacatttcttactgcagatagtgctcttcaacctttgtattgtatgacctagggtagagattttattttattgagtcaatgcatttaaatagataacatgcacaaataaatagagagcaatgtgtaaggactgtaaaactagtacaagtgaagttgggattcattttggaaggattaagtcaatctcttcaaaatcgataagtattactcttatcagtaaattttttgtttattgtaataatagtaagtcagtgaagaatggcatatataggtgaaaattaaccataatcctgtcccaatgtaagggtatccctctaaggatatgtgagggagtcgtgagaggaggccgaaatccatattcagcttgccaggctgtgtatcctagaccatggttgggtctgcctagagaaggggcaccttgttctaattcttgcaaaggcaggatcagtttggagagctctgtgcctctggggatatgtctgccaggaaggattctttttttaattctcttgaagggactgtatgggcttgctgccagatgtcatcatacctcagagatactattaacattctggtatatatgttactgaattgtgtataacattttttttaaaacaaaaggatcataaagtgttgttttatattctgagtatattgtgggcatctttccatgttactaaagatttttagacaggtttccctatattcacccttttcatgtacatttttgcacatttatttccttggtatatatttataccgatgggatttctaggccattcatatgtactttttacattttgaaaacttgttttcatgtgctttccaggaagtttctaacaatttatactcccaacggtatgtagtggtgtctcataccttcatcagcactgaggctatttttacctgtgttatctcttttaaaaccttacatttttggggccgggcgcggtggctcacacctgtaatcccagcactttgggaggctgaggtgggtggatcacttgagggcaggagttcaagaccagcctggccaacatggtgaaaccctgtctctactaaaaatgaaaaaaaaaaaaattagccgggtgtggtggcacctgcctgtaatcacagctacttgggaggctgaggcaggagaattgcatgaacccaggaggtggaggttgcagtgagctgagatcgcaccactgcactccagcctgggcgacaaagcaagtctccatctcaaaaaaaaaaaccttacagtttttggtaacagcttttttttttttttttttttttttaagaaaaacagccttttgtcattttgcaaattttttttctagttgtctttttgactttttttaatcaaattttatgtaggtggtgggagaaaaagattatgtatttgttgtagggggtggaaggaaaaaaaatcacatcttttttgaccttgtaaagttgctaggactcctggtgtgtctacccccaggattttatcattcatttaagatgtttcctggttttatttttacacatttaagtctttagtatgtttgtctcattttgatctaaggttcctctccaagtgcattggatacattaaaaagcacacatatttaaaaggtagttttgctatttacattttggataaagtgaaaatgttgcaagttacattgcattgccttatttaaaacagctacgtaaagattttgagtggccgctttactgtgtatttggctaatatcttacaggtggttacagcagtttcaaaatgcttatatacacataagttacttcatgtgattttcacagtaacgtaaagccaactagttgggtgatccaagtgtacttagcactggttttcaagctgaaaagtaagtataagtcagcaataaatagttgccatttatgaatacacaggacaaagaaaattgagcacctagtggctgatgtttgcaaaatattaaataacttaagttcattgaatacaattagagtcaaattaatgaagcttagagatctagtgttatttaaactactagtagtgggccaagtgttgccattaacatttttttaatgatgaaatagaatagtaaaaatatgtttattttacctaataggttcattctagctttaaaaaaagtgttgtttcatgaagcttttgtgtattttgcatatatagataccccagtgtaaactgtatttgttactttggctcatagtccaaaaactcttgaaagccactaatctagcccagtgccttcatttcataggtggcaaaattaaacctatgggtcatctgatttgccaaaattcactcagggagttagtgataaaatccttggggcttcagactccaaggccagagattttttaaaaaacaaaccaggcgggacatggtggctcatgcctgtaatcccagcactttgggagactgaggcgggcggatcacctgaagtcagagttcgagaccagcctggccaacatggcgaaatccgtctttacttaaagtacaaaaattagcccggcatggtggcgggtgcctgtaatcccaactactctggaggctgaggcaggagaattgcttgaacccgggaggtggaggttacagtgagccaagatcgcgccactgcactccagcctgagcgacaagctcaggactccacctccaaaaaaaaaaaaaagaaaagaaaaaccaactatgccatgatgtgttgtcatttaataacatctacttgtgagcttctttggggttcattatctttattaaggtggtctgtcagtaaatgctttgtattaatattaacttaaaactcaagtcagtgatttccaagcctagtcagaattctggaccaaaactgttagcacctatattttgtttgtgtgccttttcttttactatagttccatgaagtgccattttctcagtcacttctgggtcatggctcagtaattgttctgctttggagatcaggcttcatcccatctggggcatctgacagtaggggagaaggcagatgtgtttgttttccattgtctgtcacataatttttgtaagatggtgttctttgtcctgtggagtgtgccattaacccatttatgctggaggttgcaatttttaaaatttttgcaatgagaccttggcaaggacattgagcagtaggatataactcccacatgcttagcgttccagtaatggaacacaggcataaatggaagctttacaaactttacaaaaatgtgcatcactgggaaagtaacaggacttgccttaccctgtgtgcaggctataaacgcaggccaatggtacatgtggtgacagcagcagaagagaagggcaggtactgagccattatctagcaggagaaagtacttcctggattgtccaggaagtagtcctgtggtgggagggagagaaagggtaagtgtatgtgttgtgttacaataccattgtaattatggtagtacgagtgctttaagattattaaagagcctctccccacccctgatgtaattcgatttctttgaaattgacttttggatttatatctatacaattaaactagttgtattaaaagaagtcttaaaagccctcctgtctatagtaacaacttttccatgattttatcatcatttgattaaggaccagtcatttaacactgattgtgaaataggaggaaacacccatttaaccttgaaagataaatttaattattttctaattttgcattcattctgttggttttgaagaaaagtcacctgtaatctttaaccacttaatataaccactattaacattttatgtctttttcctatgtataaataagtttttaaaacatacctaaatacctgatcttatcatttaacatttaaggagaatggtctttattcctctgcctttttcctaaatgttgatgtgctggaggtgtccttgggtctgtcacctttatggtgaccatacatacttcctgttgaatttatctagtctggtggcttagttactatctctgttgggactcccaaagctgcatatctaatcatacaattttgttttgttttgttttttgagatagagtttcgctcttgttgcccaggctggagtgcaatggtgcgatatcggctcaccgcaacctctgcctcccggattcaagcgattctcctgcctcagcctcccaagtagctgggattacaggcatgcgctaccatgcctagctaatttttgtatttttagctgagatagggtttttttccatgttggtcaggctgatctcaaactcctgacctcaggtgatccacatgccttggcctcccaaagtactgggattacaggcgtgagccaccgcgcccggcctcatgagtttttaatgttcttataaccacctgcctatcagaaatctccagttggatgtttcataggttatctgttcatataaatctgtgttgttctcaagggctccttagcacgacatacaaactctttaaaatctcagtggcttacttctctcctgtcatctctctctaccattccacatagttatttcctactccttctgggctgtttcctagcttctgggcctctcatccccttattccatgttggtctggctgatcagatgtcagctttgatagtctgatacccagaaaacatctttgaactcctctttgcattaaggccaggtgcagtggctcttgcctgtaatcccagcactttgggaagccgaagtgggcggatcacttgtggccaggagttagaaatcagcctgggcaacatggtgaaaccctgtcactactaaaaatacaaaaaattagccaggtgtggtggcgtagtgaatttttgcaatcagactttgataatgacctgtagttgcaactattcgggaggctgaggtgggaggatcacctgagtccaggaggtcgaggctacaatgagctgtaattgtgccactgcattccagcctaggtgatagagttagcctatctaaaaaaaagttaagactcaacaaaataaaataaaacctttttctatcatagcatttataactttatatattgttgtcattgcctatttactagactataatcttattcttgtcttattcctctttgattctctaacccctggcctgtcctagcacttgctaggaatgtaatacaaactggttgaatgagcagtactatgaatgtttccatgaagttagtcttctgcagtattgtttttaatggcttcacagtgtttgacggtattggtgtacccatagtataattgtcccctcaattttggggcattttcctttttcttttgttagagtactgatgggttttcatggaagttcagtgttcaaaagaagcttagtgattattccacttaactttcttattggagactcagctgggtttgtgacatgcctggatcacgcatctgataatagtgacagaaccagggcaaaattttatttaggtttgcttcctgctttattgctcttttcagcttcttatactgcttttatgagaccctcataaagtctttttttcttttacctgctctcaaatttaatgggagtttatttaatagtgcccttcttcccttatggggtgctattactaataatatttcggaaaattttttttaacataataacctcccacatacctgtttaaactttgttactgagtcatttgtggagctagctcttatttgtgacttcttaggattttgctggtgctgtgggtaagatatgactttggaagtgaccttcctgcaaggcatggggtacttttcttttggtttttgcatgttggcagtatctggctcataaaaagtggccttttacatactcatactcctgctcccactccctagctctctaaccattcctttcctagttccttcttgtttgctcttcctgtcttctaagtgtttgtgatggttaatattattgagtgtcaacttgattgggttgaaggatagaaagtattgatcctgggtgtgtctgtgagggtgttgccaaaggagattaacatttaagtcagtgggctgggaaaggcagacccactcttaattgggtgggcactgtctaatcagctgccagcaaatataaagctggcagaaaaacgtgaaaaggagagactggccctagcctcctagcctacatctttctcccgtgctggatgcttcctaccctcaaacattagactccatgttctttggttttgggactcagactggctctccttgttcctcaaggagatatatacatattattagttctgtccctctaggccctgactaatgcaatgtatgtatctcaggtgctgtctttggccttgttttctcttcttctttcctggcaatgtcatataacaactgcaaagatcattacagattttacttcttggttgacatctctctcaggttccaggcccctgtttattgtcagttgctttctgcatatcccacaaatctaagagtgtgaggcttagatgtcttaactaactttcataccagataacgtcatctggtaaatagctcgtttcccttccttccctgaggttctgtattgctcctatttttgcagttttaaaaaacagcttcactatcctgtcgtctaggctccagacttagccaaattgtgccggtgctattcaataacatcgcttgaacctcttgaatctttgtggcccatatccccattactagtactacaattattttaggaattaattttctttgacttgtttaccattttctctttatccccatcaagacacacgttcagaggacatctgagatgctcatttttcctagcttcataatcctagccacccgtaccaaatttcattaacactcccaccaaccttgtcctcattttatcaggatctggtagtgccttttcttttttcttttcttttctttttttctttttttgtttttcagatggagtttcgctcttgttgccaaggctggagtgcaatggcacaatcttggctcactgcaacctccgcctcccaggtttaagtgattctcctgtcttagcctcccgagtagctggaattacaggcacatgtcaccatgcctggcaatttttgtatttttagtagagatgggatttcatcatattggtcaggctgatctcgaactcttgacctcaggtgatctgtctgcctcagcctcccaaagtgctgggattacagatgtgagccactgtgcctgaccagcgcatgccttttcttataaactctgtgatttaaaaacttgaagcaccagatgaagatctttgtaattgtttcacagttgttccagcttcaaatagacgattggctttccagcttttatctgctgcgttaaaacacacacacacacacacacacacacacacacacacacacacacccctgtagtgttgttgaccctggggaaagtgggtcttaactactggtgcatctccagtaagatccaaagaatcagtgagaatcattgtgacttaagcaatgtagcccactgctgtcgggttatttctaaggcagcagctttgatcatattaccttctgtaccccaaaactgtgtttgggtccctactgcttccagaaagtttaggtaagttccagagagtctggcattccaggtttattgtatgtgggcgtggagctgtttccaaccctaagtaacccatcgtttcccaccttgcccacaccccattatgcaccctatgttgtagctacacggatgtatctaagacccttagtctggaacccctgtctgttccttccccaatctcttcgttctgtgcacacgaattcttccttatttcacagacctagcttcagtgctggctctgccataagccttctctgatatgctcaggtggaaataataccacttatttcctataacatctaaaatgttgtatctgtatataaaggtgtaattctatcacccagctcacaatggctctgctctactacatttctaattaatttttaaagtttccagatagggcatcataataaaaagtgaactggtaggtttatatatttttacttgatgcatctcagaatacaccagtatactgagaagatgaccagataggactcatagacctaaattctagttccacatctctgttaaagcttagataactcaagatctcttagccttgtttcctctataaaagaaaaaagttcagccagatgtgatggctcatgccttttagcccagcactttgggaggccaagatgggaggactactttaggccaggaattcaataccagcctcgatgacataaggagaccccatctctacaaaaaataattttaaaaaattagctggctgtgttagcacacatctttggttccagctactcaggaggttgaggctggacaatcacttgagcctgggaggtcaaggctgcagtgagccatgattgtgccactgcactccagcctggttgaccgagtgagaccatacctcaaaaaaaagaaaaaagacattgtatgagatagtttcaaatgtaactttgaaattacaaacaaagcctacctatataaatgctttagaatgggaggcagcaagattcaaaggaccacgttattgttggctttgctgaccacacggtgtttgttgcaactacctaactccattactgtagcttgaaattggccatagaactaacgggcatggctagcattttatttacaaaaatagcagcagccgtggtttgctttagaagttagagttggtgagtggtcagtgtagtctgactcaagaaatctgaactggtcttaaatgggatgtggactcttggctttgttcttttcttataacaaaagtaacaccattatttttacagtacagatgtgaatatcagtaagtccaacatcatcctcagcttcttccctgggtaacccccgttaagtgtgtaaatgctttttaaaaggtaatatgtggcatatccataaaggtccggcagtgtcttataaaggtaaatatatacccaccccctgagccagcagttctactcttaggtgtgtttatccaagagaaatgaaaacatacgttcacaaaatgctcttgtacaaaaatattcatagtagccctattcataatagttccaaactgggaacagttcaggtttttatcagctaggcgatagataaacttgcatgtctacacaatggaatactactcaatggtaaaaaggaatgaactacagatgtacaaaatgtgatgaatctcacaggttgactgcgaacgaaagccttaccaaagagagtacatactatatggttttatttatgtgaaattctaaaataagcaattcttacctatgctggaaaaaaaaacccagaacggtggttgcctttagggcagtggacagggagaatgactaggaagggacgtgacggaactttcagggtgatgataagtgttctgtatcttgaatagggctttggatcataagtgaatgcatttgtcaaaactcattaagtggtatattggagatttgtgtatttcactgaatatgcattttttctcaattttagttaatacgcatgctgaattgttctctgatgtttgcaacttgaatctttaaaatgagataaatacagtaaaatgttaattgtagaatcttgatgggtttatgggtgttcacttttaggtttcactcaacttttctgtgcatgggtaaacattcctaattgagtgttggagaatatgaatacattcgtgtgtttctctctacctccttcaccagtctcagagtgtttcctacagatgactatcaggtttcctgtcagtccttttttcagcaccatttttatatatgtatataaacatgtttctgtatatatgtggagtatatagaaataagtaggttcttgtctacctttacctgagtaataggaaactcatatgttctggaacttgattttttttcacttaatatgttttggctgtatatataggtttgtgtcattccttttcatagcataatgtattcgtctattttcacactgctataaagaactacctgagactgggtaatttataaagaaaagaggtttaattgactcacatgatatggcttggctgtgtccccacccaaatctcatcatgaattgtagctcccataatccccacatgccatgggaggaactgagtgggtggtaattgaatcatgggggcaggtctttcttgtgctcttcttgagatagtgagtaagtctcatgagatctggtgggttttataaatgggagttcccctgcgcacgctgtcttgcttgccgccatgtaagatgtgactttgcttctcattcaccttctgccatgattgtgaggcctccccagccatgtggaactgagtcaattaaacctctttcctttataaattatccagtctctgataagtctttattagcagcatgagaagagactaatacactcacagttccacatggctggggaggcttcaggaaacttacaatcatggcagaaggcaaagggaaagcaaggcacttcttattcttacatggtggcaggagagagagagagccaagggggaagtgccacacaccttcaaacaaccagactcatgagaactcattatcacaagaacagcaagggagaagtctgccccccatgattcagtcacctcccaccaggcccctcccccagcatgtggggattacaatttgagatgagatttgggtggagcacagtgacaaatcatatcacataatattccatagtgtggagattatactatagaatatatatatttctttctgatgaatgtttaaattgtttccaatttttatcttaaaaattgctgcagtgcaactttttatctaggataaactgagaaatggaattgccagtttataatatgtatttatttttatgaatatattgttctgagtgggcacaatagctcatgcctgtgatcccagcactttgggaggccgaggcaggcggatcacctgaggtcaggagttcaagaccgcctggccaacatggtgaaaccccatctctactaaaaatacaaaattagctgggcgtggtggcaggtgcctgtaatcccagctacttgggaggctgaggcaagagaatcacttgaacgcaggaggcagaggttgcagtgagccaagactgcaccactgcacaccagcctgggcaaaaagagcgagactccgtctcaaaaaaaaaaaaaaaaaaaaaaatatatacacacacacacacacacacacacacacacacacacacacgtatatctacatatatgtgtgtatatacatatacatatatatatatatacagttctccaaaaaagctgtaccagtttatactcccaccagcagtggataaaagtaccttttctcctcaagcactggatattataacaatattgtacaatcatacaaaaatattgtgcagttttttccattttgataggatgctggtatctatctggttggtttaatttgtaatttcttcaatatttttatatttgctcaattttaatttttaaaaaatgcctgtaatctaattttttttcttttttttttttttttttttttgagacagagtgtggctcggtcaccctggctggagtgcagtggcatggtctcggctcactctgcctcctaggctcaagcgatcctcctgcctcgcctcctgagtagctgggactacctgtgtatgccaccacacctggctaattttttgatttttgtttgtttgtttttttgtggggctttttttttttttttttttttttttttttttttttgagatggagtcttgctgtgtcacccaggatggactgcagtgacatgattttggctcactgcaacctccacctcctgggttcaggtgattctcctgcctcagcctcccaagtagctgggattacaggtgcccgccactacgcccggctgatttttgtatttttagtagagatggggtttcaccatgttggccaggctggtctcgaactcttgacctcaagtgatctgcccgcctcagcctcccacagtgctaggattacaggcgtgagccaccacgcccacctaatttttgtatttttagtagagactgggttttgccatgttgcccaggctggtctcgaactcttgacctcaagtgatctgcccacctctgcctcccacagtgctgggattacagacgtgagccaccacgcccacctaatttttgtatttttagtagagactgggttttgccatgttgcccaggctggtctcaaactcctgagctgaagcgatctgcctgcctcagcctcccacagtgctgggatcacaggggtgagtcacggcccccagtctgtgttatgttcttactggttaaaggaaattttgatacactttgaatattaagcctttgttatacttgtaaatattctttatggactcatctttttgttctcttgtctcttaactcttactttggtttatttttttaattgtaatggttttaaatgaacattatcacagatttaacagtcttctatgttcttttcttaatcacttatccctatatgttgtataatccatcatttccccaatgatatgaattggcaactttgttaaatgaaaaattccattttatatggattctttttaggatattgttttgttgatctgtatcttgattcctgtgtatcatcacactatatagtaggctctgtattcgtgattgtaaagtaaaatacatgtgtaaatttgtgtcaatactacctgttcagttttagtatccaaatagtgcaagccttataaaaaccattaaggtaacttacagagcatacacaaagaatagtttatgtatagaaaatagtctgttctttccattttgagagaaccaactaaagccatttagacttggtgtcttttactggggtaaacctcttttttgtaaaaattcatggtttgaacattttaattttcctaaaaaattttatatttcatctgttttcacatttactaattgaaaacacttttgatcaagttgatttattatttaaatgtattgaatggttttggtgtggtttttcattacattttgtgtccattaacttgtgttttcatcttaaatctctcctactttctttgtatttattttagtcttgagctaaaaatctggcttttttgttagtcgtatattttaatgatgttttaatgaatgcatctagggctatgggttttactttgagttctgctctgattacattattttgaatttttggatatctgtgtttttttaattcagggattgagatacaactttctaaatttgtattgttaatttctaatgtatttattttgagatgttagagaatgtggcctcttttttttttttaatgttttttagttttgaattgtgttttgtttttgtaatgtaagtcatggtcagtttggggacagtgctccaagtttgtagagagtacatttcttggtgactacaaagttctacgtatactaggtaactgttgtgttttaaaaatacatattgccctttttattgtcctttactcaatctgtgggtttctggagaggtatgttaacatctctggtcatgattgtggtgaattttataactctgcttttgctttaatcatttgaagccacttagcatcacagaggttcatggctattatgctgtatcttctttatgtgtttttatttacttttattaaatacacagtatcttcacccttgcaaatgcttttttacttgaattctagtttgcatacagtaataatgccatatctacatttcttttgttagccaagacctattttattttcctgtttatttcaaccattggtgtttaattttagattgtcttctataacagcattaagtggattttttaactgactctgataatgtcctttattattaccacttttaaattattcctgccatattattgacattttaattacaaattgttattgaatataggctgggcgcagtgacacacgcctgtaatcccagctactcaggagactgaggcacaaatattgcttgaactgggaggcagaggctgcagcaagtggagatcgagccactgcatgcagcctgggtgacagtgagactgtctcaaaaaaaaaaaaaaaaaaaaaaaaacagttatcgaatatagacaaatttaaaactttagccttatgtaaaatacaaacacagtgacaaaatcattggctgcctggggaagggtgtgtagattgcaaaggggtacaaggaacgttttggacatgatggtaatgttctatatctttaatggagcggtagcttcacagattatacaacggtcaaaactaactggaattgtatacctgaaatggaggaaacttactatatgcaacttattcctcagaattgataaggaaaagcaattaaaacatcttagatgttaccagtaagtcttagcagatctctgctcaccattgccttatgtagttttcctcttggccttagttttttctttttctcacccaggctggagtgcagtggtgccgttggttcactgcagcctccacaagcttccacctctcaggttaaagcaattctcctgcctcagcctctcgagtagctgggattacaggcacgcaccaccacacctgactaatttttttatttttagtagagacggggtttcaccatgttggccaagctggtctcgaactcctgatctcaagctatccacccgccttggcctcctaaagtgctaagattacagacgtgagccaccacacccagctctctttattcttgatgttctaaaattttacctttttatttctaggtataggatgttttccagtattttttaacatttccaatctagacacaagcttgttatttctttgagagttcttgccccaccctcttttcctgtggagttcctattagatttgtttgtatttctggttctctccccaatgtctcaacaatttttcatatactccttctctgttagcccactgtcatagaatacctgacttgatctttagctcactgaatttttcttcagcttgaccagttctcctgaggttaagtttttgtttgtctttaacagctttattgaggtataattaacatacaataaactgcacatatttgaagttttggtatacactcatgtatatgtgtgtgcatatgctgtattcatgaaactgtcactgtaatcaagataatgaacatttatcaccccaaacattccctcttggcactttgtaacccatctctgttcttaccttcccaggctccaagcaaaaatctgctttttgacagtctgtattaaatacagccatgccttctgagaaatgtgcttagctgtgttcattgatttcattgttgtgcagacattataaagtggacttacacaaatctagatggcatagccctctagacatataggccatatggtatagactgttgctcctagctgcaaacttgtacaacatgttactggatgaatactgttagcaattgtaacacaatggtaagtatttgtctgtaaacatatctcaacatagaaaaggtacagtaaaaataccatgtaaacataaaaaatggtatacctgtatagggcactgaccttgaatggagcttgcaggactacagttgcagtgagtgagtggtgagtgaatgtgaaggcctagaacattactgtaccctactgtagactttataaacactgtacacttaggctacactaaatttattaaaattttttttacttcagtaataaccttagcttactgtaactttttacaatttttttttttaattgagatggggtcttgctatgttgcccaggctggtctcgaactcctggcttcaagcaatcttcccatctcagcctcccaaagctatgggattgcaggtgtgagccttcatacccagcgactttatatacttttaataacacttagcttttaaagcacaaacacattgtacagctgcataaaaatattttctttatatccttattctataacattttttctatttaaaagttttaactttttaaacttttttgttaaaaactaagacacaaacatgcacattagcctagacctacacagagtcagaatcatcagtatcaccgtcttccaccttcatctcttgccccactggaaggtcttcaggggcagcaacacgcatggggctgtcctctgtgatgacaatgccttcttctggatacctcctgaaggattgcctgaggctttttacagttaactttgtaagtagaaggagtacactataaaataacaacaaaaagtatagcatagtaaatatataaacccatagcagtttattatcattattaagtattatgcattgtacacagttgttgcatactagacttttatgtgactggtaggtttgtttataccagcattgctacagacacgtgagtaatgcattgtgttgcgacatcactaggccataggaatttttcagctttattatgatcttaatgggactattgttgtgtatgcagtctgtcactgactgaaatgttacgtggtgtatgtctgtatgtggaatcatgctttatgttttttttggggggagggtctcataggagatgacagctcctgtgcatgttattgtctcttttttctttcttttcttttttttttttttttttaagatggactcttaccctgttgcccgggctggagtgcagtggcgtgatctcagctcgctgcaacctctgcctcccgtgttcaagcaattctcctgcctcagcctcccgagtagctaggattacaggtgcccgctaccatgcctggctaattttttgtatttttagtagagactgggtttcaccacgttggccaggctggtctctaactcctgacctcaggtgatgcacctgcctcagcctctcaaagtactgggattacaagcgtgagccactgcgtcccgcctcttttttctttagcataattattttgagatccatctgtgtttccatgtgtatccacagttcttattgctgaatagtattgcattgtatggatatagccaaatttattaattcaactgttggtggatatttgggttgtttgcagttttcagtgattataaataaagtgtctgaacattcacatttccctactgtgtgaacatgggcttttatttttcttgggtaaatatctagaagtagattggctggatcttttggtaggtgtgcatgttgctaacttttcaaaaaattgtcaaacttttctttttctttttaaaaacaacaacagcaacaaaaaacattcccaccagcaggatgtgagagtttcagttgctccacttctgggtcattacatggtacggtcagtctttaaaatttctagcattctggtgggtatgtagtggagctcattatagttttgatttctcttccctggtgactaatgatttggaacacactttttatgggcttatttttgcaatccttacatcttggtgaagtttcggttcagatcttttgcctgcttcaaaaaatgtgtcttggactgggtgcggtggctcacacttctaaccccagcactttgggaggccagggtgggaggatcacttgagtccaggagtttgagagcagcctggacaacagagcaaaatccccttctcggctggggatgatggttcacgcctgtaattctagtactttgggaggccgaggcaggaggatcacttgaagtcaggaattcaagaacagcctggccaatatggtgaaaccccatctctagtaaaattacaaaaaaaaaaaattttcttaagaagacccccttctgtacaaaaaaaattttttttaattagctgggcacggtggtatgtgcctgtagtcctagctactggggaggctggggcaggaggattgcttgagcccaggagtttgaggctgcagggagctatgattgattgtgccactgcactccagcttgggcagcagaacgagaccctgtctctaaaataaaataagtaatatgttttgttgtaaaagttcttcatatattctagataggagtgagtcatttattttatgttttgcaaatattttttcccagtctttggtttgctttttcattttcataactgtctgggttcttcttcagttttgattcttcttcagttaagcttttctactaagttttttatttcaataatcagaatatgatatctaatttttaaaaattatccttcaccttctactgttttaattatgcttatttttctttgttctatttgctgatacagcccagtgttttcaggcattgctgtctttgttgagtttggtacttttctttatggattagttttattttgaatgtgtgataattattggttttgtgctcctcttctgtgtgtttagactttcctattacaacattcagggatggaggtagcctgtatagccaagagcagcctgggtgtggaggctgtctgctcctgtaacctttcaccaacccattcagaacatggcccacttttccagcccaagctccctgttcccacttcaagcagatgctgctgctactgttgctagttgcttggcaccaggggctcatgcatactgagagaagcaaagctgtgctcacctgactgctcctgctgtggtactccatctcatcacctagtctttgacccagagctccctcctcctctccatctttggtgagccaactaccttatttctgggtggccttctctgatgtcccttttcttcctcttcctgctagagaggattctttttgttttttttcctagcatccagtatctataattcattgtttacatatttgtcatttgtaataactgaactcttgtagagaagcagcagatattattcacatgtgaatttctatcaccctgagtaacacagaatacttgaatgagacatttttatttagagaatgggagttttaatagaaaagacaatagagcttgagactccctgggagagcaggccagacatggagagatactggtctatttcttttactggtaggttaatcttaggcaggttatttaatcttgtttaatcttttatattacaataattttaattatataaaatgtgagagtgtgtgtatacatacatatatgtgcatacattttattaaaacagtacatgttcatcgggtttttgtttttgttttttgttttattttgagacagagtctcactctgacacccaggctggagtgcaatggcacaatcttggctcactgcaacctctgcctcctaggctgaagcgattctcccacctcagcctcctaagtagctaggattacaggtacatgctaccatgcccagctaatttttgtaattttagtagagactggttttcaccatgttggccaggctggtctcgaactcctgacctcaggtgatctgcctgcctcggcctctcaaagtgctgggattataggcatgagccactgtgcctggccaacaaatagttttttaaacagtagtgggacaactggatctttccatgcagaacaatgtaggtggacccctacctcaaaccatatacaaaaattaactcaaaatggatcaaagacccaaacttaagagctaatttataaaattcttagaagtaaacatagatgcaagtctttatgaccttggattagtcagtgttattttagatatgccaccaaaagcacaagcaaccaaagaaaaaatagataagtggttcttcatcaaaattaataacttttttgcttaaataacattattaggaaagtaaaaggataacttgtggaatgggagaaaataattgcacattatatatttggtaaggggcttgtatctatatataaataacttctagaacttaataaaaaaggcagataaccaaatctaaaaatgagaaaatgatctgaatagacagttctctgtagaaaatatacagataaccaatgagtttatgaaaaaatgcccagcatcattagccattagggaaaatgcaaattaaacccacaaagagatactacattgtatccactaggatagctgtatgaaaacacagtaaaagaagtgttaatgaggttgaggaggaattggatccctgctgtaggagtgtaaaatggtgaaactgctttggaagacagtctaccagttactcaaaaggctagagttaccatatgacctagcagtttgactcccaggtatatacccaagagaaatgaaaccatttatttatacaaaaacttgtgcatgaatgtttataacattattcataatggccaaaagatataaacaactcacatgcacatcatctgattaatgaatcaataaaatattgtatatccatatacagtgggatattattcagccataaaaaggaatggagtactgatatatgctgtagcataaatgaaccttgaaaacaccttacatggaagaagccagtgacaaaagccatgtattacatgattccatttctaggaaatgtctagaaaatagatctatagagacaaagtagactagtgattgccaggaactgggtgcagggagggagaggaatgggaatgggtatggagttttgggaggaggtgttgaaaatattttaaaatttattgtggtgatgcttatacaactctgaatataaaatgtaaacttcacactttacatatgtgaatggtatgcgaataatattgttaaaaatcagtattgtttttaaaaattcaaatatacaaaagattataaacttgcacctgttcatataatggattttttagaaattatacatgtctctgctttaaaatgttttaaactataaacagaatgctagtttatttaccaaatggaaatggttgctagtcatcagtattttctgagaggcccaatctttctagcatctaggtccctgaagatagctagaaagtgtgcagaggttgagagtaagatcacagggtctagtcatgtgttgagggggcatatttccaggccctcatgaagcccagtgacttttccctgtgtccagattatgtgtgctggtgttgcataataaagaatttgttggctggatgcagtggctcacgcctgtaatcccagcactttggaaggctgaggcaggcagatcacctgaggtcaggagttcgagaccagcctgatgaacatggagaaaccccgtctctactaaaaatacaaaattagccaggtgtggtgacacatgcctgtaatcccagctactcaggaggctgaggcaggagaatcacttgaacccaggaggcagaggttgtggtgagctgagatcacaccattgcactccagcctaggcaacaagagagaaactccatctccaaaaaaaagtgtcagttgagtgtggtggcacacaactgtagtcccaacttctcaggaagctgagacaggagaatcacttgagccgaggattttgaggatgcagtgagctttgattgcaccgctgtactccagcctgggtgacagagaaagaccctgtctcaaaaaaaaaattttttttttgtttgatgttttttccaggttcctggcacagagcttctaaagaccctggaatttgagtagtaggagtgtctttattatgctaatgaagtgactggcagtgggtccctagatagcttcaagatggagcatggtcccccagaaagaccaaaccaagtccctacatggttgggactttgagctagccagacctccaaggagggcaggaaagagggctggagactgagctatattgtgtggcctgtggtttagtcaatcatacctacataatgaaaccccagtaaaaactctggacactgaagttcagtggagctgccaggttaggaaacacatgtgctgggagggagatagccctgattcctcaaggagaggacacagaaactgccttgcctcccagaccccattctacatgtatcctttataataaaactgaaatcctaatttgagcacttactttcctgagctctgtgagtcattctagtgaacaaacttgagggtgcagtggaaacctcctgtattagttactagttggtcagaagtgtgggtagtgggaggacctctgcagcagcatttctatggaggactgagcccgtagcatggggtagttggtgccagaattgaattgtacgcccagtgtggttgaggcagaagagctggacagggcccgtttctccttcccctggatgacatggtggttcctaagtcttgccaggtttcttgcctgtctggttgttttcttgtttttgtttttttgagaaggggtctctctctgtcacccaggtcggagtgcagtggcacagtctcggctcactgcagcctctgcctcctgggttcaagcaattctcccatctcagcctctcaagtagctggaattacaggagtgcaccaccacgcctggctattttttgcatttttagtagagacagggtttcatcatattggccaggctagtctcgaactcctgacctcaggtgatctgcccgccttggcctcccaaagtgctgggattacaggcgtgagccactgcacctggcccatgttagtttctttagttgggtaataaggaaatttcttgaaagattttaaactagctagggaacgttagtaatatgataggtactatttaggctgtatttgctgttttctgcttacatcaagtagcactgaggcgggcatggcacattgaataggttccatgaacactatccatgactaagtcaggacgccgccatttagagccccatcagcaaactacatctgagtaactaatttaactgccattttacacctgggtaagagcagcaatttacaacttctgtttttattttctgttgttttttcttttagggggaagaggtggttgataaagtatatttatatgtgagactgactagtttaagtttttaaaaattagatttggttcttggcagaaggatcttgttcaagtaaggaaaactcacttcactgctggaaataacttatttacttgtttctaatggccactagtatatggcatcagatttgggacatagctgttgatttgtgtatatattgtatgaatgtaattctttatactcattattttcattgtgtaatagttccttagaaagcagatttggatatagtttgttcatatctgctatatatttatttgctttataactattttgtaaatttaatttacattattttcctagaaatttaaaatcaaaatgttcaaaacagtattgtaacaagaatattttaagatgacttaaaaacactgctaaataattaaactcttagcaattttgtttcagacatctccactttaatgtcaactgcatgggtcaacaaactactgtggccccagtctgcctatttttataagcaaaaccttattggaatacagccacactcattacatttaagtttctgtcagccctggtgtagaggattttatcccttcgttcctgcagacacctagatctcaaagaatttctcttctgtatcttattaaactggcctgtgggctttctgtgtgtttcatttccctctatagcaaactgtttacttctttgagattggtcttttctttttctgcaacaggatcgcagtatgtggtagggaagtgatgctgtctgaaggtgacatcctgttctcctctcttctgtcctctccatccttattttggccacctggtaattgggggggaggggtagaatgctagtctaaattataaaatgaaattgctttaactatttcccctttacttgaaaaagggggttgggggtgattcctgccttgcagttgagaaataaaagttatctagctttcagcacaatctgttttggggtcatgggatcttttgagaatcagaagaaagttgtggagccactccctggggggaaaatatattcagaaatatattattacagaaatgaatctttgatcagtttttaaaccttgaaatacaagtgactttaccaatgtattctaatatacttgttggcagccacttctgatgttagaactttgaatatagacatttgagaaaaataattgattttaagtgttcccaaagtaaatcactggttcaggatagatctatcttagtgttcccaaattgtgaaaggaaagagattaagcccttaatgttgaaacgtgtgtctcccaaatcttgctttgtgcttagcagtagagctatgaaattccattgatcagagggcttgtttctgaccttgtccttttttcacttttgcacgagccctgccatttgaccagtgtgtcctaaactttattcattgagtgctgtcttcataagttggccttatctgcacatttcctgatattctttcaatgaactcagtttttaaaatatatatttttttaattttttaaatatggaacgactcacaaatttgcatgtcatccttgcacaagggccatgctaatcttctctgtatcgttccactgttagtatatgtgctgccaaagtgagcacctaatttttttgtaaagacaaagtgtttcctgggctagtcccaactcctgggctcaggcgatcctcccatctcagcctctcaaagtgctggcattacaggtgggagccattaactcactttttaaaacttaaatttaagcaaataattactgtctgtgaaatatgcgtttcatgtactaattcttttatattcgccacttaaaggatcatgtaaatattgggggttttgtttacctaaaaccatcttgtatctttttagagggcatcaagttcattttgggaaacattcccctatgtactggaattttaaagctttgattttgaaccagagtatgaatggtggaagctgctttaacttggaaataccagggaaaaggaggggtcatgggatgggtgggtgctgtctgctgaaataccccttgcttgggcaaatttatgtgtcctgaatatgaggatatttggctatgtgcatggcaaagcttgggatcgtacccttgcaagaacagttggtttgttttttaacctggccaaacatgcatacacacacacacgcacgtgcacatttcataagttttattttcttttacaggtttgatcttgctcttctacctagttttttatgggttcctggctgcactcttctcattcacgatgtgggttatgcttcagactctcaacgatgaggttccaaaataccgtgaccagattcctagcccaggtaattatcttgcagttatgactttgttttttgttttttgttttttttttgagacagagtttcactcttgttgcccaggctggaatgcagtggcatgatcttgggtcactgcaacctctgcctcccaggttcaagcgattctcctgcctcctcagcctgctaagtagctgggattacaggcatgcgccaccacgcccggctaattttgtatttttagtagagacagggtttttccatgttggtcaggctggtctcgaactcccgacctcaggtgatctgccccgccttggcctcccaaagtgctgggattacaggcgtgagccactgtgcctggcagtggttacggcttttaacaaaattgagttatagtttatcttcaccataaatctgttttatatagcagatagaagatagctaaaccttggagctgagtaatgtgaaggttttaatttttgttgttgttgtttaatatttacatactgatttaaagaccttcacatttatatactgataaatcttgagagtttgagtgggtttgttttgtttgtttcggtttctttttttttttgtcagaagtaagcaaatgaatattgagaattctagtaaaagccacgtttgaagaatatagttatagttatgagtgacttatgagtatcgtagagcagttttactttgccttgagtaattaaggtatatattttggcactagcttcagttagagctttggacttataaaatacatactttgtcgttctaaatggttagttatgaaattggtaagttgttaaataatgatacctcatagagaacaaaatgaatatactcttcatatgtttaattcttcttgattttcttctggaaaaaaaattcattatacaggagaatgtatgcagtaaaaaactgaaacatctaaaccacattttctacctcctgattttattctttttaaacagtctttttttttttttttttttttttgagacagggctttgctcctgttgcctaggctggagtgcaatggtgtgatctcggctcactgcaacctctgcctcccgggttcaagcgattctcctgcctcagcctcccaaggagctgggattacaagcatgtgtcaccacgcccagctaattttttgtatttttagtagagacggggtttcaccacgttggccaggctggtctcgaactcctgacctcaggcgatccacccgcctcggcctcccaaagtgctgggattacaggggtgagccaccacacctggcctaaacagtctttgaatgccagctctcccttggtgactggacatgacccttgtcctcagatgctgataattagaaaagtaagaaacagtaatgtgcagaacttcagtgtgtataattccaaagactgtaaactaactgctatagatgacagagaagggaaggttctacctaaagaagaaagttcagtcctagaggagtgggatttagagggcaggagagtggggaatcgggccaggaaggtgggagtctagcaggtttctctctagagcagtggttttcaaccactgagtcatatggcagcgtctggaaatatttttggttgttacagctagagaggtggtactgtgaatagaggccagggatgttgctaaacatcctacagtgcatagggcaacccccacaacaaagaattattcagcccaaaatgccaataatgctgagatggaagtgcccttatctagatccttgctcactgtatagacttctgagctatatcaccagccaaactgaactaattgtctcaaccattttttttcctagaacaatttttttctaatgatttcttttgtttacagctaatcttagtctaaatgtcttgaataactcttttaaaactcttagtgtattggagcaagtgtcagagattagttccatgctacttttccttcatctctcattgtagcactgtttttttctacctcagactaattctaagattattctttacttgctatttaagtgatgtgacttaccattgaacatagtctgatctattcaaaaacactgaactctgtttataattgcatgaaatatataagcatatgtgttaaatatttttaagtacacagtttttaaactgagtttcttaaaattatttgtcgattattttagtacttaaagtatcattagtttaaataaatatacatgcatacacatgtacatataatacatatatattacatatgggacatattaaacatttccttatttaatatatcacatgtacatgtaatacatatataatatgtatttatgtgttgtatattatatacatataatatgtattatatgtacatgtgtgatatattaaatatgggaatgtttgaaggctagagaaaattttaggattgttttaaagcctatgtgcaaggttgaattaatctagatctaatgcttttttttttttttgagacgaagtctcgctctgtcgcccaggctggagtgcaatggcacgatctcggctcactgcaacctctgtctcccaggttcaagcagttctcctgcctcagtctcccaagtaactgggactacaggcatgcaccaccacacccacctaatttttgtatttttagaagaaatggggtttcactatattggccaggctggtctcgacctcctgacctcaagtgatccgccagcctcggcctcccaaagtgccaggattacaggtgtgaaccactgcacgcagctgatctaatgctttttaaacaaggaaaacttacattaaagttggaagcctgattgcttgccttatcttcattagtaagcttaagcaacatggtctgtattacatgggtgtcaacttctgataggaaattgttggtggttatactccaaattcagtatgtgaaaaccacattttaattacagagcaatatctgctattgaaggaagaatatttgccataaagtttaaaatgcatagacctttttcattgaaaaggagttagctgtcttatgaatgtttccatacaatttaaatgacaaaagtacgtaggctttgatttgctcaaatttttttccttgtattaatggcacattgacaaaacctaaaaatgttatttgattttttaaaaatgcatatagaaagttcaaagtaaaattgcatcttttaaaaaggaagattataattaactgtagataaccaaatttagggacagtttctaatcggtaatgtctgagatggttttgaaggtttgagttatttttaattttagatgtctatgccttcataattagaattgggaagttcttgatagtttcagcatactgtcaacacaattttccatgtaatttgctgagatctgctttttagagataagaggaaggaaaagaagagaaggaaatttgataatctctcccttttatgtctttataggactcatggtttttccaaaaccagtgaccgcattggaatatacattcagtaggtctgatccaacttcgtatgcagggtacattgaagaccttaagaagtttctaaaacgtgagtatgttttcttagagtaaggtcagagattttagttatagaaattagtaccaaattgtgggccgggcacggtagctcacgcctgtaatcccagcactttgggaggccgaagcgggcagatcacctgaggttaggagccaggtcttggacctggccaacatggtgaaacccctggccaacatggtgaaaccccatctctaccaaaaatataaaattagctgggcgtggtagcacgcgcctgtaattccagctactcgggaggctgaggcagaataatcgcttgagcctgggaggcaaaggttgcagtgagccaagtttgcgccattgcactccagccttggcaacaagagcgaaactccgtctcaaaaaaaaaaaaagagtcccaagttgtgattacatttagacacatcattcttagaatgtgtattaccttctatttccttctgttaagcagacaactgagcaagtgcattttataattacttgtgagactgttctaactatagaaagacacaggggcttactcatgggtagtagatttgatttttctgtcttataataaggacactaaatttcttgaaatgtaacatttattctgcattaaaactaaatattttaattaatagagcaaatctatattttatgaaatagtgtctctgaggacttggatttttttttgccattttattttatttctttttttttgtagctgatatacatttatgttgaatttgaaataggtcagtatagttattgagaaggaagaatctttttttttgtgccaggcattctttttttttttttttttttttattatactttaagttctagggtacgtgtgcacaacgtgcaggtttccaatgtagtgcttgcttgggggatgggaaattatgtttattattttaaagttatgtctgtgtctgatttttaatacatccgtttttcaaagttaccagtttgtaacgctctttgatagccatcctagcccagtttttcctcctgttttgcttggccgagccatttatgtgaatggtgttaacagtcacatgagtaatcatcgaatgtcctggcctgctggttcatgatcagctcatctcttcctcagccacagacacctgcaactgctccctagaacattactttatctcatctcccaccccgtcttcccttttatgtagcttaattccatggttgttatttcatttttacttttactggtgctctaaaatcccagacctctcagtcttcatgtcacaccctgtgggagtaccccactcctggataaagccatataattactggatgtagctcatccttctgtgcccctgcccctgagcagatactgagcaggactaattagcactgtgagtacttgagcacctccctcaaatggacttgcttaactgcctggtaatcctatggaatttctctggataattctctgaaaggattatttccaactttcactcaagcctctaaccccttacctttttccttacaactcactctcttcatataacctgatttcttgcttcaagagataatagaagaactcagatgggagctcctccagtttccccattaccagtaaaacaaatctacaatggcagccattttgtctgtcacattcttcctgctctgactgggggctgcccttcctttcacctgaggccacctgtgtcactcctgctttggatctcatcctctctcagtgtctcagaaacatactgtgtactctctcttcttgtgtgtatttagcctttctgtctgtattggatccttcctgtcaacttgaaaaaatcttcaactctctcctatcttaaaccaaaagctgcttctgatcccacattatctactagctgtcttcctaagtctcttttccttgacagttaaatatgtactcattatttaaaaaagacttttgtgaaagtattatccgtggtttaatagctttaaaaggtctgcaatgaagtgttccctgccctcctcccttccagcagaagtcctattaatttattgacatattttttgagggcctgctttgtggcaggcactcatttgggttccagcaatgaacagaagaaaaattcctgtctttctggagcttagactcatggtgaattagaagatagtacatcctgagggggaaaataaaacagaaaaaggagatagggtaagttgggaaggattgtggtttttacatgcagagtggtctgggaaagccttatggaaagggaaccttgagggaagagctgaaggaggtgaaagaactagccctggaaatgtccagcacaggaagcagtaggtgcaaaggccctgaggcttatggtgctgatgtgttgaagattcatcaaggaagtgagaggggctgaatggagtgagccaggggagagcagtaggagactgaggttagggagttaaaggagatccagactgtaggtccttagaacccattgttaagttctttggcttttacagtgaccatgatgagggattttaagcagtgaacaataacatgatctaattcaaatttttaaaggatcctgcaggcttctctttgaaactagactagaaggggggaattggggaagccagttaggctattacaataatctaggtaagtggagatggtggcttggcaagggagagagcaatgaaggttgtgaaaaatagtctgattctggacacatttcttttttctttctttcctttgtctatttgtctgagatggggtctctctctgtcacccagtggcacaatcacagctcactgcagcctcagtctcctgggctcaagtgatcctcctgcctcagcctcttgagtagttaggaatacaggctcacatcatcacgcctggctaattttttaattttttgtagagctggggtcttgctatgttgcccaggctggtcttgaactcttggcctcaagtgatccacctgcctccgcctcccaaagtgctgggattacaggcgtgagttacagtagcacctggcctttggatgtgtttttgatagggaattaacttcatgcttctgaactttttcttacggtgtttttcttccatatctataaatattacacttttcctgctggttcttgactttttacttttctacattatcacttttctttattaattattatttatcacttttatacattttcttagttcacatgtctcagaccttccctcctttctcaactcaataataattgatttactatttttagtttcattattggttgcctttttatacttggtctttatatcttcttttatcatctatagatactctcttctgacttccttatttgtaaactatcatttgaggtattttcttgagtctcttttctggaaaactccttcctggagccctttccctcctgctgcactctactgtttctacatcagccttttactcccaactgtcctttggggaacttccttttaccactttctttagttggacccactgtttcttggctcttgccctgccccccccttttttttaattatttttattttttctcttaatttactccttagttttgatggagtacattctcaagtaattttataagaaaagacacctgaaatgtaaatttgaacccttttatttctgaaaatggcttatttctgcctttatatttgctagtttatctccatatagaactcagttctttgtaatttgccttttctcttctctgaaagtttttcattttttttttcaattttctttatctcttttggattctaaaatttctatctggatttctgtctctaaagtattttgctgagacttgactgcaggtttttcaggatgaagacttaagttcttcagttcaggggaattatcctctgttaccactttgataatttcctcaactcaattttctggttttttctttctagaactattctgtttgttgggtcttagacctcttgtttttctcttactttgtttttacttaattagactttctgggggtttactttaattttcaactcctttttggtttttaaaacgttcgactgctgtcaatccttatgccctcctttttcatgtttgaaagatactataatatatctggttaaaaaataatgtcttctctattttttttcctgcagatactaattggacttaaaaagttttattttgttccaattatctctttcctttagggtcattcattcctccagttatcttggtctttttttttttttttcttcattgagacagtcttactctgttgcccaggctggagtacaatggcttgttctcagctcactgcaaccaccgcctcctgggttcaagcgaccctcatgcctcagccttccaagcagctaggattacaggcttgcgccaccacacctggctaatttttgtatttttagtagagacagggtttcaccatgttggccaggctggcctcaaactcctagcctcaagtaatctgcccatctcagcctcccaaagtgctgggatttcaggcatgagccactgcgctcggcctttggtctttcttattttaggcgttcttcagatgcatagggctccttggttactctggggtcagtgacctttctatgttcccatcatgccttctgcataatcttactggtcatcacacagttccttacacttaatagtatggaagtggaagtcagcataataaaaaagcaaggtcactgatgaactgacctataccaacagagtctatgcagtagaagcccttggggaaattggtgaagggcttatttttttgcaaagtgttggatgtcatgatgctgttttgttataaagtttatctctacccccacaaaatacctgaatcattctttgcttttaaatgagtacatagtcccacagtaacctagtttctggtaagtataagatgaaaccaaacattttgacagtgatttttttcccccaaggtaaagactttacacttcctttttgaggcatactctttgaaatttggttcttatttatttatttatttatttatttgagatggagcctcactgtgtcgcccaggctggagtgcagtggcaacctccgccctctgagttcaagcgattctcctgcctcagtagaatccgagtagctgggattacaggcacctgccaccgcacccagctaatttttttgtgtatttttagtagagtcgtggtttcaccatcttggccaggctggtcttgaactcttcatctcgtgatccacccgcctcggcctcccaaagtgctgggattacaggcatgagccactgcgcctggcctggttcttactttcattgaattcaatacctttttctggtaccaattgcacccacacaccaatagttcttcctgaggcactgttatatcatatgttaattatttattagtaagcattgtccactagattaagttaattgagggcaggggtcacatcaggcttgctcactttgtgcctcttgggctaaacactgtgccaagtacggagcagaattgtattgtctgttgcatatttctcctccctcttccctcccattaccaagttctaaccattttactcctttatcactgtaaactccatctctgctaaaaacccccttctatgagctagtctctcacctgggcggctttaatagtctcctaacttgttttccggatcctttctttttcccttctggactgactccacagaaaagtcagagttaatttcctaagtatgttcatactatccacttgccctggtttaaaacattttagtggattgttaattgatgtttggcaaaacacccacccacacccctcaaaattctttaacatagtttacaagactctatatggtctggcttctaccttccttcattggaagtgcttctcctagcttcattaactcccacatacccttctgcattcagctcagttgctttttttttttttagtgtaggttgtcataacactacatcttcatacctctgcaattctgattttatactcacttaatgactctcttccccacaaaaccgtaagctccatgagggcagcagcagtgcctttttacatcctctccattgtatcaccaagcatgcagaaggcattcagataatgctttagccatggctggtactgccacctaatggtgacagaagagatggatctataatccagtttgtatgattattgaaatgcagtaactttagagaactagttagctgttaaaaggtaaaggggcaaacttaacattctttccctaaagttatctggtaatttacattgctgtttttgtctttgaagaacattttccaaaggttaatatattcctggttgtttttagtaccttttttggctgatctagcacacatatatgtttcctttttagcatatactttagaagaacagaagaacctcacagtctgtcctgatggagcactttttgaacagaagggtccagtttatgttgcatgtcagtttcctatttcattacttcaagcatgcagtggtatgaatgatcctgattttggctattctcaaggaaacccttgtattcttgtgaaaatgaacagagtacgtacatattttacctctgctgctgcttttttctaatattctcttttaaggaggcaactatttttagattgttgtggttgggttaatgccttccttattaaaagttatcatttggggggtagcttgctttaaagactagcagtaatgtttattgatcactggaagaaagtttatatggcaaaaaaaagaggttcatagattaatcatggagtaaggagttaaagtaacttttaaacttttcttctttggaaatagctacatgcattccagcacacattaatgctccaaggggcaaatgttctccttgtcataaccaaagcagagacttgttagggtgcagtgctcatctgtgaatcctgtgttgtaaaataatttaaaattccacagactccataaagtttaaacttattaactttttcgaaatagtagcaaagcatagttttatagtatcagtatatatatatgtaattagataacagaaatacaaataaaatcccattctaacgagttcagtgggatgttgcagttgtatccaaagtagcagcattttgctgttttacagaagggtgcctaaattgtatagtaatgagcaaaggaagaagctaatgttctctgtgtgacaggagtaatgaattagggtcattgtgcaaaggaagatgatacggcttttcttgagtcatgaagtgatccctagcccccgtgccttgctgctctgtaaatgtacttcagagttgtgttctgatgcgcttactgttttgaggcctgcaaggtctcccttgaagagtgaagtcattcatggtcatttaaaacaggtgtagacttctcaaaatcatgagtttatgaatcactaaagtcatcattggtgagcaaattgccaccatccctaataaaagtaaaatttggatcttttgaagttggcactgctaaataagaagcttccctgtagggagaaccagctaggccctgaggtgcccagactgacacccctccaacctctgcttcatccctttgggaggccttggacaactgacagcttccagattgtcccatagcattctaggtgctcagtaaatgattagtggaatgtttcaaccagaccttattcagaattaagaattgaagttaacaaagtaagctgaaagtaatgtgaaactagatgatctagtttataaaatgaattaagtttgttttaacagagatgccttttgtaatcccagtctactagaagtatcctcacgacatctagattgctgaacatttgttcccagtagaaagccaggagaggatcaaccttctgggtttgttttctttctcaagatggtctccttgaatgataatggcctgagaccatgcttgctgatgactcagggcatggctttgtcaggaggacagcatcagacacacaggaatcattgatgagatgagcttacgtagtgtagcaggaggtttcataccagtatagttcccagttaggacgcaacaatacttgtcttttgagaggaatatttagattttacgtgcattcacgtggaaactgtgtataaattcagaatgccaaaaaattatctcacaaaatgtataaatatgtgagtttattcagttctgtcagctacatacacgaaaggagtcttaaaatagggctctcccagtgtgtgccttttggggagcagatgggttgtgagatacagtgaggctcagtggggccctcatggaaacacggagagtgtgacctgatatagttttgtgaagaacagttaattattatgcttctgcagttcttattatatacattaaattatttgttcatataaatattaataattagatttaagggtttctgtctgtttcatattttaagggtagcaaagggtacttttgtttcatttaattctttggtaatttatttattttctaaattgccccagtacagtaataagatatctgattgctgaagttattttatttaaaagttcattttaataccctcaaataagattaaagtaaaaggcagatgtatacagacttggtgttaatctcaaagtcttcaccccttgttcccagcaacagagggaggaagttccattgcatacttacgtgaagtttaaatttatcactatttcttaaccttagataattggattaaagcctgaaggagtgccaaggatagattgtgtttcaaaggttagtattcaaaaagtaactcctgttaaatctttgatgtttcttaaaatactttaaaagtctaatgatttagtcatcttttttttcttccctgtcacattttaaagtcctttgtagtgccttagaataaaattccaccaaccgtagtctttctcttccttaatgataattcagaaagacattttccatgtgtatttgattttgcacacattgcctttattttcacatataccgtatttcatcaattctaagattcactttttttctgccagctcagtaacactgaaattgggattacccttgtaattgatggtgtcttaatactgtatcatgacatttttctctttcttaatagttagttggcgtgctagtcatcagtgctatctgagatttaatgaaatatggtgcattttccttaaggtagaagcattatttatctcccctatccctacttacttttttttccagaatactgtgcagttttcatctcataactttcttttgttttctctccatgctgcaaatgccactaagacaaataatgtaaaagatgggtaagagttctgaggagacattaagttctaaatttatcattgtgctaaatattaacatttcaactctgattgtatggcagaaatattttacttagaatgttacattgaaatcacttttaaagttgtgaaaaaaaattctttttactgttaatggacttcttatttgggcagaaacttcttgctcagtggtcttcaaacttgatcactcatcagagtcatgttgccttgttgggttccgttcccatagtttctgactcagtaggtctgagatagggtccaaaatttgcatttttttctttttttttcttttagacggagtctcactctgtcgcctgggctggagtgcagtggcacgatctcactgcaagctccgcctcccgggttcacgcggttctcctgcctcagcctcctgagtagctgggactacaggcgctcccggctaattttttttttttttttttggagagacagggtttcatcatgttagccaggatggtcttgatctcctgacctcgtgatctgcccgcctcggcctctcaaagtgctgggattacaggcatgagtcaccgcgcctggcccaaaatttgcatttctcactaaagtttccaggtgatgctgatgctgctggtctgaggcccacattttgagaactcccgatttggagtgtccttattaattttttaagagcatttattcactatttagagtagcataaaaagccaggaagtttatggtttctcatctgggttgaaattatatgtgtgtgaccactggcaattcactttacctccttgtgccacagacagctcaatgggaaacttgtacaaaaagccagagtcagctgggtgcagtggctcgcgcctgtaatcctggcactttgggaggctgaggcaggcagatcacgaggtcaagagatcgagaccatcctggccaacatactgaaacctcgtctctactaaaatacagaaaattagctgggcatggtggcacgcacctgtagtcccagctattcaggagacggaggcaaaggaaccgcttgaacctgggaggtggaggttgcagtgagctgagatcacacttctgcactccagcctgttggcagagtgagactccatcacacacacacaaaaagccagaatctcacttaaaaccagataccacatctaagctgagcttttctttctttattttattttatttttttttttttggagacggagtctcactctgttgcccaggctggagtgcagtggcatgatctcggctcactgcaagctccgcctcctgggttcacaccattctcctgcctcagcctcccaagtaactgggactacaggcgaccgccaccacgcccggctaattttttgtattttttagtagagacggggtttcactatgttagccaggatggtcttgatctcctgacctcgtgatccgcccgcctcagcctcccaaagtgctgggattacaggcgtgagccaccgcgcccagctgagcttttcttgataaattcttctaaaaatctagtgggcagcatatactgtcagctctcaagtcagaacactatagctacaagatacatttagaaaaaatgttgggtaaccctttgtgatcctcagggcttgctcacaaagctttctggtagaaagttcttggggcttgggtgctaggcttcagctgggtagaagtgctaatttcatgacagtgcgcctgtatacaggagcctgtgagcaggctgcatagataagcttggatggagtgctgggtctacaaagccaataccacctgaagggaaaacacattcaagccagaagcgcaaaagctttaaattgtgtaaacctttggtcagtataaacaattccatatacctctccctttttttttttttgagacggagtctctctctgttgcccaggctggagtgcagtggtgcgatctcagctcacctttgcctcccgggttcaagcgattctcctgcctcagcctcccaagtagctgggactacaggcacgtgctatcacgcccggttaattttttgtattttagtagagatggggttttaccatgttggccaggatggtctcgattccctgacctcgtgattcgtcttcctcagcctcccaaagtactggggtaacaggcgtgagccactgcactcggcccccttaaggttttaaatgcatttttcttcttgtttatctattacgtatcctttgcttctagaatagttgggggaaatgttaatgaaaaacccagatttaatgattcggatttcagttagctttcccttttgctttggagagaggtgtgtgaagtacataaaataatcaaagcaggtggagttttaattttgtttatttagttgtggattttttgtttgtttttagaaaagcacaaaagtggaagaaatgtttgtaaaatttggcatttattccctaggctagtcacaagtagtaaaccagttagaacccataaattttagaagtgtggctctccagaacagatggaagcatttactacatatcataattgcaattttctattagatttgtctatgtcaagcgttctttaaattctttagttcttttatgtaatacatatgtcttttattttgtcttgtattgattttgttctgccttgattgtttttatacaagttagagtcctgaaaatacaaacacttaacatacccttggaggtgctttttttttttctctctctctccatagagacagggtgtcaccatgttgccaggctggtcttaaactcctggcctcaagcaatccacccacctccgcctttgaaaatgctggaattacaggtgtgaaccaccgcagatggccaaggtggccttttatattatcaacttaaaagatgatcctgcaaaagatgtaattttcatatttatgtcatttttttctcagtgttttattttcttatgaaaatgaatcatactaagaaaatcaaaaaatgggaagaaacaaaatgcattaatttttaaactccattttgtttcagtggaacttagtgaccatcagtaggttcttagagttagttgctcatagtttacaatatgatgctattgccggacgcggtggctttcacctgtaattccagcactttgggaggccaaggtaggcggatcaccagaggtcaggaattcgagaccagcctggctaacatggtgaaaccccatctctactaaaaataaaaaaatgagcctgacgtggtggcatgtgcctgtaatcccagctactcgggaggcttaggcaagagaatcgcttgtacccaggaggcagaggttgtagtgagccatgatcgcgccactccactccatcctaggcaacagagcaactctgtctcaaaaagaaaaaaaaatatgctattcgtatacttagaaaattatgacatacatgcttcaccctgagtacctcattattattcagatactcattttaatattttacaatttctaaatgtttattttcacagaaggtataaattaaaagattaagaaaaatcctgccaagatcacgtcttaggcacacacagagagcagttgagcgtctgccacacctgatggtcttgagccgtgatggccttaactctgagccccagtgccctgctccgtaattgatgctgtccactaaggcttgttaggcctaaaggagggaagtgtaagctaagtgtggtatctggtaggaaacccactctgggttgggtgtggtggatcacttgaggtaaggagtttgagaccagcctggccaacatgacaaaactccgtctctactaaagatacaaaaatcagccctgcatggtggcgcacacttgtaatcccagctattcaggaggctgagacaggagaatcgcttgaacccgggaggaggaggctgcagtgagccaagatcaggccattgcactctggcttaggcaacagagtgagactctgtctcaaaaaaaagaaaaaagaaaaaagaaacatactccaagatactcagtaaactgtttctcaaaaaaaatcctttttttcattttgcggaaatgtgttctgtgaaggtcatatattaaggtaaaataggttcaacaaaagcaattaatgcagaaaagcactgatatcagagtgactagtttttctctaatataaaatgttatctttgattttaagcttattttttaagttaaagagtacaaatgtagggtggagtttgagtagtgattgaaaatggcttttgcgatttctcctagcgttgttacttcctaccctttccacatattcatcatctggatcattagagcttgtctggtgggtggggcgcatcatcactctgtcctttgtgctgtctggccggtgcctttcatctgtctctcaccccaccccacagccatatgctgcttcataatgaaatgaaatgagcagaatctagaactccttagagtggattcttagttttgctttatgctgtttcatgcatgctttcaaccctgtctcaaaaaaatttttttatatatatataaaattcaagtatttaataatgttttattttaactagtgttccgtaagcccagcactgattttaatcattgtggtctgtttgctacttctcagtctgtgttaaagttacactcattagaattaggcccatttagaaagtgttacatgtgaattttcataaattgcttatttatcatgaataatactagaaataactaatagcatgaattaattggattacaggtgatgcttgatttgtatgttgataaacatggaattctagtagacaagtaatacttaatgatttatatatgctcataaatttattcctgatacagtatttaaatttgtcgaggagagttttgcttgtagtaccttaaattttccttcatgcttcccctctggttgcagttctggttattaatcacatgaaactcacacctgctgtctcccaggcctgagtgctgcattctaggttggcaccttgtggtggctgttgctttccagtctggaagcacagcattttattcatttcaggaaaacatcggtcctaaacctgctggtgcattcctgctgttagtaggtagaaaggctggcatttggtatttggagggcagataagattttacaggagtacatgagttaaagaagggactctcatgaaagagagtatagagtgtatctggaagtgtaagtatcaggatagttcatgtggaaggggttagttagataatatttgcaatcaagatgagcaagcttcttctcagaaatacacttgtaatgataatatagttggagcagcattgtagtttctgcaaactgttcatgattgatattcctttaattataaacatagtttttacaaattctttttgtgacctaaagaggatttcttttgttttcaacttcagaatgaagatataccaaatgtagcagtttatcctcataatggaatgatagacttaaaatatttcccatattatgggaaaaaactgcatgtaagtattgagaagttcttatgtggtgattactcttttgggaagctggagcatgtgttgacgtaccacttgtctggggtaggtagacgccagccctgtttaatttgtgcgtcatctattcaggttttgttttattttaatggtgatggtaaatggagttcccacatttacaattcagaacacagaacccaagcagatacgttaaagttagatgattatttctaaaatatcattttctttttcattatagaggtagtagtaggtgcttatgtagagaaagtagaaaagtacttaaaaagaaaatcaaggccgggtgcggtggcttactcctgtaatcacagcactttgagaggccaaggcgggcgcattacctgaggtcaggagtttgagaccagcctggccaacttggcgaaaccccctctctactaaaaatacaaaaattagctgggcgtggtgacatgtgcctgtagtcccagctactcgggaggctgaggcaggagaatcgcttgaacccaggaggtggaggttgcagtgagccaagattgtaccaccacactccaggttgggtgacagaatgggattctgtttcccccaccaaaaaaataaatgaaaagaaaatcaaggccaggcgcagtggctcacctgtaatcccagcactttgggaggccgagtcgggcagatcacgaggtcaggagatcaagaccatcctggctaacacggtgaaaccccgtctctactaaaaattacaaaaaattagctgggcgtggtggcaggcacctgtagtcccagctgctcgagagggtgaggcaggagactggcatgaacctgggagtcggaggttacagtgagccgagattgtgccactgcactccagcctgggcaacagagcgagactctgtctcaaaaaagaaaaaaaatcaaaagctcattgcggccgggtgtggtggctcacgcctgcaatcgcagcattttgggaggccgaggcgggcagatcacctgaggtcaggagttctagaccagcctgactagcatagtgaaaccccgtctctgctgaaaatacaaaaattagccgggcatagtggtgggtgcatgtaatcccagctactcgggagactgaggcaggagaatcgcttcaacctgggaggcagagattgcagtgagccaagactgcaccattgcactccagcctgggcaacaaagcaagactctatctcaaaaaaaaaaaaaataggttagtggactaatgagttatcataggagtgggactagcggctttataagaagaggaagagagacctgagctagcaggttagcatgctcagccccctggccacgtgatgccttgcaccacctcaggactctgttgaaagtacccagcagcaaagaaggttctcaccagatgcagctccttgatcttggccttctcagcctccattaactgtaagaaataaattcctttctttataaattacccagtttcaagtattgtgttataagcaacagaaaacaaagacagtagtacagttaacaaaggaagttaacatatagtgctcttatgaatctgtagactttgttgaaaatccatcaattgttccagtaatactctttatagtgaaagacaagtgttttcctgatcccagatgtcacactgttaacacgtttagcaacctataatcaggaatatttcctcagtctgtttcatggctttgtactcttcaaaaataagtacgggccttttatggcttattttatgttcattagttggagtttggtggtttttcatgattaaatataggttgtgcattttggcatgagtgcctcaaaagaaatgttgagttctcagagtgtcaggagggacatggtatcatttcattccgttaatggtgatactgccttgattccttggttaaggtggtatgagcgaggtttctacaatatactttttttcctctgtcatcaataagtatcatgtggggagaaaattaaaaagctcgttactgcctggcacggtggctcacgcctgtaatcccagcactttgggaggctgagacaggcggatcacctgaggtggagagttcgagaccagcctgaccaacatggtgaaacgctgtctctactaaaaatacaaaaattagctgaccgtggtggcacactcctgtaatcccagctacccaggaggctgaggcaggagaatcacttgaaccaggaaggcagaggttgcagtgagccgagattgcaccattgcactccagcctggcaacagaatgcaatgtctcaaaaaaaaaaaaaaaaaggccaggtgcagtggctcacgcctgtaatcccagcactttgggaggccgaggtaggtggatcatctggggtcaggagttcgagaccagcctggccaacttcagtagcaatggcaaagccctgtctctactaaaaataaaaaaattagctgggtatggtggtgggcacccgtgactccagctacatgggaggctgaggcaggggaatcgcttgaacctgggaggtggaggttgcaatgagctgagatggtgccactgcattccaacctgggcaacatactccatttcaaaaaagaatattaaaaaataatgataagggtcgggtgtggcggctcatgcctatatattcccaagcactttgggaggccaaggtggacagatcacgaggtcaggagatcgagactatcctggccaacatggtgaaaccccgtctattaaaaatacaaaagttagctgggcgtggtagcgggtgcctgtaatcccacctacttgggaggttgaggcaggagaatcacttgaacccgggagtcagaggttgcagtgagccgggatcgtgccactgcactccagcctgggcaacagagcaagactctgcctcacaaaaaaattaataataataatgataataggccgggtgtggtggctcacacctgtaatcctagcattctgggaggacaaggcaagaggatcacttgagctcaggggcatgagctgtcacacccagtcaacatttttatcagtaattacaggtatggacttacagctccaaaaaattaaaaagaatgcagagaacagaaaataatagagctaaattttttttttaatttacaagccacgtatggtggctcacacctgtaatcccagcactttgggagggtgaggtggaagggccatttgaagcgaggagtttgagattagcctgggcagggagaccctgtctctacaaaaaaatttaaaaattagtgggctgtggcggcatgtgcctatagtcccagctacttaggaaactgaggtgggaggattggttgaggcttcaatgagccataattgcaccactgcactgcagcctgggcaacagtctcaaaaagaaaatttacagaataagccaattcctggtagagagaagtattaagtttccatagagtttgaattaatatattttccttttattgccaggttgggtatctacagccattggttgctgttcaggtcagctttgctcctaacaacactgggaaagaagtaacagttgagtgcaagattgatggatcagccaacctaaaaagtcaggatgatcgtgacaagtttttgggacgagttatgttcaaaatcacagcacgtgcatagtatgagtaggatatctccacagagtaaatgttgtgttgtctgtcttcattttgtaacagctggaccttccattctagaattatgagaccaccttggagaaaggtgtgtggtacatgacattgggttacatcataacgtgcttccagatcatagtgttcagtgtcctctgaagtaactgcctgttgcctctgctgccctttgaaccagtgtacagtcgccagatagggaccggtgaacacctgattccaaacatgtaggatgggggtcttgtcctctttttatgtggtttaattgccaagtgtctaaagcttaatatgccgtgctatgtaaatattttatggatataacaactgtcatattttgatgtcaacagagttttagggataaaatggtacccggccaacatcaagtgactttatagctgcaagaaatgtggtatgtggagaagttctgtatgtgaggaaggaaaaaaagaaaataaaagtgtgtttgaaaaatattatcttgggttctttgtaaaatttattttttacatgctgaattagcctcgatctttttgattaagagcacaaacttttttttgtaaaacatgtaaaaaaaaaaactgggattaatttttagtgttggaactgcctcttattttaggctgtagataaaatagcatttttaggttagccagtgtgactatgcacctaattttttatgagattaaattcataagacttaatttgtacaatagtttgtgaaatatcttgttactgcttttatttagcagactgtggactgtaataaagtatataaattgtgaaatataaaaacttggaacttattcaaagcttcaaagcaaa

SEQ ID NO: 306 - DNA, 69056 bp, Homo sapiens
  source 1..69056: mol_type = genomic DNA; note = NC_000014.9:c34630148-34561093 SNX6 [organism=Homo sapiens] [GeneID=58533] [chromosome=14]
gcgcctgcgccggccctcgcctcggagcagccatgatggtgggtgttctccgcggcgccgagtcccgggagcgcggtgggggcagcgggcgcggggcgggcgcggggaccgcgccagcctgtcactaatgtctccctttgtgtctcccccatctcatccttttccccggcgcgccgtgcccgccgaccccacaggaaggcctggacgacggcccggacttcctctcagaagaggaccgcggagtaagttctgccttcctttcgctcgcgggaccctggaccctccttccccatcctgggtccccgggtgtggtacggggatgggtccccagccgcgcggcactccctccccgtagtcctcctttcggtttcctcgctgcaccgcgccccaccctcccgcagcccttcctccctaggggccgctcggctccgattcccggggacccgcggccgctttcttgtcccccgccgctgttcgggccttctggtggacctccactcccacgcggggcggggtgcaggtggcgaagtggaaatggaggcgggagatggaacgcccccaccctccctcgacactttggggccatgaaaacccattctcggaccttcccagcggcaccctcaattttcacccggtgtggacatctcgaacttgctcccgcccacccttctgtctctctcaaatagtacaggtgtagtctacattaccattttgcaaggatttttatagtagccgaatcaactcctgtccagtgccctactagattatgcaaagtgcaggtagcccatggtatctttactttttctaatatccaacaaatcctgtctttggcaggatttccttggtgttttattcccccttagcttctttgaggtatattgacaaatactgttgataattgtatatacttaaggtatacattatattttaatacacgaatacattgtgaaatgagtaccaaaatcaacctgacatatccatcacctcacctagttaccatttttttttgtgtgagaacatttgagatctaagcaaatttcaagtatgtaccctttgaccaacatcgacgctccacccactcaccccccacatacacactccgccaggcctttgataacctccattctgcccttggtgttctgaggttagttgcattctacttcagaaagagccttccgggctctgattcctccctcccaccccactctccaccccctttttccttggctgaagggtggtaatctttatagtcccttgtacaagtgagcacttggaaaatgttgatatatgataattaccattcagcaaggttccatggttccttcacatttcacagcctgcacttcagttttcccttttgctttttcttatccgttttaatgtgagagagacatctgttagtgcatatttggtaggtgataaaatattgtgggatgttattgctgtttgtaataacagatgaggtagttagtatgaactgatgacttttataaaacttttatttatttatttggttttatgagacagtatctccctttgttgcccaggctggagtgcagtggcatggttatagctcactgcagccttgacctcctgggcttaagtgatcctcccacctcagcctcccaagtagctgggactactggcacgggccaccatgcctagctgggtttttgtttgttggctttttgagacggagtcttgctctgtcacccagactggagtgcagtagcgctatcttggctcactgcaagctccgcctcccgggttcacgccattctcctgcctcagcctcccgagtagctgggactacaggcgcccgccaccacgcccggctaattttttgtatttttagtagagacggggtttcatcatgttagccaggatggtctcgatttccagacctcgtgatctacccaccccggcctcccaaagtgctgggattataggcgtgagccaccacgcccggcctgtttgtttttatagagacagggtctcaccatgttgcccaggccagtgtcaaactcctgggcctaagtgatcctcctgcgattataggcgtgagtcactgtgcccagccgagcttttaaatagtaagaaagatggagaaggtgctgcatacttttataaattaatttctcagtgtaaacaaaggcattatttagaatttcaggttagagcaaaagcatcatatagaattactagttgttggtaagatttttagtttcggccaggcacaatggctcacacctttaatcccagcattttgggaggccgaggcaagaggattgtttaaggcaggaattcaagatcagcctgggcaacatagcaagacctcatctgtacctaaaaattttaagaccaggcacggtggctcacgcctgtaatcccagcactttgggaggccgaagtgagtggatcacctgaggtcaggagttcgagaccagcctgaccaacatggtgaaaccctgtctctactaaaaatacaaaaattagctgggcatggtggcgcatgcctgtaattccagttacttcagaggctgaggcaggagaatcactggattcattcactggaacctgggaggtggaggttgcagtgagctgagattgcaccattgcactccagcctgggcaacaagagcaaaactccatctcaaaaaaagaaaaaaaagaaaaaacaattttttttttttttgaaacggagtctcgctctttcgcccaggccgaaggcccgactgcagtggtgctatcttggctcactgcaagctccgcctcccggattcacgccattgtcctgcctcagcctcctgagtagctgggactacaggcgcccgccaccgcacctggctaatttttttgtatttttagtagagacggggtttcaccgtgttagccaggatggtctcgatctcctgacctcgtgatccgcccgcctctgcctcccaaagtgctgggattacaggcgtgagccaccgcgcctggccaacaatttttttttaaacttaggcaagcttggtggtatatacctgtagtcctagctatttgagaggctgagagcttgagaacaatgagctatggcttgagagagccagggtgacagagtgaggtcctgtctctaaaaaaatttttaaaattgtatttcgggttttaaaatagcggaaactagcagagttacttaatgaagtatgaggagttgattatagcacaattaaactaattattctaaatataaagcatatgacctttagataactttatgtcctatttttggtgtctactagcacaagcaaacaggatttgctttcttggaggatcttaataatgttcagtaaaaatactaatttttgagtatgttgatgttgtgaaaagtattttttggtgaatatttgtgttcatggctttatgccttcagaaagatttgctcatgaaactggaagcccttaagtaatttgtccagaaactttctctttttttttttttgaaatggagtctcgctctgttgcccaggctggagtgcagtggcgtgatctcagctcgctgcaagctctgcctcctgggttcatgctatgccattctcctgccttagcctcctgagtagctgggactacaggagtgcgcgaccgtgcccggctaattttttgcatttttttttttttttagtagaggcggggtttcaccttgttagccaggatggtctagatctcctgacgttgtgatctgcctgcctcggcctcccaaagtgctggaattacaggcgtgagccaccgtgcctggccccagagactttttcatgtattacaaaattaaagggagaggaagacaaaagagcactcctgactgtgatgttcttatagaatcctgtagatgaaaattttaatatggaaatggaaaaaaacctgaattagaatgcttttagaacatcaggatggatatatacacttacccagttcttccttatttttgtcccgtggaactgggtgaatcataataattataaaattataggtgggcacagcataatcattgtttcattatatttatatttcattatatttcatcatccctctaaagcctttagtatccccctttttctaatgagaaatccgaacttcagagaaactaagttagtagtctgaggtcacacagcaacaaatgggagagctggactttaaaacacatttctgatatcagagccactgcacaggtttctcaaagtggccttgaaatacttgcattagaattacctggtgcatttgaaaatcaaaatgaaagtttctgggtgtcacctcctcactaaatcagaatctcttagggtagggaatacacagtattgaaaactgttggtcacactttgatctcttcagccccacctctacatatgggcagataactgcattttttttttaaattttttttgagacagggtctcgctctgttgcccacgctggggtgcagtggcaatcttggctcactgcaacctccacctcccgggttaaggtgattctcctgtctcagcctcctgagtagctgggattataggtgcccgccaccaggcctggctaatttttttgtatttttagtagagacagggttacaccatgttggccaggctggtctcaaactcctgaccacaggggatctgcccgcctcggcctcccaaagtgctgggattacaggtgtgagccaccgcgcccggccgataactgcttttttgaccagcacccaaggagtttctgtttgtgcactgaaatttgattactgctgcagaaagttatcctgctatttcctcattttaggaatagaaatatctggcctgtttaaatttccttacattgtgtttgtcctgatagaaatagattaccataattagaacttttaggcattgcatttttagtttagatcatcttgttgagccttttaagaaagggagtcttggctggtcacagtggctcactcctataatcccaacactttgggaggcagaggtgggtggatcacgaggtcgggagttcgagaccagcctgaccaacatagtgaaaccctgtccctgctaaaaatacagaaaattagctgggcatggtggcgggcacctgtaatcccacctactcgggaggctgaggcgggagaatcactggaacccaggaggcggaggttgcagtgagctgagagcgtgccattgcactccagcctgggcaacagtgcgagactctgtctcgaaaagaaaggggaattttgacagaaaaagcatgaagtacatattgatacaagttgcaaaggggacagcacattcaaaaataataactagcatttcatgtaaagcagcaagtaagcaaaaaaaatttttttttttttcctagacggagtcttgctctgtcgctaggctggagtgcagtggtgcgaccttgactcactgcaacctctggctcccaagttcaagctattctcctgcctcagcctcctgagtagctgggactacaggtgcacgccaccacgcccagctaatttttgtatttttagtagagacgaggtttcaccatgttggccaggatggtcttgatctcttgacttcatgatccaccctcctcagcctcccaaagtgctgggattacaggtgtgagccacagcgtccagctacaagtaagcaaaattaaagtcagtgttttaaaataaatctttaagcagctgtacattttcatcatgatatttcgattagaacagaatcttagtgccctaagaaaacattgttttggccaggcgcagtgtctcatgcatgtaatcccagcactttgcgaggccgagatgggcagatcacctgaggtcaggagttaaagacctgcctggcccacatggtgaaaccccatctctactaaaaatacaaaaattagccgggcgtgatggctggtgcctgtaatcccagctacttgggaggctgaggcaggaaaatcacttgaacccaggaggcagaggttgcagtgagccgagactgtgccattgcactccagcctgggcgacaagagcgaaactgtctcaaaaaaaaaggaaaatattgttttgtgagaaatttaaaaagcaggcttcaagaatacatagtgttgaaaaatattggccacattttcatctctttagccctacctctatataataggtttttcctcccccaaataaaggacagtaacatattatttagtacacaaatgagccctttgaattggacacattttttttctgatgtgcttgttaaataagaacagtgcatgccagagtgatggcatgattctctttgcacttgatttcagttctaaataatatgtttattgttttcaagaattactttaggtggagtaactacttgttctcctgtactcgtagccttgctcctacctttgtattccttatcttcattaatagcatcactttccagttgtgccggcaagaaacctctgagtcatatccttcatctttatatcagaacagtcattgaggccagttaatttcaccttggaaatgttgtttatcccatctttcatgtgcttggttccatttaagctccttgcttcttcctgcttggatagtagcagtacctctccttagtctctgtctttagtctttctactttccaattcagtcgtcaaattacttatattactaaaatgattaaaccatatagcacgttagtgaaaaggacttccttggacccctttttttggggggtaaggtccaaactccttaggctaacattcaactctgttcataaccttttctgactggcttcatttctcaatatcccctcccccatattctagtctactccccattgcccaagtacgtctacacttgactgtctgttttatgcatgcatttcagtgttttttttccccctcaccttttctttcgcttcaaattcaacttgaatttggcccagatgcttgcattttgttttgcacctgcacactttttagcttaaacacatgccacatttattgatagttacttcacataaaaatgtgacatatattatgttggctgaggattaaaaagatcaataagacaaagttcctgccctgagaccatcacagtgtagtgaaggagatagagttataatcccttgcaatgaagtgtatgggagtacaaagtaaaagtgttcaactttaggggaaggggtagtagtaaagacataatgatagttacacacttacatgcattcactgcatgtcagggactttccatataaactcaattctcaaatccctatgaaatacacctactgttattcctatttgggaaaggaaaactgagttgcagagacattaaataacttgcccaaggtcatacagccggtaggagctgtggtcaaataggcaatctagctctagggcctggctcttaaccactgtgctattggtctgctttccaacagggaggatggcatgtgttggtaatttggttcctcctagagcacttgttcttactggagcagaggttgcaaaggtacatgcagctagtacagagtatgtagtgcatagtgaaagactccaggcagtgggaagtactgaggaatcttttttttttttttttttttgctctattgcccaggctggagtgcagtggcacgatctcggctcactgcaagctccgcctcccggattcacgccattctcctgcctcagcgtcccgagtagctgggactacaggtgcccgccaccacgcccagctaatttctttttgtatttttagtagagatggggtttcacggtgttagccaggaaggtctcgatctcctgacctcgtgatccacccacctcggcctcccaaagtgctgggattacatgcatgagccaccgtgcccggccagtactgaggaattttaagctaggaaagacatgcccaggccgggtgcagtggctcatgcctataatcccagcactatgggaggccgaggtgggcggatcacctgaggtaaggagttcaacaccagcctggccaacgtgacgaaaccccaactgtactaaaaatacaaaaaaaattagccaggtgtgacggtaggtgcctgtaatcccagctactagggaaactgaggcaggagaatcgcttgaacccaggaggcagaggtagcagtgagccaagatcacgccactgcactccagcctgggcgacaagagtgaaactccatctcaaaaaaaaaaaaaaaaaaaaaaaaggaaagacatgcccaggtgaaaaaacattgtagattattctaatattgaggatagattgatgcttcctttcagaaaacaaagaaaccagttaacaggctaatgcagcagtccagatgagaaatgacaaaggtagaactaaggcagtggaagagggatgaaggaagggatgtagtaaagagatgtttaggagatagaatagacaggacatagtgactgaataagtaatacatgggctgggcaagggagaaggagaaaacatagaatgtaggaaggaagaacagggttagaggttaggtcataagtctggttccacgtatgttggatttaaagtgcctgtgaggcatctaacctgcccccaccaaactagaatgtaagatctgtaaggctgaggattgtgtctcttcactgctgtctccctaacatgtaggacagtgcttgatacattgagggcactcagttgtttaataagtgaatacatccaggtggctatgtctagttggtaacttgaaattcaaattgggaacttagaataaaaagtctaaattggggatataattaggaattattagttgagaatggctgatatttccaatattagctagcacccaagggaaaccagcatttaaggaccagagcaaagatgattggttaatggggctgagaggggtaggaggcgaatcagaggaggcttcagaagttgagagaagctgacgcagtggctcatgtctataatcctagcactctgagaggctgaggcaagaggatcacttgagcccaggagtttgagaccagtctggggtctgtagagagatcctctctctacaaaaactaaaaattaacagggtgtggtcacacatgcatttagtcctagctacttgggaggctgaggcaggaagattgcttgatcacaggagtttgaggctgtaatgagctatgattgtaccactgcattccagcctgggtgacagagtgagacgcccgtcaccattttttattttttattttttttttgagggagtctcactttatcacccaggttggagtgcagtggcaccatctcaattcactgcaacttctccctcccggatttaagcagtttcttgtgtctcagcttcctgagtagctgggattacaggcatgcaccaccacgcccaactaatttttgtatttttagtagacacagggtttcgctatgttgcccaggctggtctcaaactcctggcctcaagtgatcctcctgcctcagcctcccaaagtgctgagattacaggcgtgagccaccatgcccggccccatgtccagttttaaaaataatgatttttttgttttaaaggttgagatagttttaagaaaggagtggtcagaatgataccaaggcagaatactgcatagaggccaagaagactgaaaaatatcattggtttggaaattaggtactcatgtaaagaattttgtttttgtttttgttttttgacatagtcttgctctgttgcccaggctggcatgtagtggcaccatcacagctcactgcagcctcgacctcctggggctcaagtgatcctcccacctcagcttcccaagtagctgggactacaggcgtgtgccaccatgaccagctgtgaggcaaaatttatttgtaaaaagatgtgttggtgggcctgagagaataaacagctgctggcatttatttctctgggctggaggaggcaagttcacttgttgagggtggggtgtaatgtggtagtaaaagttggaattgttgctgcagggaatcaaaagaggagctgagcagagttgcacaggactggactgctgagtggttttcaaagagcatatgcaatttggagaccattaatttgaaatggaacagtacaaacaatggtgacttttctctagccatactcagcagcccaaatgtaaaagttgacgattatattgatcttgaggtcaggtggctcatgcctgtaatcccagcatttgagaggctaaggtgggaggatcgcttgagcccaggagttcaagtctagcttgggcagcatagtgagacctcatctctataaaaaaataaataaataaaagataagtagatcctgagtatgggaatttgtgagccaggtatggtaaaagagcagtgagagttgaagggaccagcaggaaaggtattggaatggcattcatggagtgaagcagagggagtgccgacagactggaaataaatggaaaggtcacaggactggaggtgttgatgaggttacattgtacatgtggtaaaagtggtggggagaaagcaggaagcagttaattttatattacataagattgattgtcttcctcattgcaaacagatttcttgaaggcagggctttttgttcactttaaatctttcacaatacctgggacagtgtttgcgtataagtgctgaaaaaaaagtttattaaatagccgcatattactgtattgcctagtgtttatatttattctatctctctctctctctctctctctaaatatatatatatatatttttttgagacagagttgtgttctgttaccgaggctggagtgcagtggtgcgatatcagctcactgcaacctccacctcctgggttcaagtgatccttctgcctcagcctcccaagtagcagggactacaggcatgcaccactgcacccagctaatttttgtatttttagtagagatggggtttcaccatgttggccaggctggtctcagactcctgaccttgtgatctgcccaccttggcctcccaaagtgttgggattacaggcataagccactgcgcctggccaatcaaattttacttctatcatggggtttttaattgatcatactgtaattacctgaaaatagttttgtagcccagttgtggttaccacctttctttctttcctcttccctcctttacattccacaaatatttgtcgagaacttccattgggaatgtagcaatgaataaaacagacaaaaacccatgtcttcatggagctgaattacagtcatgaagagacatttttaaaaagtaaagtatattaggttttgaataggcattatgaagaaaaatgagggaggagtagggatttttgggctgggaggggaggatggtttgagctgcacttttagatagggtggctaggaaaggccttcctgaggaagacttaaggacttgaaggaagtgagctgtgcagatacgtatctgggggcagagtgttccaggcagagggaaccagcggttgcaaagactccctgagacggcagcatgtttgtgtgttcaaaaaacgagggccaggtgcagtggctcatgcctgtaatcccagcacttgagaggccaaggtgggtggatcacctgaggttgggagttcgagaccagcctggccaagatggtgaaaccttgtctctactaaaaatacaaaaattagctgggcatggtgtcgcacgtctgtaattccagctactagggaggctgaggcaggagaattgcttgaatcagaaaggcagaggttgcagtgagctgagatcacaccactgtactccagccttggcgacagagcaagactccatccccccctccccaaaaaggaggccacatggcaggactatagtgagccagaggagtggtaaattagatgatatcagatggagattttatagtgcctggtaggccactgtaaggtattcagcttttcttcaagtggaaactccttagattttaagcagagaaatgatttctagtttaatgatatcatagtagtggccctgtagggaataaatttatgaggggcaagggctgaagtaagagatcagttgggagactattgtaagagtcaaagttattttctttcttccttcctctttgccccatcccatccactcatccatctctctacatttgctttgctgtcaaaatatgaacaactgacgtcttagggatgttctaagctagatacttcatagtacactagtcagtatagtaactagtagtgaatgtcttcctaagtcttttttttttttttggaggcagtcttgctctgtcccccaggctggagtgcagtggtgcaatcttggctcactgcaagctctgcctcctgggttcaagtgattctgctgcctcagcctcccaagtagctgggactacaggtgcccgccaccacgcccggcttattttttgtatttttagtagagacggggtttcaccgtgttagccaggatggtcttgatcccctgacctcgtgatccgcctgcctcagcctcccaaagtgctgggattacaggcgtgagccaccgcgcctggtccaagtcttttttttttttttttttttttttttgagacagggtctcactctgtcacccaggctggaatgcagtggcacaatcacagcccacggcagcctcagtcccctgagtagctgggaccacagatgtgcaccattacacccagctaatttttaaattttttgtggagacacgatctcactatgttacccatgctggtctcgaactcctgaccacaagtgatccttctgccttggcctcccaacgtactggtattataggcataagctactgtgcccagccttttactaagtaattatatgtggaacaacaggtcacaggtcagagtctttaaattgttcttctaatgatagtacatttatgttacttaatccatatttttttgtcataatctttctcttgaccagcgacacacatgtttaacctagcctctgacaaaagacagtccaatcaatgtgtattgttccagaaaaagattaagccattgaatgtaatctaattagaaatttcttcaaactgaactcactagttacagaaagttgattaaatttttttaacccgagacagtcttgctctcttgaccaggctggagtgcagtggtgcgatctcggctcactgcagcctccgcctcctggattcaagcaattctcctgcctcagcctcctgagtagctgggattacaggcgcccacaccacgcccagctaattttttttttcttttttatatttttagtagaaacaaggtttcaccatgttggccaggctggtctcaaattcctgactttgtgatcctccctcttcggcctcccaaagtgctgggatgccaggcatgagccaccacacccagccgattaaatttttatgaaacacaagttgtttgcttgactccggtccttaataaaaccctctaaaatgattgactttttgctaaactgagaagaaaatctgcctggacaatttgtgtacattttatgtaatgaacactaaatctcacacctgtaataccagtggttcgggaagccaaacggggtcaggaggtggatcacttgaacccacgagctcaagaccagcctgggcaacatggtgagatcccatctcaaaaattagctgggcatggtgatgtgtgcctgtagtcccagctacctggaaggctgagatggaatgatcgcttgatcccaggagttcaaggttaaaatgagctatgattgtgccaccgcattccaacctgggtagcagtgcaagactctgtctctttaaaattaaaaaatctacaatatattttatcagatttaaggtgcagttgattgaaagacttttatgtaccactaaggaaaaaaaaatgttgctagttaaattgtaatttgtcatcaattgaaagacattcctggctgggcatggtggctcacacctgtaatcccagcactttgggaggctgaagcaggtggatcatgaggtcaggggatcaagaccatcctggccaacattgtgaaaccccctctctactaaaaatacaaaaattagctgggtgtggtggcacatgcctgtaatcccagctactcaggaggctgaggcaagagaatcacttgaaccctggaggtggagattgcagtgagccaagatcacgccactgcactccagcctggtgacagggcgggactctgcctcaaaaaaataaaaataaaaaaggacattcctatttcagatatgttataaaaaatatgcatctagaattgatgaaccatgatagcatgttaacttttcagtgatattttatactgatggtggggggtgattttattttggggactggcttttccattatacatcttgtttattagaaataggacttaggccagtcataagtcctattacaggctcacgcctgtaatcctaacactttgggaggccgaggacggaggggattgcttaagccaggagtttgacagtagagtgagcaatgattgcaccgctgcactccagcctgggcaacacagcgagactctgtctcaaggggaaaaaaaaagaaaaggagaagacaaatggtagattgagttaatagctcttaaggcaatatataaatggataacatgctttaataaggtatacaagagagaatttagccaggtgcggtggcttacgcctataatcccagcactttgggaggccgaggtgggagaatcacttaagcccaggaggtcgagaacagcctgagcaacatagggagaccctatctcttaaaaaataataataattagccagatgtggtggtgtacacctgtggtcccaattgcttaggaggctgaggcaggaggatcacataagcctgtgagtatggtaggtggcctatatatttgttaaagctctttatactgaaaatctgtattttattgtatgtaaattatgccaaaataagtagaattcaagaccaaaaccgttaagtggatagtacagggatattttatatagataaaagttaccatttaagaaaccaagtgttgtgctatcaaaaaaaaaactaaacaataaagggaaacagtatatttagtatagaaggataaggaaatggaagagaaagaactgttttaataacttggaataatcttgaattggaagaataaataacatcttctcaaatgtagatatctctgaaaggtatgcttccaaactgatagatcagtagttaaaaaaaaaaatctgaaagcaaaagtgtacatagagataggaaatctggaagaaaaatttttgaaatagggtcttacgagactggagtgcagtggtgccatcatagctcactgcaacctcaaactcttgatcttcctgcctcagcttcctgagtagcagagactacaaatgtgggccaccatgcccagctaatttttttattttgtagagacaggtcttgctatgttgcccaggctggtctcaaactcctgggctcaagcgatcctcctgccttggcctcccaaggtgcagggattccacgcgtgagccaccttggctggccaaaatatttcatataaatattaagaacaacatattaacagctgagaggaaattttgacagaatataaaggcaaggaaaatcctgaaaatgtctgctggtgtattcggttacagattttaagggcctttgcctgacgttcctgttttgataggcctgggattctgtttctggttttggagttttttggttttttttttttgagacagggtctcactttgtcacccaggctggagtgcattggcagtttcttggctcactgcagcctcgacctcctgagttcaagcaatcctcctgtctcagctagctgggactacaggtgtgtcccaccaggctgggctaatttttgttttggttattgttttcggtttttttttagagatggggttttgccatgttgcctagattggtcttgaactcctgagctcaagtgttccaatcgcctcagcctcccaaagtgttaatattataggtgtgagctgctacacccagccagattctgtttttttgtttttgtttttgtttttgtgttgagatggagtctcgctctgtcttccaggctggagtgcagtggcaccatctcacctcactgcaacttccgcctcccaggttcaagcagtttgctgcctcagcctcccgagtagctgggattacaggcacctgccaccaggcccagctaatttttgtatttttagtaagagacggggtttcaccatcttggccacattggtcttgaactcctgacctcgtgatccacccacctcgggctcccagagtgctggtattacaggcgtgagccaccacacgcggccccagattctgttttttgtttttgtttttgtttttttgagatggagtctcgctcttgcccaggctggagtgcagtggcgctatcttggctcactgcaagctctgcctcctgggttcacgccattctcctgcctcagcctccggagtagctgggacttcagtcacccgccaccacgcccggctaatttttttgtatttttagtagagacggggtttcactgtgttagccaggatgatctcgatctcctgacctcgtgattcacccgcctcagcctcccaaagtgctgggattacaggcgtaaaccaccatgcccagccagattctgtatttttaacaagcaaccaggttgattcttattaggtgtgttttggaaatgctagactaagcaatgaaaacctcagaagtggagaaatgctagtcattattccaaaacctgtatgataaatgaactagtttcctgtggctgctgtaacaagttaccacaaacttgatggcttaaaactacataaatttattctctcacagttctgaaggccagaagtcagaaatcagtatcactgagctgaagtcagagaagtcaggatgtcaacctggcagggccagctctccctccggaggctctagggaagaattccctgcctcctccagctttcagtggctaccagcagcagcagtccttggtttggtttgtggctgcattactctaatctgcctccatggtcacatgaccttctcattagttattggagtgtttttttcctgtgtcagttttttttttttttttttggatagagtctcactctgtcactggagtgcagtggcgtgatctcggctcactgccagctccacctcccaggttcacaccattctcctgcctcagcctcccaagtagctgggattataggcatgcaccaccgcacccagctaattttatgtttttagtagagacagggcttctccacattggtcaggctggtctcgaactcctgacctcaggtgatccactcacttcggcctcccaaagtgctgggattacaggcgtgagccaccagtggcgcctggcctctgccttttatatataaggataatgtcctggctcggcgtggtggctcacgcctataatcccaacactttgggaggctgaggcaggtggatcacctgaggtcaggagttgaagaccagactggctaacgtggcaaaagcccatctctactaaaaatacaaaaattagctgggcctggttgtgcatgcctgtagtcctagctactcgggaggttgaggcaggagaatcacttgaacatgggaggcggaggttgtagtgagccaagatggggccactgcactccaacctcaggggacaaagtgagactccatctcaaaaaaagatgatgtgattgcctttaaggcccacctggataatccaggataatctcaaaatccccatctcaaaatccataattgaatgacatctgcaaagtcatttattgacatataaggtaacatttacagctcctaggaatttggatgtagatacctcctggggagccattgttcagcctaccacaataaacatcttaaaagtggcctggcctggctcagtggctcacgtctgtaatcccagcactttgggaggccaaggtgaaaggattgcctgagctcgggagttcaagaccagcctgggtgacatagcgagaccctgtctctatttaaaaaaacaaaaagcctgaatgtgattaaagaaaaaaaggaggctggacacggtggctcacgcctgtaatcccagcactttgggaggccgaggcgggcgtatcacgaggtcaggagatcgagaccatcctggctaacacggtgaaactcctctctactaaaaaaatacaaaaaatgagccaggcgtggtggtgggtgcctgtagtcccagctacttgggaggctgaggcaggagaatggcgtgaacccgggaggcggagcttgcagtgagccgagattgtgccactgcactccagtctgggtgacagagcgagactcagtctccaaaaaagaaaaaagggaacagatttctctttttttttttttttttttgagacagtgtcttactgttttgtcaggctggagtgtagtggcacaatctctgctcagcgcaacctccgcctcccaagtagctgggactacaggtgtgcgccactatgcccagctaattttggtatttttagtagagatggggtttcaccatgttgaccagtatggtctcaatctcttgacctcatgatccacctgcctcggcctgccaaagtgctgggattataggtgtgagccaccacacccggcctccccccctttttttttttctttttgagacagggtttggctctattgcccaggctggagtgaagtggcatgatttcagctcactgcaacctccacctcttgggctcaagccattccccacacctcagcctcccaagtagctgggactacaggtgtacaacatgtgcccggctaatttttgtattttttgtagagatggggttttgccgtgttggccaggctagtctcagattcctgagctcaagcaattcgaatgccaaggtgggcggatcacttgaggtcaggagttcaagaccagcctggccaacatggcaaaaccccttctctaccaaaaactacaaaaatagctggatgtgggggcgcacgactataatcccagctactcaggaggctgaggtgggagaatcacttgaacctgggaggcagaggttgtagtgaacagagcactgcactccaacctggttttgagaccctgtctcaaaaacaaaaaatagaattatatatatatatacacacacacacacgtatatatatttgaaatcattgagtaaacaattttgtatttgcattcagcattttgttcatttacaatataattaaaatttgagatactaatgaccaggtgagattctctaagtcctaggttttacaactagagtactgtctttgaaacagtctatttcatgtctttgcagctggctaagactttgagtgttttgactctttcctaagtctcaaaattacccaaacaagttatttattgtttaaagagtaagaaaaacagatgaagtttaaaaattaataagtagaagagtcttcttatagatgagaaagtagaagcactaaataggaaatatatttatttcttcaaatgtagtttatggagttacttattgagtacttactgtatgttagtatttttcttagcactttacattaatatgtttaattatatttgatagtttcattgtatattcctgaatatagagaggcaggagttaaaattgttgcttgatagtcttcttattattgtgcttcaaggcagacacattccttaattttagagcacttgaacttagatggaccactttcttggaaaatagggttttgtttttttttttggaagaagtttttttttttttttttttttgagacggttttgctctgtcatccaggctggagttcagtggcacgattactgcttactgtagccttgacctaggctcaagcaagccttctgcctcagcctcctgtgtactgagaccacaggtgtgcaccaccatatctggctattttcttttcttttttttttttcaatttctgtagagacagggtcttgttatgtttcccagggtggtcttgaattcctgggctcagtcagtcctcccgcttcagcctcctaaagtgctgggattatagacatgagccatcacatctggctgaaaagagttttctttttgaaataaactgtaactaaactataataaatcatgattaactcagtgacttacacaaagcagaatatagttgaatactataaaatgaaaattctagaattgaatactatagaattaaggtaatagcgttgcccaaagcagctgcttcaaaatgtatatagtatgtatgttaaatggacatgagtacctctttagacttaataatcttttgttatttttgttttgtttttgcattgtcttaagagaaaaaatgaaattatataaaacatgattttcatgaagatactggttttctttttctagcttaaagcaataaatgtagatcttcaaagtgatgctgctctgcaggtggacatttctgatgctcttagtgagcgggataaagtaaaattcactgttcacacaaaggtaaatgtgattttgtactttctattattttagccatttattatactacatatgtgatatgttgaccagacttgggttttaaacataattggaaagaaactattttaacaaaaatagatgtaggaaaatgtacttttttttttttttttttttttttgagacggagtcttgctctgtcgcccaggctggagtgcagtggcacgatctcggctcactgcaagctcctcctcctgggttcacgccattctcctgcctcagcctccagagtagctgggactacaggcgtccaccaccatgtccggctaattttttgtatttttttctttttttagtagagacggggtttcactgtgtaagccaggatggtctcgatctccaaccttgttatccgcccaaagtgctgggattacaggcgtgagccaccgcgcccagccaaaatgtactttttttagattaatattctgagaatcagaacctagacagaaggcaaatttaatttttttccaaatttttattagtatcttttaccattcttgttactttcaatttcattgttctttctgttagtcaaattactgtcttacaaataattattattactattttttttgagacggagtctctgtcatccaggctggagtgcagtggcatgatcctggctcactcactgcaacctctgcctcctgggttcaagcagttctcctgtctcagcctcctaagtagctgggactacaggcacaagccaccacgcccggctaatttttgtatttttagtagagatgggtttcaccttattgatcagggtggtctcgaactcctgacctcaagtgatccaacccacctcggccttccaaagtgctaggattacaggcgtgagccaccgtgcccagccacaaattattatttttattagatttcagttcttgagcacattttcagattgcagatttctttcctttgtttgaatagttgagtttgatatatattaatgacataacttttaagtaactgtagcagtacaatataataagcctgtcaacttactttcccaacaatccgaagataatcttgtccatatagctcagagttttatggtagacttaaaggacactaatggtcttgaaataagatgaatttttttaaatgatagaaaatatttattaaaaactttttaaggccagacacagtggctcatacctgtaatcccaacactttgggaggccgaggcaggatgatcgcttgagtccaagagttcaagaccagcctgggcatcttagtgagacctcatctttacaaaaaataaaattagccaggtgtggtgtagtcccagctactcggaggctgaggtgggaggattgcttgagcctgggaggttgaggctgcagtgagccgagattgttcgactgcactccagcctggtggcagagcaagacccagtttcaaaaaactttttagtgtaaatttgatttttattcaagaaaatctctatctttacagagttcattgccaaattttaaacaaaacgagttttcagttgttcggcaacatgaggaatttatctggcttcatgattcctttgttgaaaatgaagactatgcaggttatatcgtaagtattgagactccattttaattccattttctaggaggttttaggtacttcgttatgttttggaatcttgtttagcattttttgtgaactgtttttttgttttgttttgttttgtttttgagatggagtctcactctgttgcccaggctggagtgtagtgacgcagtctcggctcactgcaacctctgcctcctgggttcaagcagttctcctgcctcagcctcccaagtagctgggattacaataatgcaccaacacacccagctaatttttgcatttttagtagagacagggtttcaccatgttggccaggctggtcttgaactcttaacctcagatgattcacccaccttggcctcccaaagtgctgagattacaggcgtgagccaccgtgcccggccctgttatgttttttagagacagagtctcacttgtgttgctcaggctggaatgcaatggcctgatctttgttcactgtaacctctgcctcctggattcaggcgattcccctgcctcagtcacttgagtcgctgggattacaggcacccaccaccatgcccggctaattttttttgttttttaagtagagacgggatttcgccatgttggccaggctggtctcgaactcctgacctcaggtgattccccctgcctcggcctcccaaagttctgggattacaggcatgagctgccacactcagcctgatatgtttttttaaattgtcagttatgaaacgccgcactcagcctgatatgtttttttaaattgtcagttatgaaacatgtttcgttaccaccttttatcctgaagtgttttcttaggggatgtggggtatgttacattccctcatttaaacttaatttcttaccatttgttagaattgaaatgggcttgtcctagggattaaggagatgtgacaaaccatactggttttaaaaccatggttggggctgggcacggtagctcatgcctgtaatcccagcactttgggaggccgaggcgggtggatcatgaggtcaggagttcaagaccagcctggccaagatggtaaaacctcgtctctactaaaaatatttttaaaaattagctgggcgttgtggctggtgcctgtaatcccagatacttggaaggctgaggcagaattgcttgaacctgggaggcagaggttgcagtgagtcaaggtcccaccactgcactccagcctgtgtgacagagcgagcctccatctcaaaaaagaaaaagaaaaaaccatagttggacagatacttaagagttggaagtctcggccggccacggtggctgacgcctgtggctgggaggccgaggcgggtggatcatctgaggtcaggagtttgagaccaacctgaccaacatggagaaaccgcatctctactaaaaatacaaaattagccaggcatggtggcacatgcctgtaatcccagctactcgggaggcggaggcaggagaatcacttgaacccaggaggcagaggttgtggtgagctgagattacgccattgcagtccaggttgggcaacaagagcaaaactccatccccccaaaaaaaaaaaaagaagagttggaagtgtctttaagaggttaactagcccaggtgcagtggctcatgcctgtaatcccagcactttaggagcctgaagtgggtggatcacctgaggccaggagttcaagaccagcctggccaacatggcgaaaccccgtctctaccaaaaatacaaaaattagttgggcgtggtgtcgtgcgcttataatcccagctactccagcctgggaaacagagcaagacaccgtctccaaaaaaaaaaaaaaaaagattagataactttttttttttggagacagggtcttcctctatcacccaggctggagtgcagcggtgcgattttggctcactgcaacctccgactcccaggttcaagcgattctcatgcctcagcctcccgagtcgctgggattacaggtgcctgccaccagggccagctaatttttgtatttttggtagagacgggattttatcatgttggccaggctggtcttgaactcctgacctcaggtgatccgcccacctcagcctcccaaagtgctgggattacaggcgtgagccattgcgcctggccaaaacttaatttctacaactagtcaagttctccaatctgaatttgggtgttcctggtgttcagctcattctggatccccttagctttcccagacacagtcttctatggtggcagtagtacaatgcttcaagaaatgaaaatttccttaaaattagtcatttggtcctgttacagattccaccagcaccaccaagacctgattttgatgcttcaagggaaaaactacagaagcttggtgaaggagaagggtcaatgacgaaggaagaattcacaaagatgaaacaggaactggaagcgtaagtgatttttttatttttttgttttttttttttggttgttgttgcctttgttaattgtgcttgctttaatgccttttttggtgttttctgatatcccatcattaaaccctttctggaagatgcaggtttaagtcatacaaccagtattaatgatcatgatcagagcctacaggaaaattatagaataattgtttccactgtaaagttatttaaattcatatttgaaatagaccctgaaagttgaaaatggaagatccaaaagcttcttttaaaaaggtaaaaggtccagtctgtctttggacttaaggggaaaaagaaatagagaacatgactttttaaagtagaatagtcattgtttttttttttctatttacaaagccttagtcactaccaacctagttctcttttttcaatgtgggcatattgccatacttctcaaaagagaatgtactgagcaactgcatatattctgttttcttaaaaactgcgtatgtatgtagtgtgaattatcacagttttttcaagaaactaatacatttctagtatatatgaaactaatagtcatttaatgaaaaacagtttttaactattctttagttactttgcttctgtattcttttccctttgggcagaagccacaggcagagaaaagaagaaagggaaattatgtacaggttgagtatcacttatgcagaatccctgggagtgcattttggattttaattttttttttttggagtatttgcattatacttactggttgagcatccctaatctgaaatctgaaatgttctgatgaatatttcctttgagcatcatgtctttatttaaaaaatttcagattttggagtactttggatttcagattttcgggtagggatactcaacccatatttcgtttttagtgtatttgctgaaaacacagaatctttccccttttgttaaacatttggagtaattttggatttgctggatatgtttctctattttgagagttgtacaaggaaataattttccttagttatcacctctgtcactttttctggtcatttctccccttcatgcatttcctcttctcttcttccactagttttagtttttagttatatattcacactgctactatacttctcttcaggatgctaaactcttgaaaagataaatcagcaaagcaggtcttagttgcaagcagcggtctgatagcagacagatatatattcaaagtttataagactgaaaattggaaatgagcagagcacattaatatcgaagaatctgtgattttccagtggccctgatcatgattcttttgtggtctggttaggggttggataacagagaaccttgggtttattctactgctacctccatcctctgcatccttcttttttgtcttcactgaatgactaccctcacagagatcaaacttctcccatcattggtcctgctggtttgctggtatgtaaaacttatccttcttgcacgtagttgaagcaagaatatcaagccttttccttgaatgtttttttttttttttcccccaaactgacatgtattactttgtggtctctgggattcactgctggtattaaaatattttaaacacatttctttggtgtaatggcaaaaaaaattagtttcttcatagtgtgtttcttgtgtgtttgggtaattagatgaaaataattattaacgttgaaaatatgctcaccgaggtttgggttttaattttttttgtactaagttgtttaaaagcagtcattggatattgaatcattaagattctatcaaataatttgtagcacacttcctgtagagctgagaacaagcagccctatagttaactttaacatcaactcgcataagtaagaaaaatttgtaaaacttaaaaatattaacatttagatataaatattattaactggcatgaaacctttttcaaagctgggttttatgtatttcattaacagttcaactaaaaaccttgtttacatgaattatatctttgtatctctgatttgcattcggaataatccaaagagtattttctgaaaaaaattgttgcaggtgactttttagttgatggagttttttacctttaattttgtatattgtttctagtgaatatttggcaatattcaagaagacagttgcgatgcatgaagtgttcctgtgtcgtgtggcagcacatcctattttgagaagagatttaaatttccatgtcttcttggaatataatcaagatgtgagtatcacattgattggtggtcaagttttctttttcttcttcttcttctttttttttttgagacggaatctcgctctgtcttccaggctggagtacagtggcatagtggcatgatcttggctcactgcaagctccgcctcccgggttcatgccattctcctgcctcagcctccctagtagctgggactacaggcgcctgccaccacgcccagctaattttttctattttgaagtaaagatggtgtttcaccgtgttagccagaatggtctcgatctcctgacctcatgatccacccacctcggcctcccaaagtgctaggattacaggcgtgagccatagcgcccagcccaagttttttttttttttttgagacggagtctcgctctgtcagccaggctggagtgcagtggcgtcatctcagctcactgcaagctccgcctcccgggttcatgccattctcctgcctcagcctcccgagtagctgggactacaggcgcccgccactatgccctgctaattttttgtatttttagtagagacggggtttcactgtgttagccaggatggtctcgatctcctgacctcgtgatccacccacctcagcctcccaaagtgctgggattacaggcataagccaccgtgcccggccccaagttctctttttaaagagtcattggaaaaggcaagagtagttagaaaaggctcaaggtctttttttagaatgtttgtatttttctttttttttttttttttgagacagagtcttgctctgtcgtccaggctgaagtgccgtggcgcaatcttggctcactgtgacctcctcctcccaagttcaagtgattctcgtgcctcagcctcccaagtagctgggactacaggcgcatgccgccatgcccagctaattttttttttttttttaagacagtttcgctcttgtttcccaagctggagtgcaacggtgcgatctcagctcacccacaacctctgcctccttggttcaagcaattcttctgcctcagactctcaagtagctgggattacaggaatgcgccaccatgccaagataatttttgtatttttagtagagacggggtttctccatgttggtcaggctggtctcaaactcccagcctcaggtgatcctcccaccttagcctcccaaagtgctgggattacatgcatgagccactgcgcccggcctaatttttgtatttttagtagagatggagtttcaccatgttggccaggctggtctcgaactcctgacctcaggtgatccacctgcctcagcctcccaaagtgctgggattagaggcgtgagccgcacctggcctgtttgtatttttcaaggtagtttaagtgacactttttcagtagtaatgcagttatttcagtagaacttgagtagattaattgacagaatgatagttaagcatgttactagccaggcatggtggctcatgcctgtaacctgtaatcccagcactttgggaggccaagccgggcagatcacctgaggtcaggagttcgagacgagcctggccaacatggtgaaaccccatctgtactaaaaatacaaaaattatctgggcatggtggtgggcgcctgtaatcccagctactcgggaggctaagacaggagaatcacttgaacctgggaggcggaggttgcagagagccaagatggtgccattgcactccagcctgggggacaagactgaaattcccatctcaaaaaataaaaataaaaaataaatcatgttactacaagggacactgattttttttgtaatccttaattgcaaacctcttaagaagtaggagccaggcacggtggctcagcctataatccagcactttgggaggccgaggtgggcggatcacgaggtcaggagtttgagaccagcctggccaatatggtgaaaccccgtctctacttaaaatacaaaaattagctgggcttggtggcgcatgcctgtagtcccagctactcgggagactgaggcaagagaatcgcttgaccccgggaggcggaggttgcagtgagccaaggttgcgccactgcattccagcctgggtgacaaagcgagactccgtctcaaaaaaaaaaaaaaaaaaaaaaaagaaatagggttatcacattgactaatgtttcttaaatttgagtttggagtcttccgaagccttgtggagaattccaaggaggtgattgagctaaagaattccagattcgggtaaattattgactctggatctgtttaactgaccattggtgctgatcactccttattttttccttccctgcctaaaaactctctttttttttttttgaggcagagtctctgtcgcccaggctggagtgcaatggcactgtatcgactcagtacaacctctgcttcccaggttcaagcgactcctctgcctccacctcccgagtagccaccatacctggctaattcttatattttaatagagacagggtttcaccatattggtcaggctggtctcgaactcctgacctcaggtgatctgcctgcgtcggcctcccaaggtgctgggattacaggtgtgagccaccatgcctggccgaggtgattgcactttaaagatttcttcgttcatagtgctggcaaaaaattttttactgaatgactgatacaaatcttggaacctgtgtttggatgacaagattaattcataatttttgcagaaaataaatatagcatagtgctcatgtacaggttaacctcaagatcaaagaatttgggccagttgtagtaagtcacacctttaatcccagtactttgggagcctgaggcaggaggattgcttgagccaaggagttcgagaccagcctgggcaacatagtgagacctgtctctttttaaaaaaaaaaaaaagaagaagaagaaagaaaaatgccgggtgcggtggctcattcctgtaatcccaacacttgggaggccaaggcaaggtattcacttgaggccagtagttcaagaccagcctgggcaacatggtgaaacccctgtctctactaaaaacgcaaacataagctggacgtggtggcgcttgcctgtaatcccagctacttgggaggctgagacatgagaatcacttgaatgtgggaggcggaggctgcagtgagctgagattgtgccacagcatgggtgacagagtgatattctgtctcaaaagagaaaaaagagaaaagaaactaaaatttttgagtaagaatgagatgctcaaaatttgattttagaaagctgtcccaggcaacagaatggattggaataagataagaattattaactaatacttcagtctaggaaagagatgatgaagacttttactggagagtaggagtggaaagggacagttttaagtcatttgctgttagaatttgagctatgaagaaaggaagaagttataaaaatttcaagattttaatgagaactatggaattttagggaacatgtcggagtcagaaagactgtttggatgaaggggccacagatcaaaagagggaagacagaaattttggagatcagattttttttttttttttttgagacagagtcttgctctgttgcccgggctggagtacagtggtgtgatctccgctcagtgcaacctctgcctcccaggtgcaagcgattctccagcctcagcctcccgagtagctgggattacaggcacatttcaccatgcccggctaattttttttttttttttttagacagagtttcgctcttgttgtccaggctggaatgcaatggcgtgatattggctcatggcaacctctgcctcctgggttcaaaagattctcttgcctcagtctccctagtagctgggattataggcggatgccacgacgcccagctagttttagtatttttagtagagacaggatttcaccatgttcttcaaggctagttttgaactcctgacctcaggtgattcacccgccttggcctcacaaagtgctgggattacaggcgtgagccaccgtgcccagcccagagattagattataatgagcactgtgttagactcatctaatgtgaggttacagttacagtctctgtgtaaggaaatgatgtgggcaattggatataacatataaagttaaggaaagagcttatgggtagtattctagtctgtttggctgctataacaaaataccttagactgggtaatttataaacaacagaatttatcatttacagttctggagaatgggaagcccaagatcagggtgctagcagattgcgtgtctggtgagggccctctgcttcataggtggccctttttgttgtgtcctcacatagcagaaggaaggggcaagagggtaacattccctcagcctcttttataaggactaatcccatttatgaaggctctaccctcatgacctaatcacttctcaaaagccccacctatttttaagagacagagtcttgctgtattgcccaggctgaaatgcagtggctattcacaggtgcagttgtagcacattgcagcctcaaactcctggcgtcaaatgatcctcccacctcagcctcccaagtagctgggactccaagcaggagccactgtgcctggctcaggcccacctcttcttaattatgattaccttgggggttaagcttcaagatatgggccagtcgtgatggctcatgcctgtaatcccagcactttgggaggccaaggtggttggatcacctgaggtcaggagttcaagaccactctgaccaacacagtgaaatcccatctctattaaaaatagttgggcatgatggtacatgcctgtggtcccagctactcgggaggctgaggcaggaaaattacttgaacccagaaggcagatgttgcagtgagccaagatcacgccactgcacttcagccttggatgacagagggagacagtgtctcaaaaaaaatttttttcatcctgtgaactttagggggacacatacattcagaccatagcaggtagtgatagagatctgtgagtcatttacataaaggtgagcattgaagcaatggaagtacatgggaattagatgaattgctcctttatggggcaccctgatacagcaagtgctaggagtcaaagagttagctgctgcttgttggttttgcccttggataaccattcatttgttcaaagtcatcttttttgtgtcccttgtgctattaattgctgaccccaaaagccagatgagatacttggatgagttcagagttccaaatgtataggatatatattcagagttattgcggaatcatacagtggtatattgtgccccaataaatttcacatgtttaaaggaactcccgagctaaaattttaattgtctgttaaaattttatatagcagtgtttgacaaaatatggtgagagggctgcttgcaacagaattatcagatatgctcataaaatgtgaaatatctaggccttcttgtagaccagctgaacctgaatctttgagagtgagtcctgaatatctatattattaccaaactccttttttatgccctaaaatttgaaaatcattgatgtgcatgatgaaatttccactttattaagattaaaaactaggatccttttgagattgccatttaaatatcaaagaataaaggaggcactgctttccatttgtaaccttaaaaatgttaaattacctttctttcagttgagtgtgcgaggaaaaaataaaaaagagaaacttgaagacttctttaaaaacatggttaaatcagcagatggagtaatcgtttcaggagtaaaggtaagattttatttgattaactgtggtattagttgagacttcttttaaaagggagatagattgagatttcaaatgtgcagaattagagtaaaagacatttggacggttagaatcttcagtcctaggaacaggaggaatcctcctgacctagattcctctctttagagcgttcccttctgcaacggatgagaagtcttaagccaagggaatttgcccaactgaagcccacaccccttcccttcacatcagaccaggttccaggtttctagaatccgctgtctccctacccaaatcccaagccttgcagttcctatatgggcaacttcctgagttcatgccattcacgtgtattccatgagtggttaaggggttaccatggggcaggtgggtggaggggagggacagtgtgcaatgtggaatgtccacccacatgcacatgaagtcctcctagatgcaggacagacagagctgcagagtttaccaagaggtactgcttctgtttttacatttaacatttagccttggaaatgttaggggcagacctaggttcagctttggagttagaagatctcagttgaggccgggcaaggtggcccatgcctgtaatcccagcactttgggaggccaaggtgggtggatcatttgaggtcaggagttttcgagaccaacctggtcaacatggtgaaaccccgtctctactaaaaatgcaaaaattagctgggtggtagtcctgcgtgcctgtaatcccagctactcgggaggctgaggaacctaggaggcggaggttgccgtgagctgagattttgccactgcactccagcctgggcgacagtgagaacctgtctctgttgtccttgggaaaagttactttcttttctttttctggatctcagcttttccattttctctctctctcttttttttttttcctgagatagagtcttgctttgttgcccaggctggagtgcagtggcataatctcggctcactgcaacctccgcctcccaggttcaagcaattctcctgcctcagcctcctgagtagctgggattacaggcacatgccaccacgcctggctaatttttgtatttttagtagaaacggggtttcaccatgttggccaggctggtctcgaactcttgacctcgtgatctgtctgcctcggcctcccaaagtgctgggattacaggtgtgaaccactgcgcccagccagattttccattttcaaaatagggttaataataccacccaccttacttacttattaaaaagattgaatgagataatatgtgtggaaaacacctatatttttcttttttcttttttttttttggagacagaatctcactctttcgcccaggctggagtgcggtggcgcgatcttgggctactgcaaactccgcctcctgggttcacaccattctgcctcagcctccggagtagctgggactacaggtgcccgccatcacgcccagctaatttttttgtatttttagtacagatggggtttcaccatgttagccaagatggtctccatctcctgacctcgtgatccgcccaccttggcctcccaaagtgctgggattacaggcgtgagccaccgcgcccggccgaaaacacctatacttttcttaatgatgttctaaaaatggtataagagttgatttatctgaagattcttaccattaaaatatgagaaaaatgtttatattatcaagcaaatactaggaaaaaaaagaatgctgctttgtcatcattgcctgtttttatagacacatccataataaaatcggtgtgtagagtactatttgatttatactctgatttttcagagacaggtcagtggatacttgacagtgcatgtgctgtggctgctttccaagaagcactcagcttacttccatttgatgctgcttatgcattaatatcaaccatttttcttagccattaaatgtaaaccactatgttgattataattttgataattttattaatagaataataacatttttgaacacttataatgtgttgattggtagcccacattttcttgtgtgatcttaataaccctgccagttagttttatccatatttttacaattaagaaaactgtggccgggcacagtggctcacgcctataatcctagcactttgggaggccaaggcaggcagatcacctgaggtcaagagtttgagaccagcctgaccaacatggagaaaccctgtctctactaaaaatacaaaattagccaggcatggtggcacgtggctgtaatcccagctactcgggaggcttttgaggcaggagaattgcctgaaccccggaggcagaggttgcagtgagccaagattgtgccattgcactccagcttgggcgaaagagagagagggaactgttacatattatgaattatgaattttattttaatatttattttttattttattttgcattttgagacagggtcttgctctgttgccttaggctgctgtgcagtgccccaatctcggctcactgcaacctctgcctcccaggctcaggcgatcctcccacttcaacctcccaagtagctggaactataggtacgtgccatcacacccagctaatttttgtattttttgtagagacagagttttgccatgttgcccaggctgaactcctgggctcaagtgatctgcccacctcggcctccccaaagtgctgggattacaggtgtgagccactgtatccagctgaattacagatttcagtcacattttgtcagtactgactcttgctgcttgtgttctgttgatatgggtctccaattatatcctgtcagcagatgctttttcatttaatgattggtaatgtagaagggggtaaaatactattaattttatttttgtgccaggtgcagtggctcactcctgtaatcctaacactttgggaggctgaggcaggtgggtcacttgaactcaggagtttaagaccagcctgggcaacatgacaacatgacaaaaccctgtctctataaaaaatacaaaaattagcttggcgttgtggcatgcgcctgtagtcccagctacttgggatgctgaatcaggaggattgcttgagccagggaggttgaggctgcagtgagccatgtttgcaccactgcagtccagcctggattacaaagcaagactctgtctgaagataataataataatttttatttttaatgtatatctagctttgtttcaaaaaaaaaaaaaaggttgaagacagtggttaatcacattgttgctctcagatagtttggtcaggttcctcagtgcagtcagaaagggccttaatgactaaggctaggcagccttcaggaatggccagtagaatgtataacaggccaagaaaaatagattttcacttctgtccaccagaactgttttctttttccttaaaaggaattgatcacttctgctggcaataatatgtttattgaagagcaaaattgtagaggcagatcacaaataagaacatgtttcagagtacaatatgtgaggccaagtgcggtggctcatgcctgtaatcccagcactttagcacgttgggaggccgaggcgcgcggatcacttgaggtcagaaacttgagaccagcctggccaacatggcgaaaccctgtctctactaaaaaaatacaaaaattaggctgggcgtggtgggtcacatctgtaattccagcactttgggaggccgaggtgggcggatcatgaggtgaggagttcgagaccagcatgaccaatgtggtgaaaccctgtctctactaaaaatacaaaaaaaaaaaaattagctgggcgtggtggcgcttgcctgtagtctcagctactcaggaggctgaggcaggagaatcacttgaacccaggaggctgaggttgcagtgagccaagatcgcgccactgcactccagcctggtgacagagcgagactttgcctaaaaaaaaaaaaaaaaagaaaagaaattagctgggtgtggtggtgtgcacctgtagtcccagctattgggacgctgaggcaggagaatcgcttgaacccgggaggcagaggttgcagtgaaccaagatcacgccactgcactccagcctaggtgacagagtgagactccatctcaaaaaaaaaaaaagagtacagcacgtgaacttggacctatatggggagcactaagccttcagttgcaaagtcatagaagatttcttacttgatagatagaaatgcatgtctattaaagtcttgttggtgaaattagtataataacatctgactgaggataggtatgctattttactgatgatcttttatatttataatgatagttatttacatataaaactaaagcaaataagtgaaaaaagtttatattttcttttgatcttataggatgtagatgatttctttgagcacgaacgaacatttcttttggagtatcataaccgagttaaggatgcatctgctaaatctgatagaatgacaagatcccacaaaagtaagatttttctgtggctaaagcttatatcttttaatggaataattataaagttcatattatagtttgaaaaagtcttaatatagagcagtagttctcaaactggtctgttggagcctaggctccatggcccttttatagtgagcctgtgaggtcaaaactattttcagctgggcacagtggctcacgcctgtgatcacgacacttttggaggctgaagcgggaatatcacttgagcccaggaattcaagaccagcctgagcaacagagtaagatcctgtttgtattgcaccagcctgatataaaaaataaaattagccagacgtggtgccgcatggctgtggtcccagctactaggaaagctaaggtgggaggatgccttgggcctgggaggttgaggctgcagtgagctgtgatggatcgtaccaccatacttcagtctgggtgacagagtgagactgtctagacagcaacaaaacaacaactatttttataatgatactgtgatagtttttgcctttttcaccatgttgacatttacaccgatgatggataaagttgctgctgcgtaattacatacaaatcaagtcagtggcaacaaactggacgagtagtctctatattctttccggccatgcacttgctcttttttttttctttgagacagagtctctatcgcccaggctggagtgcagcggtgcaatctcagctcactgcaacaacctcagccgcccaagttcaagcagttctcctgcctcagcctcccaagtagctgggattacaggcacctgccaccgcgcctggctaatttttgtatttttagtagagatggggtttcacagtcttggccaggatggtcttgaactcctgacctcatgatccacccgccttggccttccaaagtgcagggattacaggcgtgagccaccgcacctggccacttgcaatttttaagacatgtgactttcacttaagaatgcccttgatgaaacagtaaaaattgattgtaatctctacccttgggtatacatttttaaatattctgagtgatgaaataggaggtatgcataaagcactttggctacatactcaagtatgatggttctctagaaaagcattttagtgatagagttgtgattgaactagctaattttttcgtagaacactacttttactttagagaatgactgataaactgtttatgaatatttggcaaatgttttctcaaaaatcaactaattatttaaattagaggaacctggccaaaaatccatcagttatttcaaggaaaacaaaggtagtatttgttgccaatgataagtcaagcttcaagcaataattcgaattttggaaaactttatctctctgaccatgagcttacttcccaatagatactggactggtagtctgtatgttctttcctgccatgcacttgcaatttttttttttgaggcggagtctctgttgcccaggctggagtgcaatggtacgatctcgtctcactgcagcctctgccactgccattgccaggttcaagcaattctcctgcctcagcctcccaagtagctgggattacaggcgcctgccaccgtgcccggctagatagaccaataaagacccatatagagattgatgatgatactagtgaatgtgattttttaaaaaattgtacattgaattgtgtcaccacttagaacatctgcataattcattggaccaatgttttctaaacggccaagtgcataatgctacaaaatcatatatgtaaaagaaccactcaaagtgcaaaatagaccagtgagggttttttttttaacagctttgttgagtgtaattgatatcagtaagctgcagtaatcaaagtgtacaatttggtaagttttggcatgtgtgaaatccttaccacaatcaaaataatgaacacacacatcacccccaaagttttcttgtggccctttgaaatctctccctcctgccctatccccaggcagccactgatctgctttctgtcactatagattagtttgtattttttagtattttatataaattgaatcatacagtatgtattctttattgtctggctttgaaactcaaaaaactattttgagattcatccaagttgttgtgtatatcgatagttcatttctttttgttgctaagtagtgttccattgaatggatatacaacaattatttatttctagctttggctattacagatacaatttatgtgagccatttctatataactttttgtacggacatgctttctttctcttgggtaatacctagaagtagaatgcctgagtcatgtggtaaatgaatatttaactttttaagaaactaccaatttttttttccacaatggttgtaccattttgcattcccacgagcagggcatgagagttccagttgctccacatctttgccaacaaggatagtcagtcttttttttttccccagtggaatttgaagtctttttaactttattcaagtaggtcagtggtggtaactcagtgtggtttagatttgtattgtcctaatgactgttgaggttcaacatcttttcttgtgtccttcttccttcagctttattctttttttttttttttgagacgaagtcttgctctgtcgcccaggctgctggagtgcagtggcggaatcttggctcactgcaagctccacctcctgggtttacgccattctcctgcctcagcctcccgagaacctgggactacaggtgcccgccaccacgcccggctaattttttgtatttttagtagtgacagggtttcactgtgttagccaggatggtttcaatctcctcacctcgtaatctgcccacctcagcctcccaaagtgctgggattacaggcatgagccactgctcctggccccagctttattcttgttgttgttgttttttgttgttgttgttgagacagggtctcgctctgtcacccaggatgagtgtattggtgcaaacatggctcactgcatcctcaatcgatccttccacttcagcctgccaagtagctgggaccacaggcatgcgccaccatgcgtggctaatttttgttgttgctgctgagggggtagagacagggtcttgctatgttgcttgggttggtcttgaactcctggactcaagcagtcctctcaccttggcctcccaaagggctgacatgagccaccagactccatttttttttttccctagacagagtctctctctgtctatccaggctggagggcagtggcacaatcttggctcactgccccacccccgtctcgtgggttcaagtgattctcatgcctcgaccttccccataggattacaggtgtgtgtcaccatgcctggctatcttttgtatttttttttagagatggggttttgccatattgcccaggctggtctcgaactccaggtttgaagtgatccgcccacctcagcctcccaaagtgctgggattacaggcgtgagccactgtgcccaatcccaactttattatttatcacagttgtttttgacccttcttagaatctttatgttttctttgttttttgttttgttttgtgtttttgtttttgtgagacagagtctcattctgttgcccaggctggagtgagtggcgtgatctcagctcactgcaacctgcacctgctgggttcaagcagttctgcctcagcctcatgagtagctgggattacaggcacataccaccaagcctggctaatttttgtatttttagtagagatggggtttcaccatgttggccaggctggtctcaaactcctgacctcaggtgatctgcccacctcggcccccaaagtgctgggattacaggcgtgagccaccgccctcagccctagaatctttatattttctttttccttttattgatacagaatctcactctgtcaccaagactggaggctggagtgcagtgacgtgatcttggctcactgcaacctccgcctcacaggttcaggcaatcctcgtgcctcagcctcccgagcagctgggactacagatgcatgctaccacacctggctaatttttgcatttttagtagagacagagttttgccatgttggccaggctggtcttgaactcttgacctcatgtgatcgacctgcctcagcctcccaaaggagggagcgattacaggtgtgaaccactgccctcagccctaaaatctttatattttcatatgaattttagaatcagctgtctttttcaacacaagggcctgctgggattttgattgggattgtgtagattctatagattaatttggagagaactggcatcttaacaatattgatccttctgatacattaatatagcatatttccactgactcaggtcttcgttaatttatctcagcagtgttttgtagttttcattgtatagatcttatacatctttagtcagattggttcctgattatttggttttttatgctattataagttttatgttttattaggctggagacagtgactcaaacctgtaattccagcactttaggaggctgaggtgggtggatcgcttgagctcaggagttcgagaccagcctgggcaacatggtgaaacccaatctttgcaaaaaataggccgggtatgttggctcatgcctgtaatcccagcattttgggatgctgaggcaaggggatcacattaagtcaggagttcgaggtcagcctcgcccacatgatgaaaccacatctctggctgggcgcagtgactcacacctgtaatcccagcactttgggaagctaaggcgggccgatcacaaggtcaagagatcgataccatcctggctagcacggtgaaaccctgtctctactaaaaatacaaaaaattagctgggcgtggtggcgggcgcctgtaatcccagctactcaagaggctgaggcaggagaatgatgtgaacctgggatgcagagcttgcagtgagctgagattgtgccactgcactccagcctgggtgacagagtgagactctgtctcaaaaagaaaaaaaaaaaagaaaccccatctctactaaaaatacaaaaattagctgggcatggtggcatgcccctgtagtcccagctacttgagaggctgaggcacgagaatcacttgaacccgggtggtggaggttgcagtgagccaagaccccaccactgcactccagcctgggtggcagagtcaggccttatccctcccccgccaaaaaaaaaaaaaaaaaaaaattagccaaccgtggtggcatgtgcctgtggtcccagctacttgggaggctgaggtgggagaatcacttgagcccaggagcttgagactgcagtgagccgtgatcatgccaccgtgctcatgcctgagcaacagagtgagaccctgtctccaaataaataaattttgtttgtttgtttgttttgagatggagtctagctctatcgcccaggatttttgtctccaaaatcttagatgcccttttttttttttttttttttttttttttgagatggagtcttgctctgtcgcccaggctggagtgcagtggcacgatcttggctcactgcaacctccacctcccgggttcacgccattctcctgccacagcttcccgagtagctaggactacaggtgcctgccaccacactcggctaattcttttgtatttttagtagagatggggtttcaccgtgttagccaggatggtctcaatctcctaacctcatgatctgcccgccttggcctcccaaagtgctgggattacaggcatgagccaccgtgcccggccatgttatgttttttaaaatttcaatttcaaattgttctttgctaatacatagaaacacagcatatttttttcaatattgatcttatatcctgcaaccttgctaaataaactcacttattagttctagtaattattttgtagattccttaggatttttacatagatgatcatgtcacgtctattaatgaagaaagttatacttcttattttccagttgtttttttttttttttttttttttttgagacagagtcttgctctgttgcccaggctggagtgcagtggtgtgatctcggctcactgcaacctccgcctcccgggttcacgccattctcctgcctcagcctttccagtagctgggactacaggtgcccactaccatgcccggctaatattttgtatttttagtagagacggggttttaccgtgttagccaggatgatcctaatctcctgacctcatgatccacctgccacggcctcccaaagtgctgggattacaggcatgagctactgcgcccgacctccaatttgtttttttgtttgagacggagtcttgctctgtcacccaggctggagtgcggtggcgtgatcttggctcactgcaacctctgtgtcctgggttcagatgattctcctgcctcagcctcccgagtagctgggattacaggcatgtgcaaccacacctggctgatttttttatttttgatagagatgggatttcaccatgttggcccagctggtctcaaaactcctgacctcaggtgatctgcctgccccagcctcccaaagtgttgggattacaggcatgagccaccatgcctgttgcttgcgttattttctttactagagtgtctcatattacacattgtttgagaggtaattgctcagtaagtatttttaaatctatgaataggtatactaaattcttaaaactttctccataggtgctgcagatgattacaatagaattggttcttcattatatgctttaggaactcaggattctacagatatatgcaagtaagtgttctaatttaaaacgtgaaataggctgggcgcggtggctcacgcctgtaatcccagcactttgggaggcgaaggtgggtggattaagaggtcaggagttcaagaccagcctgaccaacacggtgaaaccccgtctctactaaaaatacaaaaattagccaggcggggtgacacacacctgtaatcccagctactcaggaggctgaggcagggattgtttgaacctgggaggcagaggttgcagtgagctgagattccacctttgcactccagcctgggcaacagagtgagactccatctcaaaaaaaataaataaataaaacatgaaatatagctgggcacagtggctcatgcctgtaatcccagcactttgggaggtggaaaacctgaggtccggagttcaagaccaacctggccaacattgctaaaccctatctctaccaaaaaatacaaaaattacccaggtgtcggtggtgtgtgcctgtaatcccagctagctactcgggaggctgaggcacaagaatcacttgaacccgggaggcggaggttgcagtgagccaagatcatgctgctgcactccagcctggtgacagagcaagactatctcaaaaaatatatatgaaatataaataaagcagagaaaattttctattggcagcctggatgcacacaatacttttggtttttgttttagtttttgttttgaaacagggtcttattctgtcacccaggctggagtgcagtggcacgatcatggctctctgcaacattctccttccacgttcaagcagttctcccacctcagcttccaaagtagctgggattacaggtgcctgccaccatgcctggctaattcttgtatttttagtagagatggggtttcaccatattggccaggctggtctcaagcccttgacttcaagtggcctgcccgactcagcctcccaaagtgctgggattacagcctgtgagccacttctcccggccaacaatacttctaatacaaaacttttggaatatttttgtcaaaacacattgataataaggacctcctttaaaaacttgggttgagggctgggcatggtggctcacgccagtaatctcagcactttgagaggccgaggcgggcagaacacctcaggtcgggagtttgagaccagcctgaccaacatggagaaaccctgtctccactaaaaatacaaaattagccaagtgtggtggcaggtgtctgtaatcccagctacttgggaggctgaggcaggagaatcgcttaaacccaggagacgaaggttgcgttgagccgagatcacagcattgcactccagcctgggcaacaagagcaaaattccatctcagaaaaaaaaagaaaaaagaaaaaacttgggttgatattttttcttctccctttctgtcctattttttaaatctgagaaataaaaatcgactttactctctctctctatatatatttttttttcttcctccccaactgtgttttatttatgaaaatgggctgatttgtgtgtaagagagtggaagaaccgaatttatgttagagtgttcttaagttttgataaagcttataaataagaactgccatttgggaattagaatatatatatatgtatgtatgtatgtatatgtgtttatgtatttcattgaaggtgaaattgattctgccacccgccccccggaagacggtgtcttgctctgtcacccaggctggagtgcagtggcgtgttctctaaaaacacaaaaattagacatggtggtgtacacctgtaatccctgctacttgagaggctgaggcgtgagaatcacttgaacctgggaggcagagattgcagtgagccaagatcacaccactgcaccccagcctgggcgacagagcaagacttggtttcaaaaaaactaaaaattaaacatatttttaagcaggaaaactattttcatagtctatgcctttctctaaaccacatccttgaccttttctctagtgtattctgtctcagatatttaaaagtcacgctttttggcaaagcaaggtatgatagcttacactaattaaaatgccaccagccgggcacagtggctcacacctgtaatcccagcactttgggaggccaaggcaggtgaatcacctgaggtcaggagttggagaccagcctgaccaacatggagaaaccccatctctactaaaaacacaaaattagcctggcgtggtggcgcatgcctgtaatcccagctactcaggaggctgaggcaggagaatcgcttgaacctgggaggcagaggttgcagtgagccgagattgcgccattgtactctagccttggcaacaagagagaaactccgtcttaaaaaaaaaaaaaagccaccttcccaaagagttaattcttcttatcaggaagaaggaaaaaagtcaaccttgccatctgttctctaacgtaaatctgtcaaagcaagttcttttgagtgaaagcaaagttcgtaaaattgtttttgctttgagtagtatttgccctaattcatttatgatgtcattttaattacatattttacagaatacttgaacctgtgcccttttttgttttttgagagtggatcttgctgtgtggctcaggctggcatacagtagctattcgcaggtgcagtcatagagcactgcagccttgaactcctgtgctcaagcaatcctcttgcttcagcctcctgggtagctgggaccataggtttgtgccagaacggggtgacagaatgatagcccatctcaaaaaaaaaaaaaagaaaaaaatgaataaccaatttctacttaagaatttattttcacttttaactaaatagtttatctgtcaaatgctgataccaactaaaaaatatcccagcaccagactattttttttgtagttgttcttgagacggagtctcgctctgttgcccaggctggagtgcagtggctcagtcttggctcactgcaagctccacctcccgggttcacaccattctcctgcctcagcctcccaagtagctgggactacaggcgcgtgccaccacgccaggctaattttgttttgtatttttagtagagacagtgtttcaccatgttacccaggatggtctcgatctcctgacctcatgatcctcccacctcggcctcccaaagtgctgggattacaggcatgagccaccgcacccagccaaacaccagactattaaagggtagtttaattacaggattgcaccatcgtgccccactaattttttgtatttttagtagagatagggtttcactgtgttgcccagactagtctcaaactcctggcctcaagtgagctgcttgcctcagcctatttgctacaatgaatctagataaattttgttggctgggcacagtgactcatgcctgtaatcccagcactttgggaggccaaggtgggcagatcacttgaggccaggagtttgagaccagcctggccaacatggcgaaaccccatttctactaaaaatacaaaaattagccaggcttggtgagcacctgtaatgccagctacttaggaggctgaagcaggagaatcgtttgaacccaggaggtggaggttgcagtgagatggcgctactgcactgcggctggggcaagaaagcgagattcagtctcaataacaacaacaacaacaaaaacacgtttaatgtatggcttaggctgtcatcttgaaatggggcccagcactctggctcacacctgtaatctcagcagtttgggaggccactgcgggcagatcacttgagatcaggagtccaagacgagcctgggctcaagccatcctttcaccttagcctcccgaatagctgggactacaggtgtgcaccaccacacctggctaatttttaaccaggtgaaaacttgtttctactaaaaatacaaaagttagccaggcatgggggcagctgcctgtaatcccagctactcaggaggctgaggcaggagactcacttgaacccaggaggcagaggttgcagtgagctgaggttgcaccgctgcactctggcctgtgcaacagagccagactctgactcaaaaaaaaaaaaaaaaaaatcagggccgggcgtggtggctcacacctgtaatcccagcactttgggaggccgaggcgggcggatcacgaggtcaagagatcaagaccatcctggccaacatggtaaaaccccgactctactaaaaatacaaaaattagctaggcgtggtggcgggcgcctgtagtcccagctattcgggaggctgaggctggagaatcgcttgaactcgggaggcagaggttacagtgagctgagattgcgcagttgcactccgttctgcgcaacaagcgtgaaactccatcgcaaaaaaaaacaaaaatcaaatgaacagatagtctatctgtaaacagatttcaagtaatcagttttattggtagaagtacagggagatttttgtcaaactaaatgaagtctgcagttaataaggctattgaatataactgcaatgagacaaggtgttattaatatggtttgggagcatattctcatacatttgaaatggaaaattactttgaatgtagaatatgatgaaaatattttcctttccaggttttttctcaaagtttcagaactgttcgataaaacaagagtaagtactaaattatagagatatactgcataatattgtgcccagagagagctcatgttaaaggtttttaccacaattcagaaaatttttttaaaagagtgatcactattggccaggcacgtggctcgtgcctgtaatcccaacactttgggaggccaagtggggcggatcacgaggtcacgagatcaagaccatcctggccaacatagtgaaaccctgtctctactaaaaatacaaaaattagttgggcgtggtgacgcatgcctatagtcccagctacttgggaggctgaggcacaagaatcgcttgaacccgggaggccaacgttgtagtgagccaagattgcaccactgcactccagcctggcgagagagcaagactctgtctcaaagaaaaataaaaagagtaatcactgttaaccgtttggcgatttaaatctctgcatgtggtaatatttaacttgctatggttctgtttaactctattgaggaagatgagtgtacttcagaaggatgatgaaacagatttggattccattgggagtttttcaggaaattccattttttgttattgcctttaagtatttgtatgaaagttcatattcttctgtgtgcagtgacttaacgcttgtaatcccagcactttgggaggctgaggcaggaggatctcttgagtccaggaatttgagatcagcctgggaaaacatagcaagacgctgcctctacaaaacgtttaaaaattagctaggtgtggtggtgcaaacctgtagtcctacttgggaggctgaggcaggaggatgcttgagctcaggagtttgaggctgcagtgagctgtgaccgtgcatctgcactccatcctgggtgacagagtgagaccctgtctctaaaaaaaaaaaaaaatggaatccctcctggaacagataaacaaattaattaaatactatataccaataagaataaaggaaccaggccaggtgggtcacgcccataatgccatacattgaagggtgaggtgggaggatcagtagaggccaggagttcgaccagcttgggcaatgtagcaagactccctctctacaaaagttaccaaaaattagccaggcgtggtggcgcacaactgtagtcctaactacttgggaggctgaggcaggaagattcttgagcccaggaggtcaaggttatagtgagttatgattgtgccagtgtactccagcctgggtgacagagaccctgtatcaaagaaagaaagaaaatgaatagaaaattaccagcaacccagatgccctgtctcctcctcatctcctcagctgcctttcaaggcactgccagtgagatttgggttttttgttttgttttttgtttgtttgtttgtttttgagacggagtcttgctctttcacccaggccggaggctggagtgcagtggcacgatctcggctcattgcatccttcgcctcccaggttcaagcgattctcttgcctcctgagtagctgagattacaggcatgtgccaccacgccaggctaatttttgtatttttagtagagatggggtttcaccatgttggctaggctagtctcaaagtcctgatgtcaagtgatctgcctgcctcggcctcccaaagtgctggaattacaggcatgagccactgtgctcggcccagccccttttttatttttatatataatataaatgcatgtgcaacatgtattatttttctttcttttttttttttttggtagagacagggtcttgctatgttgcccaggctggtctgaaactcctggcctcaggcagtcattctgcctcagcctcgcaaagtgctggaattataggtgtgagccactgagcccggcttatattcttttatgtctgtttcttgtactcaacattatattcataggattaaaccatgttgttgcacatagatgtagttcctttattctttttgttttagagacggggtctcactctgtcggccaggcgggagtgcagttgcatgatcataactcattgtagcctcaaactcttgagctcaagcatcctcttgcctcagcctcccaagtagttaggactacagatgtgtgttaccatgcctggctaatttttgtagagagggagtctcactacattgctcaggctggtcttgaactcctggcctcttttgatattcctgcctcacccttcaaagcattgggattacaggcatgagccacctggcttggttcctttattcttcttgcggtatagtattttattaatttgtttatctgttctgctgttgataggcatttggatagtttctagtttgggcttctttataacaatactgctaagattattgtttatcttctgaacacaagtatacaattctgttgggtatatataactaggaggggaattgatggatcatatgataaccacgtgaaaagcttcagcagaaactgcaaaactttcccataatgattgtaccaatttgcatgcccacaagaatgagtatgagcatttaggttgttctacaagcttgttaaaacttagtattttacctttataatttttgtcattctggtaggtgtatagttgttttagtttaacctttttttttttttttttttttttttttttgagatgaagtctcgctctgtcgccaggctggagtgcagtggcgcgatcttggctcactgaaacctccgcctcccaggttcaagcaattcgcctgcctcagcctcccgagtagctgggactacaggtgcacgcctccatgcccagctaatttttgtatttttagtagagatggggtttcaccatgttggccagggcggtcttgatctcttgacctcgtgatccgctcaccttggcctcccaaagtgctgggattacaggcatgagccaccgcacctggccccttaactttttttttttttttttctttttgagacagatctcactctgtcacccaggctggaatgcagtggcatcatcttgattcactgcaacctccacatcccgggttcaagtgattctcctgcctcagcctcccaagtagctgggattacaggcacacatcaccatgcccaactaatttttgtactttagtagagatgggtttcaccatgttggccaggctggcctcgaactcctgacctcaagtattccacccacctcagcctcccaaaatgctaggattacaggcatgagccttattaaggtgccagccttactttaattttttattttggcggtaatttcagacttacagaaaagttgcagaaaatagtacaagaatccctgtaatgcatcatccaggtttctgaatattaacattttcccttttgtatttttgtttgtttgtttgttttgagacagagtcttgctctgtcacccaagctggagtgcagtggaacgatcttggctcactgcaacctttgcctcctgggctcaagtgagtctcatgcctcagcctcccaagtacctgggattacaggcattgctgccactcctagctaatttttatgtagagacgggggggtggggtttcaccatgttggccaggctggtctcgaactcctgacctcaaatgatccacctgccttgtcctcccgtagtgctgggattacagatgtgagccactgcacctggccaatattaacattttctacattgcttaaagttcttacattccaaaaagtctgtcttcattctgtgtcctttatgcatacctatctctttttttagtataagaattatttttaatatagtcaatactgttactaatgattctcccttaatgtcatcaaatatccagtatgtacattttcccaattgtctcataaatggctttttattatagtatagcttgtttgagtcaggatacaaacaaggtcccatatattgcatttggttgatataataaatttcttttcatcctctgtcccgtcatactgaagagctatctttttagtctgacctggctacttccccttccatctcacctcaaacataccacttctggttattactctgtggtgtcttcaggcacattttactaaagctttgactgcattttctagctgtcttcagcaggaggattagattgaattacctagtctaccattgcaagccttcattcctttaaaattgtgtgtacatatcaattacaattgaaatgaatagaggctgggcacagcggctcacatctgtaatcccagcactttgggaggctgaggtgggtgggtcacctgaggtcaggagttcgagaccagcctggctaacaagacaaaaccccgtctctactaaaaaaaaatacaaaaaaattagccaagcttggtgacgtgcacctgtaatcccagctactagggaggctgaggcaggagaatcgcttgaacccaggaggccgaggttgtagggagctgagatcatgccactgtactccagcctggcaacagagcaagacttcgtctggaaaagaaagaaatacctagaaagtttttttttgttttgttttttgttttttgagacagtctctcgctctgtcacccaggctggaatgtagtggctcaatcttggctcactgcaacctcagccttctgagtagctgggattacaggcatgcaccaccatgcctggctaatttttgtatttttagtagagacggggtttcaccatgttggtcaggctggtctcgaactcccgacctcatgatccgcccgcctcggcctcccaaagtgccaggaatacaggcatgagccaccatacccagcctgagaaaatattaatgaaggtaaaagatcatattgaaactcattatagagtctgactgggcatggtggttcacacctgtaatcccagcactttggaaggctgaggcaggaggatcatttgaggtcaggagtttgagaccagcctggccaacatagtgaaaccccacctctactaaaaatacaaaagttagccaggcgtggcagtgcatgcctgtaattccagctactcgggaggctgcggcaggagaattgcttgaacctgggaagcagaggttgcagtgagccgagattgcgccactgcattccagcctgggtgacagagtaagactctgtctcaaaaaaaaaaaaaatatatatatatatatatggtgtccttccataaactcacgagtctcatttgatcttttttctgttcattttatgtgagagttgcaaagaaaagtaacaggctggtagaagcaaaaagggaaggaaagctcaataaaataggaatggatactatagttaaaacttcaattttttaaactataataatagttaaaattaagtaggaaattaagtaattaagaaggaaacgaggccgggcgcggtggctcacgcctgtaatcccaacactttgagaggctgaggcgggcagatcacgaggtcaggagattgagaccatcctggctaacatggtgaaaccccgtctctactaaaaaatacaaaaaaaatagccgggcgtggtggcgggcgcctgtagtcccagctgctcgggaggctgaggcaggagaatggcgtgaacccaggaggcggagcttgcagtgagccaagatagcgccactgcactccagcctgggtgacagagcaagactccgtctcaaaaaaaaaaacaaaaaaacaacaacaacaaaaagaaggaaaccactgagaggagaatgtagttgttgattaaatattcaattttttccttcttttcagaaaatagaagcacgagtgtctgctgatgaagacctcaaactttctgatcttttaaaatattacttaagagaatctcaagctgctaaggtaattttaatctttttttaaatgagccattttacaaacagccatttcttgagtttgttagacttcagattgttaatgatgatttatctcctttatatgattttaaattatattttcaaatatgaattctatttctccttttagaaattgtatatatgtgtataattgtacatatttcatgtgggaaaccctacataaaagtttcctctttattatacttctgatataatctagaactttaaaaaaatgaatttgtggtcaggtgtggtggctcacgcctgtaatcccaacacttggggaggccgaggccagaggatcacctgacgtcaggagttcaagaccagcctggctagcatgatgaaaccctgtctctactaaaaatacaaaaattagctggcatggtggcgggtgcctgtaatcccagctacttgggaggctgaggtgggagaatcacttgaacccgggaggcagaggttgcagtgagctgagatcgcgtgccattgcactccagcctgggcaacaggagcgaaactctgtctcaaaaaaaaaaaaaaaaaaattgaggccaggggtggtggctcatgcctctaattaatcagcactttgggaggctgaggtggtggatcacctgagatcaggagttcgagaccaccctggccaacatggtgaaaccccatctctactaaaaatacaaaaattagccgggcatggtggtgggcgcctgtagtcccagctacttgggaggctgaggcaggagaattgcttgaacgcaggaggtggaggttgcagtgagcagatatcacgccattgcactgcagcctgggcaacaagagtgaaactctgtctcaaaaaataataataataaataaaaacaaagaaaaagaaaaaagcaggagctggccgggcgcagtggcttacgcctgtaatcccagcactttgggaggccgaggcgggtggatcacctgagtttgggagttcgagaccagcctgatcaacatggagaaaccccaactccgtcttaaaaaaaaaatgaatttggtatatttcttcaggtaaaatgtcttggaaaacaaaaccctggaataacagttgtattgctaaaggatttctttctttttttttttttttttttttttgagatggagtctcactctgtcacccaactgtaacctcttccttctgggttcaagcggttttcctgcctcagcctcctgagtagctgggattacaggcttgtgccaccacacccagctagttttcgtatttttagtagaggcgggatttccctatgttggccaggctggtctcgaactcctgacctcaggtgatctgcatgccttggcctcccaaagtgctggaattaacaggcatgagccacatactgcgaaaggatttctttttttctcttttttttttttttgaggtggactctagctctgttacccaagctggagtgcagtggcatgattgcagctcactgcaacctccgcctcccggcttcaagtgattctcctgcctcagcctcccaagtagctgggattacaggtgcccgccaccgcgcctggctaatttttgtatttttagtagagatggagtttcaccatattggccaggctggtctcgaactcctgaccccgtgatccccccacctcggcctcccaaagtgctgggattacaggcatgagctaccacacccggccgcaaaaggatttctatttggtctatgcaagtcctccattgagcatgagagtgccataaaacaaaaatacgcttttttataaggcaactcatgtttccttttaaaaggccatgtgctcctgggcgcagtggctcatgcctgtaatcccagcactttgagaggctgaggagggtggatcacaaggtcagcagttcgagagcagcctggccaacatagtgaaaccccgtctctactaaaaatacaaaaattagccaggcatggtagcaggcacctgtaatcacagctactccagaggctgaggcaggagaattgtttgaacccaggagagggaggtaggtagcagtgagccgagaccgcgccattgcattccagcctgggcgacaaagcgagactccgtctcgaaaaaaataaattaattaattaaaaaaaaaaagctgtgtgcaagactaaaacactaaccaaaaacaatttgttttttttttaaggcagagtctcgccctgttgcccaggctggagtgcagtggcatgatcttgggttatggcaacctctgcctgctgggttcaagccattctcctgcctccgcgtcctgagtagctgggactacaggcacttgccaccatgcctggataatttttgtatttttagtagatacggggtttcaccatgttggccaagctggtctcgaactccttaccttaagtgatccaccagcctcagcctcccaatgtgctaggattacaggcgtgaaccatcccgcctggcctcaaaaagtttttttggctgggtactgtgacttatgcctgtgatcccaacacttagggaggccagtgtgggaaaatcacatgaggccaggagttcaagaccagcctaggcaacaaaatgacattctatgtctacaaaatattttgaaaattagctaggccatggtggtgtgttcccgtagtcccaggggaggctgacacaggaggattgcttgagcccaggagttcaaagctgcagtgagccgtgattgccactgtatactgttgcctggacaacagagtaagaccttgtcttttaaaaaagttaacacgaggccaggtgcggtggctcacacctgtaatcccagcactttgggaggcttaggcgggtggatcacgaggtcaggagatcaagaccatcctggctaacacagtgaaaccccgtctctactaaaaaaatacaaaaaattagccgggcatgctggtgggtgcctgtagtcccagctagtcgggaggctgaggcaggagaatggcatgaacccaggaggcggagcttgcagtgagccgagatcgcgccacggcactccggcctgggggacagagcgagactccatctcaaaaaaaacaaaaaaaaacaaaaaaaacacaaataactgaaaagcactgaaaacttagtggatcagataatgcaaattcaatgttaatttgtgaattgagatattgtacacaaaattcccacctgatcactgatgctgataatttttattaaattatctataaccctttaactttgaattcttaggtacttataaatacactgttcatatcaaattatatcttataaactatttacattggatgggcagtgctaaaatactcacttttgaagactttaaattatcaaatgtggttgttttttgttttaattttttgcagagacaagtgtctcactatgttgcaaactcctgggctcaagttatccacccgcctcggcctcccaaggtgttgggattatagttgtgagccactgttcccagccaaatgtggtcgttaatagataacaatttcttagtaactttaagaaataattaaaatttagttgtcagaattaaaactacaacaaggtatcactgtacaccttaattagaatggctaaaatgagaaaaattctggcaaagatacataccaacttaaaccatcatatactgttaatataaggaatgtggtgcacttccttggaaaacttcatagtttcttaaaaggcgaaatatactatccagtgatccagtcagttcacttctaggtatttacccaagagaaatgaaagcagggctgggcgtggtggctcacccctgttatcctttgggaggccaagccagaaggatttctggaggccaggaattcaagaccagcctggcaacatagcccaatcctatctctattgaaaagaaggaaagaaagaaatgaaagcatatgtccatacaggtgttcacagcagctttatttgtaacagctgaaaattgacaacgcaaatattcaatggatgatgagataaacacattgttatatagccatacaatggaatagtactcagtaataaaaagaaatgtgctgtggatgcatgatatgtgcccaccattataatattatacacagtatttttgttgtcctaaaaatcctctgtgctctctcccttcatcctcctttctcccaatccctggcagccactgatctttttactgtctccatagttttactttttctagaatgttatatagttggaatcatgtagtatatagtgttttcaggtgggcttcttgcatttagttacatgcgcttaagtttcttctgtgtctttccgttttttgttgttgtttttttttgagacggagtctcactctgtcacccaggctggagtgccgtggcatgatctcggctcactgtaatctccatttcccatgttcacgccattctcctgcctcagcctcccaagtagctggcactgcaggcgcccaccaccacgcccggctaattttttgtatttttagtacagacggggtttcaccgttttagccaggatggtcttgatctcctgacctcgtgatccacctgcctcagcctcccaaagtgctgggattacagacgtgagccactgcacctggcctcttctatgtcttttcatggcttgatagctcatttcttcttagtgctgaataatattccattgtctggatgtaacacaatttatattctcagaatatatgaagaactcttaataaaaagagaaggctggggccaggtgcggtggctgacgtctgtaatcccagtactttgggaagccaagggggccggatcacgaggtcaggagatcgagaccattctggctaacacagtgaaaccccatctctactaaaatacaaaaaaattagccgggcgtggtggtgggcgcctgtagtcccagctactcgggaggctgaggcaggagaatggcatgaacccgggaggcagaacttgcagtgaaccaagattgcaccactgcactccagcctgggcgacacagtgagactccatctcaaaaaaaaaaaaaaaagagaaggccaggtgcggtggctcacacccgtaatcccagcattttgggaggctgaggcaggtggatcacgaggttgagagttcaagaccagcctggccaacatggtgaaaccctgtctctactaacaatacaaaaaaattagccaggtatggtggcaggcacctgtaatcccagctacttgggaggctgaggtggagaattgcttgaatctgggaagcagaggttgccctgagccgagatcgcaccactgcactccagcctggatgacagagcacgactcagtctcaggaaaaaaaaaatgtgagatatcactttatacccacaaggtggccttcatttaaaaaaaaaaaaagctggtaagaccaggcacagtggctcacacctgtaatcccagcactttgggaggcagaggtgggcagattacttgaggtcgggagttcaagaccagcatgaccatggagaaaccctgtctctactaaaaatacaaaattagccaggcgtggtggcacatgcctgtaatctcaaggtactctggaggctgaggcaggagaattgcttgaacccaggaggcagaggttgcggtgagctgagatcgcgccattgcactccagcctgggcaaaaacagcgaaactccatctccaaaaatgaaacaaaaaaaaaaaccccaaaaaaacaaaataagtgttggcaaggatgtgagtgacaaaatttgaactctcatatggtgttggtaggaatgtaaaatgttcagccactatggaaaaccatatggcagttactcaaaggtttgatgtagagttaccatatgactcagtgatttcattccttaatagtgagaaatgaaaccatgtccacataaacacttgtatgcaaatgttcacagcagcattattaattatatccaaaaagtggtaataaaccaaatgcctatcaactgatgaattaatgtgatataaccatacagtgaaatactactcagcagtagaaaggagtgaaatattgatttgtgctacaacatagatgaacttgaaacatgctaagtggcagaagctaggcacaaaaatcacactattccatttttatgaaatgtccagaataggtgaatccccatctctactaaaagtacaaaaattagccaggcttggtggcacacgcctgtagtcccagctactcaggaggctgaggcaggagaatcacttgaaccgggaggtggaggttgtagtgagccgagttcacaccaccgcactccagcctaagcaacagagtgagactccatctcaaaacaaaaaacaaaaaaaaaaaacatgtccagaataggcaaatctgtagtaggcagcaaattagcagtcgtctagggatatgggcacacatggggaaatggcaagtggctgttaatgggcatggggtttctttttgggtgatgaaagtgttctaaaatcgattatggtgatcctcagttctgtgagcttgctaaaaaccattgaattacatattttaaattgtgagttatgtggtacatggactatcaagctgttacttaaaaaaacggactgagccctttcccctggctggcagtgcacaggccgggccgcatgatgcctggagttactgtaaaagatgtgaaccagcaggagttcatcagagctctggcagccttcctcagaaagtctgggaagctgaaagtccccgaatgggtggacaccgtcaagctgctggccaagcacaaagagcttgctccctacgatgagaactggttgtacacgcgagctgcttccacagcgtggcacctgtacctctggggtggcgctggggttggctccatgaccaagatctatgggggatgtcagagaagtggcggcatgcctggccactttagccgaggctccaagaatgtggcccaccgggtcctccaagccctggaggggctaaaaatggtggaaaaggaccaagatgggggccgcaaactgacacgtcagggacagagagatctggacagaatcgctggacaggtggcagttgccaacaagaagcattagaacaaaccatgctgggttaataaattgcctcattcgttaaaaaaaaaaaaaaaacaggctgagtgcagtggctcacgcttgtaatccactttagcaggctgaaatagggggatcactttgaggccaggagtttgagacctgcctgggcaacatagtgaggccccgtctctacaaaaatctttaaatattagaataactttgggaggccgaggcgggtggatcacgaggtcaagagatcgagaccatcctggctaacgtggtgaaaccccatctctactaaaactacaaaaattagccaggcgtggtggcgtgcacctgtagtctcagctactcgggagactgaggcaggagaattgcttgaatctgcgaggtggaggttgcagtgagctgagatcgcgccactgcactccagcctggtgacagagcgagaatccgtcttaaaaaaaaaaaaaaaattcagaggttgcggtgagccaagatcacgccattgcattccagcctgggccacaagagcaaaactccacctcaaaaaaaaaaaaaaaaattggagtaactggcatgtagtattcactatgtgttagctctgatggttgtggtggtggtgacagtggtggctgggtgtgactactggaaacatgcagtatatatactattgtgaagcattctgttttataggatctcctgtatcgaaggtctaggtcactagtggattatgaaaatgctaataaagcactggataaagcaagagcaaaaaataaagatgttctacaggccgaaacttcccaacaattatgttgtcagaaatttgaaaaaatatctgagtctgcaaaacaaggtactgttacgttaacctttaatcacaagatatgctttatgactattatgtaaattaaataatcctaatttctttttcacagaacttatagattttaagacaagaagagttgctgcattcagaaaaaatttagtggaactggcagagttagaactgaagcatgcaaaggtagtgttgtaataaagatttaataatttaagttacatgtaatatagaaatgaatcagttatgacattgataattctttaatgtcagttctcatagggatactgtgacaactattcctgaactggaattacattttccaagattatttcactgcttcaaaatagttggtctgggttttttgttttgttttgtttttttgagacagagtctggcgctattgcccaggctggagtgcagtggcaatgatctcagttcactgcaacctctgcttcccgggttcaagcgattctcacgcctcagcctccttagtagctgggattacaggtatgtgccaccacacctgggtaatttttgtatttttagtagagacagggtttcaccatgttggtcaggcttatctcgaaatcccgtcctcaaatgatcctcctgcctcagcctcccaaagtgctgagattacagacacgagccaccgtacccggctagtctggggcttttttgttttgttttgttttgagacctccgcaacctctgcttcccaggttcaagcaactcttctgcctcagcctcccgagtagctaggactacaggtgcgtgccaccacacccagctaatttttgtatttttagtagagacagggttttcaccatgttagccagactggtctcgaactcctgacatgaggtgatacacctgcctcggcctcccgtagtgctgagattacaggcatcagccaccatgcccggccaggttttttgaaaatgtatttatttaattatgttttagagctggagtcttgctgtgttgtccaggatagcatcaaactcctgggctcagttaatcctcctgcctcagcctcccgagtagctgggattacaggtgtatgccaccatgcctggccctctggtcttttttcacgttagttgtttactttgaattaagcctcttcttgtagttaatagaaagtttggcctaaaccttatagtaattttaagaatagagaatcttagaattgagagggattttaaagattatttaattaaagtaaaaataatatctataacgtctccaatggtcagctctgaaagaatctaatacctaatatggaaaccagtatcattttttgactagttgttttttaaaaagtctttcttaataaaaacatttaaaaattaggctgggtgcggtggctcacgcctgtaatcccaacactttgggaggccaagaccgggtggattatctgaggtcaggtgttcaagaccagcctggccaacatggtgaaacctcatctctactaaaaatataaaaattagctgggcgtggtggtgggcgcctgtaatcccagctacttgggaggctgaggcaggacagttgcttaaacccaggaggcagaggctgcgtgagccaagattgtgccactgcagtgcagcctggatgccaaaaagaaaaatttatttaacatttgctgtttttgttttttgatttcttggtctaataaccctgtcaaaatgttttgataagtttgacattattactcttactgagcctgagctggtttctaatgttcattgtttttctttttttttaaagagaggctgggcacagtggctcatgcctttaatcccagcccttgaggtcaggagttcgagaccgcaagccaacatggtgaaaccctgtcctctactaaaaatacaaaaatcagccaggcgtggtggctcacgcctgtaatcccagcactttgggaggccgaggcgggtggatcacgaggtcaggagatcgaggccatcctggctaacacggtggaaccccatctctactaaaaatacaaaaaattaaccaggcatggtggcgggcgcctgtggtcccagctactcaggaggctgaggcaggagaatggcatgaacccgggaggcggagcttgcagtgagccaagattgcgtcactgcactccagcctgggagacagagtgagactccgtctcaaaataaaaaagaaaaaaaaaaaatcagccaggcatagtggtgcacgcctgtaatcccagcttctccggaggctgaggcgagacgatcgctcgaacccgggaggcggaggttgccgtgagccaagattgcgccactgcactccagcttgggcgacagagtgagattctgtgtctaaaaataaaaacaaagaggtcatgaactaccaaaagttttgctgtagatcaggggttggtaaactacagcccacctgcttttgtagtctgtgaggagggaatggtgttcccatttttaaatggttgggttttttttttctttaaggtagaatatgtcagccgggcgcggtggctcacgcctgtaatcccagcactttgggaggccaaggcgggcagatcacgaggtcaggagatcgagaccatcctggctaccacggtgaaaccccgtctctactaaaaatacaaaaaattagccgggcgtggtggcgggcgcctgtagtcccagctactcgggaagctgaggcaggagaatggcgtgaacccgggagacagagcttgcagcgagctgagatcatgccactgcagtccagcctgggtgacagagcaagactccttctccaaaaaaaaaaaaaaaaagtcatgacatgtattaaatgtattaattatgaaattcagatttaagtatccgtaagtaaaattttattggaacgcagccaagttcattcatttatgcttgtggctgcttttatgtagtagcataatggagttgttgaaacagcctaaaatacttattatttagccttttacacaaaaagtttgctgagtccttctagagattgatgtcagtgtccagtttccagattctatacttttttttttttttttgatacttagtttcactctttttgccccaggctggagtgcagtggcgtgatctcagctcactgcaacctctgcctcccgggttcaagcaattctcctgcctcagcctctcgaatagctgggacacaggtgcacaccaccacgcccagctaatttttgtatttttagtagagatagggtttcaccatgttggccaggcgggtctcaaactgctgacctcaggtgatccgcctacctcggcttcccagagtgctgggattgcaggcgtgaaccaccgcgcctggccagattctatactttttcaagttctttctgacctgagttctctgtatttagatttctgataactgttctattaacagtagtactcaaccagaggtgattctgccccccagaggacattttgcaatatctggagacatttgtggttatcacaactgggtgttctatggttactaccagtacatggtgggccaaggatgctgttaaatatcctacagtgaaggctgggtgccatggctcacccctgtaatcccagcactttgggaggccaaggcgggcagatcacctgaggtcaggggttcaagaccagcctggccaacatagtgtaaccccgtctctactaaaaatacaaaaaattagccagcgtggtggcacgcgcctgtaatctcagctactcagcaggctgagccagaaggatcgcttgaacccgggaggcagaggttgcactgagccaagatcatgccactgcactttagtctgggtgacaaagcaagactctgtctcaaaacaaaggccagcgcagtggctcacgcctgtaatcacagcactttgggaggctgaggtaggcggatcacctgagatcaggagttcaaaaccagcctggccaacatggcaaaaccccgtctctactaaaaatacaaaaattagctgagcatggtggcagacacctgtaatcccagctactggggaggctgacgcaggagaattacttgaacccaggaggcggaggttacagtgacctgagatggtgccattgcactccagtctgggcaacagagtgatactccatctcagaaaaaaaaaaagaaaaaaaatttactgaagaatctggtatgtagaaagtattattgtatgtgaaacaaatcatgtaattttatgtatttaaacctttatgtgtatataatgaatggctgttttaaaatttctaatatatcgataaagtcatatgacttctaacactatattttttttttcttatttttttttttttgagacgcagtctcactctttcgcccagggtggagtgcagtggcgcgatctctgctcactgcaagctccgcttcccgggttcatgccattctcttgcctcagcataccgagtagctgggactacaggtgccaaccaccacgcccggctaattttttgtattttttagtagagatggggtttcactgtgttagccaggatggtctcgatctcctgacctcgtgatccacccgcctcggcctcccagagtgctgggattacaggcatgagccaccgcgcccggcttctaacactatattttatgtcgtttctaactgtattttcagtaggagtcttctgaattgtttgaaataaaatttgtaatttattttttcttccttttttagggtaatctacagttgctgcagaactgcctggcagtgttaaatggagacacataagccacactccgccttcctgttaaaaagggctgccttccttcaaattttatttttgttttcttaatgatgttaagcatttatgctcactggaaacaaacaaaaagcagctgaaaaagtgcatcaactcctctttttctgagaaacatggagcagcgcacgcccaggcgatgccagtctgtgtgccgtgatgccgcactgtgttccccatgacagtggtccatcatcgtgcactcgtcatactcagaagtccaaagttcattcttctttaaagtagcctctataactctgtttattttataaatagtattccttatggctgccactcttatttacctttaaataatttctgaaatttaaccttttcagaatgcattgttgaaacaagataaagattgccttttttgaattttttaaattttgtttttaaaagcatataccaccttagttcattcatgtatcctggtaaagcatcttaatcagacttatttttaattactgaatatttcttagacgttttgggacagattttatgtaatctttataagtatgatttctgaagaaaagcaaatgcattagtatgtttgccttaaacttgtagactaaaccaagtattgtaaaataaacagcgataacagtgatagtttttaactctatggtcattgtatcactctggaaaatgtggagtagctgtaataaatctactcctgtattatgctttacagtgcaggtcttagtttttcttttttctcatttcttttgaaatggcatctcgaacaaagtccaccaatccctttacaaaagaatgaactgctcctctgtgtgtacttcatagaaggtggaatcggacagaggcaggttagtgacagttattcctgaaatacaggagcagagtacagtctgttgtggtttcccggattccgcgcctagctcagccaattaagcatgagacataggccattgagccacttagtagttatgcgagtggatagattggtatgtagagggaaagaggtctgctgtaaagaacaacacttgtttgtctgtggggaaagaaaagcagaatacttgagatgaaagttggcatacaaataggatactatcgccagtagttatattacaaacattatcggcctttctagtgtgaatgaacattagacacattattgtcattcctagtttaaagttaaggttgcgtggttggatttttccactatctttttctaatttttctaccatttggagaccgtaggcatttgggcctgtcaccccttggatgggttcctagtttgtttacattttcctgaaccctcctgagcgcccgttcttggtctaatccccagtcgtgatgattccacacttcctcagccgcatgttgtcttgcctcattcatgagctggtcagcgtttcgtctctttaactgacatgttccccagtgctgtttgaactgttgagtttccgttgctggctgagtgcgttttgtccttcacgtaaccttcgctggtaaaaataagcccatgtgatgtccaccagtggatgaatgctggaccgagagccctagcttctggatccaggtctaggcccttcatctgctgctctgtggcccagggcaggtttgcttgacctctgcctcagttctcgactctaaaggacatactgacctacctcacaggggtgttgtgaggattaataaatgttggtactctgctttggaaatgtgaaaatgctgtgtaaatgttaagaaatactaagtatagggccagaagctatacagtgtttcacttaaccgtttgccattctgtatttaccaaggtggtcttttctggggaaggaagtagagtggaaggtgcatcccttggcccctggtttacattattagggtgcttattgtaggaatgcactctaaaaagtgggcgtagaatgaaagcagccgtccagtggtcctcccttttctgtagtttcacttttcttgcttcaagttacagcagtcacctgaaatctgaaaatactaaatgaaaaactccagaaacaa

SEQ ID NO: 307 - DNA, 64115 bp, Homo sapiens
  source 1..64115: mol_type = genomic DNA; note = NC_000003.12:c53347543-53283429 DCP1A [organism=Homo sapiens] [GeneID=55802] [chromosome=3]
agaggggctaggctctgggattcaagatggaggcgctgagtcgagctgggcaggagatgagcctagcggccctgaagcaacacgacccctatatcaccagcatcgcagacctcacgggccaggtcgctctgtacaccttctgccccaaggccaaccagtgggtgagtgccgcctggccctgaggacggccacccggccgctgccgtctcttaaaggggccgcgcgggttactgtggggtgggggggcacactaagaggccagggcggtggagacgaggccagggtctggccaagagcctagccagagcctgaggggtgtcgggtccgcttgggattgggggataggagtgagagaagtggctcgagacatcccaaggaaaagccagtggaggggaggattggagcaggatcagtcccttggcgtcgggtctggggacgtgggcgacctgccttctttgcagatacattgggagttataagaccggtggggtcaaaagggtgcctgaaagcttgtgtttgaggctttgcggattattagataaattatatgtacattatctataaaataaacactcctcctctccccctggcaaacgtaaatgagagcccctgtcgcagaggtcatttgggtttaaagtttaaaatccaattagtttcgattcttggaaggagggggtgggtgggtccggctttaatcgaactacacagagtttcggaaaagattccaaggcacttaggaaaagggcttccgtgttcactggatccccgaagacctttgtacaaacaagagagaccctgtaaatgtgttttgttccatctatgatgctggtgatgtcatctctgaatgctcccctcggactcagtactttctggctttcgtgcactggggagggtccgaaaagtcacattcagtgtgttcactgattcttgttagcccctgcttgaagctttgttagttgtttaaaaagcataatttcccactttcttgtaattgacccttcctaattaactcattcagctacaggctttacacttagaaagtaatacgtaaatgcttgttggattgaattcaccaatgactggagttcacatttcaataagatacgaaatccttaaactgacagaactctggaagatgaccgtagtatgtcgtttaccctataatacagttgcatagattatatttatcagtaatttatcgaaaatcatttggcatttatgaacagttaattcagatgaagagtttttataatcacgttgtttatctttgcctcctggaagagaaggagatatgggaagccacaaggaataaaattgtagattgttttttaaatgtagctattttagacattgccttagtttgaaattttatgaatcttttttcttttcttggcctatatataaattttgaaatatggattgccgacaaatggtgaagacttggggctagagttttcctagtttttcacaaaggctttcaatattttaaaattttacattgtggagttctgttttaaatatgaaatacaagctataataacctgaattgaaaaataagctgctactgtttatttggatcctggcacatagagcatgacaaaaatcttttccctctttattattttacagtgagttgtaactttgcatgatgttttttggtgggcaaattttcttttactgtaagacagttgattaccagtttcttatagtaataacctaacattttaaaggtaagaaaaagcctctgaatccttaggaaggaaaataatgatatttaagctagggtagtacttctggaagaaatcgagatgatcaattttctaaattttttaatcccaacacattcaatatatgactaacatttaaaatgttaataatgcgttgattacagtaaaatatttaggtccattgtaggctgtaaattgcagactaataagcttatttattttttaaaaaacactgaactgtgtttaaaacctaaatacactcttgtcacagaaaatgaactatggtaaaggcctccaataattacactgaggcagggtatactttcagtattcaagattcttcaagttctaaaaataacaagctgattttgtttggtagtaattcttaaccacaaaatttgctagttgtcaaaatgtacgaaaactccctagtgatgaaacaaagtatcctataagaaagtttcattcctttccttttttaaaattaacttggataaacttaaaagagaagaaattgcagtatacaggaccttagctttaaagttaagaaatctggctaaaatattttagctataaaaagtgaaggtttattctatgattttctcctttactaattaaaaaagaaaaatactgcagatacagatatgttgctggattaaatattgcatatgcttatgcactgaaaggatacattagaaatggtaaccacaatttgtggaatgagagggagactttacctgttcaaaagtggttaattttataatagatgaaatgaaacaagttgatcttaaacgtgaagcattacttctccatggggactatttggggtctgattatggggaaaaaaaactaattgagtcattgtctttcataggagaagactgatatagaagggaccttattcgtatatcgaaggtaagtttttaaaatatgtatatttgtttttaacagtctagtggtgaacaatgtgaaacggttcaattctcttgtacatttgtctttggaaccgtcctgctagtacccttcaagttttcatctttccctagctgtgaaatcttaaccaggttctttcttttctctgagcctttctgtgattcagaataaactgaactagaatttatattaccagcctagcaaagcaatttcaaaataataatgattgagtctaaaatggatgcctgcgtctctcttcctacccccatattagaaagaaaaagaaagatatatatttggggaaaagacaatacatagactggctctgtaaaataatgttattgagaggtcgatccctctgttctttcattactacatgagtggttgtcttttatgactggttctgtcctctttcccaacccacagaagttctggattatgtacagtgtcttatttgagagttctttagaaagcttggattattcatgatggcgtattttttatttttgacttattcaaaaattcattatctttaagattggtttgcaaattgcaacttttttgttaggcagcttttggggcctaaagacaactgacagtatatgatagtcatggggtacttgttttcctggattcctctaaggtcttaactcttacaagggcaggttccttcccttgttttctaaagcttagggagtcagcaggagttattactgatatctggtcttttcccttttttttttgtattgagttgcttcataaggattgcctttctccattgatgccaatttaaaagaatttgtcaaatactcttctaaattttgatacaaagctttgagatctcgtctaaatgcactcatttttttcttcttttaagtgtaattctttgatatttgtacaccaagctcttttttcttagacactttctttgttccctgctattcatctttctgcttttaaaaaggaagggatcggccgggtgcagtggctcacgcctgtaatcccagcactttgggaggccgaggtgggcggatcacgaggtcaggagatcaagaccatcctggctaacacggtgaaaccctgtctctactaaaaatacaaaaaattagctgggcatggtggcaggcacctgtagtcccagctacttgagaggctgaggcaggagaatatcgtgaacccaggaggcggagcttgcagtgagccgaggtcgtgccactgcactccagcctgggtgacagagcgagactccctctcataaaaaataaataaattaataggaaaggatctttaccctcactcccttcattactcttcattagcaatataaatctctagaaactctgttattagaaccttagtttctatgatatttggtaaaagtactttactggctttattgttatcatacagaggcactgattgtagaaagtaggagatttagtgtagtgggtggctggatttaatacaattcacggaggcttatatggtactgattctaattaaaggagacgcaagaaactgtgtttggaaaatgtgagactattttgcgtaccttggataaaggtataccaggatgtcagactgtcactttgcagctattacttcatatagtagaagcttggatttggagtcaaaaaacctgaaactgaatcctagttatattatttgtaactcattatttgtgtgacctcaggcacaggccttatcattcaaagcttgtctcctaatctatagaatagtgttctgttaacaccccgggtatatcgtagagaaacaaatgaaaaacggtgaagtgttaggtacatgtgaagagtaaaggatcatgtaccgaatccctctgatatgggaaccaaggatgtttcctattgtaggattcaaggcattttccgtctaactcaggagcgctatgtaaatatctatttgttgcaagaaaaacattattgtaatgatgggcagccattatagccaatccaattgaatgatatttcattcagcaactgtgtgtctatcttgggatatatgtatgaaaaaagtaagacaaaagctccatttgcatggggcttacatcctagtggggggaggacaataaatactaaaaataagtggtatggataaaagaggaaggttagagatattgagcttgggagcattaaaaaggatagttcaagtaggcctcatgaaaaaggtgacatctgaacaaaggcttggaggagatgagatagctgtgcagcttctggggcagtaatccaggaagaggtttttaggtagaagcacacacgcagagagagtggcaaggagcccggtgtggctggagagtaggagctggagaagagccataggaaatgaagtcagagtggggagtatatcaggtggggccttggtggcctcagtaaggactttggcctttactctgagagactgtctttggagacttctcgtcagaggaggagtatgatctgacttaaattttttgtttacagatgtaagtgctgataatattgtataatgttctaatgcattcttttttgaaatgaaaataaagtacatagtagataacatttctacagattaaatggtaactacatatttttttttcttctattaaatctaaggtcagcttccccttaccatggttttaccattgtgaatcgactaaatatgcacaatctagttgaaccagtgaataaagatttggaatttcagctccatgaaccatttcttctgtatagaaatgcaagctgtgagtatatctgttttattatagttattacatttaaaattgagtgactttagtttctatcaatccattatttaggaagtttcaaattacaaaacaaaatatggtctctacttaatgattataaatgagtctgttggaaagatcaaaccttttaaactgggctctgaggccagaggtggtggctcatgcctgtaatcccagcactttgggaggccgaggagggcagatcacttgaggtcaggagttcgagaccagccaggccaacatggtgaaaccccgtatctactaaaaatacagaaaaaaattagccgggcttggtggcaggcgcctgtaatcacttgaacctgggaggtggaggttgcagtgagctgagatcgcgccactgtactccagcctgggcaacagaatgagactgtgtctcaaaaaaataaataaataaactgggctctgaaactggaaacattcttttgtatataatttagtttactatttcatttaatagcactacatttctgttgtcggtttattaaaataaggtttatgcctttgtttttttgcagctgtggactatcagctgcccatgtccctaagcaacagaacttagtttgggacacacaggatgggaacagatacagataattctttccacaaagaaagtattattattactattattattttcttttttttgagacggagtcttgctctgttgcccaggctggagtgcagtggtgtgatctaggctcatgcaagctctgcctcccggattcatgcccttctcctggctcggcctcccaagtagctgggactacaggcacccgccaccacgcctggctaatttttttgtatttttggtagagaaggggtttcaccgtgttagccaggatggtcttgatctcctgaccttgtgatctgcctgcctcggcctcccaaaatgctgggattataggcatgagccaccacgcccggccagaaaatattatttttgcccagaatagtggtgatgggtttttttttttaagatatttattactttttctactttattttgtctgaatatgtttctaagtaaggtttttctatctgtttatttaattgagtgtctactggttaccagcactgagccaagagctgtggtgctttaatgttaacgatacagttacctatgtggtgtaagcaggcagttaagtcaactgagactcagagatgcataactattaccctgttggagagttaggattatgactattcttctgctttttagtccagggttctttcaggcatttttacaatctctaataacgattggatgtagtcagcaaagctagagtggcccttccaagaaactacagtactaaaaaatatacttgattccagtgtattagtatggatattgaaggtatgggtgtttgaggacagtttgttggacattgactatagggatatgaaaactggttatggtaacaatgattgtgctctaattggcatctaaggatatagttggagaaatgttgcttctaacttaaaaagtaaaagttaatgtgtttgaatttcacttggcgggggggtaattggtcttgggggatgtcttcagtataaaatagaaaaagttactaaaaattatacacctcttaattccctgaatgagaagtaacaaggcctattttaaagctagaaacccccaagttcttttccgtagcacactttgaagtataagtgaaataggttctatcttttgacttctcagtaaactatttgtccaggtaattacctctcagattttaaattctgtggacatattagacatgctttgtaatagctgtaagttcagatggatttatttaaactaatgttaacaatgtaattatttcagattgctcttttctttgtactgaatattccattaaagggaaaattcggctgggcaaagtggctcaacacctgcaatcccacgattttgggagaccgaggcaagcagattgcttgagcccaggagtttgagaccagcctgggcaacatgtcaaaacccccactccacaaaaaaatagaaaaattagccaggtgtggtgtcacacacttgtagtcccagctacccaggaggctgaggtgggaaagtcgcttgaacccaggaggctgtccaggctgcagtgagccatgattgcgccactgcactccagcctgggcaacaagcgagaccctgactcaaaaaatgaaaagagggtgggagaaattctgcaaatgaatatggatccaatttttttttaagtgaaataggcttaattctgttctttactgcctggaaacttaatctagccatcactcctaagtggtttgattattaaagtagtcagtagggaaagttatccggacccagttaccatttagcataaacctgagatgaattgtattatatttttttcacaaggcaaaagtcctgtgaaattgaaagtgtgacataacacaaatgtaattgaaccatgagtaaccagaagctaactaattagagcttcagttgtctggaaatatttttatagttcgtgtgtggaagaaatgaaggcaaattataagaaaacaagctaatactaggttttattttctgaaaatcaagcagatatccagagaataacctggggtcggcattaaaatgtcaatattttataactttaactccactgtagtatcataggttaaattgttatagtgagacctaaaatcatcaggagtatttattatgttaactagaacattcttggggagaaagtgcattaatgcattttactttagaaaattttcaactgattgaaacaaaagttttcttagttgaacagaaaactcacttaaccaggtcatttcattagggaaagtatttaaaggaatagctgtattggggagaagtgataagacaacagaaaatgattttgtgagtgttaagccctctcgagtgtgtgttttgtctacatagtcttaaaagtggaaaatagtcttgtcaggtcagcgagctattaagttgtttagggatttgttctttaaataaaaagttagtatctgattatgcatacaggtaattatacctgattctatagctgcacttctgccattctcttgtgggaaataccatcaagacacctgacccatttaactcaagtgacaccttcatatccaacttctttcattcaaattaatttttggagttaatgtactagaacagtgaaccataactttttttcagttctaagttatttgttttatttatttttaagagtttttctttttttttttttttgagacggagccttgctctgtcacccaggctggagtgcagtggcatgatcttggctcactgcaagctctgcctcccaggttcacgccattctcctgcctcagcctcccgagtagctgggactacaggcgcccaccaccacgcccggctaattttttctatttttagtagagacggggtttcaccgtgttagctaggatggtctcgatctcctgacctcgtgatccacctgccttggccttccaaagtgctgggattacaggagtgagccaccgcgcccagccaagagtttttctttataaaacatgcccatctacacccaccccacccctcaagaaaaagataaaatcttaaagagaaaattcttacactgactaagggcttaggcttggtgattctcttaaatctttgtggggtagtggtggtggtggtggtggttgttttcaaaagacaaggtctcactgtgttgcccaggctggtcttgaactcctgggctcaagcaattctcccgcctcagcctcccgaagtgctagcatgggccaccatgtccagcctcttgaatcttttgggaacagtgtatttttattctgtgcaagggccttttggcagtcacaagaccccagtgggattgcaatgaattatggggaggttataaattctggagttattgagtagcagtggtatttctagcaccttatttctgatcctcaacttacaggttgagaaaacaagaggctcagagctgtttaggaatctgctcgagattcgcaaaggtaataagtgacagatggagaatttgggagtaggtctttcgggcttcaaggccaatgttctttccactctactgtaacaataaaattacttcatcaatccatattctagagtagtgctatccactaaaactttgcaattagggaaaatgatagttccgtgtcagcactgtcccatatagtagcctgcaatgtggctagggcaaatgaagaacacttctttttagtttatttaatttaatatattagaatttacatggctgtatgtgctggcagctgccatactggacagtggaagtctcagcatgagctcatgtgctaacatgctctttgttgtgccatacctgaatcaaacaactacttgggaagctttggcttagatttttatgcgtcctatttagtcattcctttttgaaacttacaaatgatttctagatacaaaagctgcagaatatatccctgagggtggctttgccatggtaacattcttttggcatggaatttagtttgcagataagaattctattctgggctttgccttactgactataaccttggctaaatcatttaaaccactgatttgacctatttatcttaaaaggccatcatgaaagtaaggtattttgttaggcatttacaaatacaaaatatcatagactgtgtctccattctagactcaacaaatgatctcattagtgaaagaatcctagggacatcagtgttatccacacctggcctatccagattctcttataacacaggcctgtgatatgcttcttcctatcccttctgatagtaccatgcatgagctgcaggctctttgtgtctctttacaagtattattttcaaatgttgtaggggccattactagaaagcctgaggtatacattggaaaaatatatatattaaaaatgagaagtcttggccaggtatggtggctcacgcctgtatcccagcactttgggaggccaaggcgggtggatcacctgcggtcaggagttcaagaccagcctggccaacacggcgaaaccccatctctactaaaaatacaaaaaaattagccggacatggtggtgcacgcctgtagtcccagctacttgggaggctaggcaggagaatcgcttgaacccaggcagtgaaggttgcagtgagcctagatggccccttggcactccagcctgggagacagagcaagactccatctcaataaataaataaataaataaataaataaataaataaataaatctgggctttgggttagaaggaagatgtcttcctaaaaaataaccatgggacttccctcatacaaatttaaggttcaagttgtaccattcatttagtatcatttcttacccaggtcaagaaattaacataaaattaatcatcagctggtgattactctacggcatctggcagaagcaaatgtagatcccttctggcaagatacattcttagcccagccaggttgcccaggaatatcaggcatgtctcatggtctaaaattactaaatatacaaggaaatactttgcagtgaatgaaaggtagcatataacaaacagcaggattatacaacccttcccaaagactttagttcatggaaactagagactctaatggatgtaaataccagatacagattataaaataaagtaaaaagaacagcaaatgtgaaaaaagaataaaggccctgtgcggtggctcacgcctgaaatcccaacactttgggaggccgaggcaggtggatcacctgaggtcaagagttcgagaccagcctgcccaacatggtgaaaccccatctctactaaaaatagaaaaaattagcctggcgtggtggcagacacctgtaatcccagctactcgggagagactgagtcagaagaatcgtttgaacccgggaggcagaggttgcagtgagccaagatcatgccactgcactccagcctgggcaacaagagctaaactccatctcaaaaagaaaagaataaaatgctgccaggcacagtggctcacacttgtaatctcagcactttgggaggccaaggcgaacagatcacttgagcccaggagttcaagaccaacatgagcaacatggcgaaaccctgtctctataaaaaatacaaaaaattagccgggtggacctgggaggctgaggtgagagaatcacctgagcccgcgaggttgaggctgcagtgagccatgatcacgccactgcgctccagcctgggtgatagtgagaccctgtctcaaaaaataaaagaataaaaaagaattaaatgctattaaaaaaaaggaagatttgaaaaattgctgagtagaactaatagaaattaaaattttaattgaaagatactctctacttggattcaacagttaattggtaatagctgaaaagagaattggtgagctagaagatatatctgaggaaatccagaatgtatccaaaaaaaggacaaaatggaaatatgacagagtgattagaattataaactctaacatttgatggataagaatttcagaatgataaagcagatttgtagagaggcaatatttgaagcgttgatgactgggaattttccagaatccataaaagacataaatctcagatttaaacaatagaatgagctccaagcataaaacatagaaatattagccggacactatggctcacgcctgtaatcccagcactttgggaggcctaggcaggctggatcacttgaggtcaggagttcgagaccagtctggccaacatggtgaaaccccaccgctactaaaaatacaaaaattagctgggcctggtggcgggcacctgtaattccagctactcaggaggctgaggcaggaaaatcgcttgaacccgggaggtggaggttgcagtgagccgggatgatgccactgcactccagcctaggtgacagagtgagactctgtctcaaaaaataaataaataaaaataaaaaaaatatatatatatacacatgcgcgtgcacacacacacacacacacccagacacattctgatgagatgtcaaaggcagagacagaagcaaccaaaggttgctcaagattgggtgtttacaaaggaacaccagttagactgacagcatattccatagttgcagctactgagtttagaagacaaaagaataatatattgagaggactgaagaaaaaaaaaaaccaataattcagtaatcgaagagaacaaaataaagatacttttcaacaaaaacaacagcagttgtctccccagattcttgctgtaggagctcccacagcagtgctgtcagtgcagtagccacatgtgtctattgagcatttgcagcgcgtgacgggtaaaagcagacaactggtttttctctttcttacagccaaacgctccacagtataacatgattaattgaaaatattaagatgcaggcttgtggtaccatcaagctctatgaaattggttctggcttttaatgattttattttgtaaaaaacagtaacaaactagaagctgttcaaacctaagcattccaagattgtgatgacggcagataaattgattaataaggttttgtgtattcaaaagattccaccgcagaacataaataggatattttaactttcaaaccaataaaaaccaggaagtgggaaaaaagtaaatagaaaccatgggaaaaagaaagcccaaaataaaatggcagaaatcaatcaatttagaacaaatgttaagtgaactaaacttgccagttaaaagactcagattggataaacatatagaatttgcctacatactgttttaatatttttaattatttttatctatttatttattttttagagacaggtctcgctgtgacacccaggctggagtgcagtaacacaccatcatggctctctgcagcctcaacctctgaggcttgagtgatccttccatttcagcctcccaagtagctgggaccacaagtgcacgccaccactcccagctaatacgtttttattttttgtagagacaaggtctctctatattgtccaggctggtctcaaactcctgggctcaagcaatcctcctgtcttggcctcccaaagtgctggattataggtgtgagccactgcactggccctgtatgctggtttcaagaaactttaaaaactctaagatcgtggaaaggttgaaagtaagcaatagaatgagatttatcaggcagctatcaagcaaaaaaggctggtgtctctgtgtgagtcatacacggtaaactgtaaagcaaaaagcatcattagggataaaagttaccacataatgatgaaaggaataagtgacctagaagataaaataattttgaatgatatatacttagtatatgtcagaattgcaaactgaatgttaaaaatccctaattatagtgacagattttaataagccactttagtaattgacagataaagcagacaaattttttttttttaagagttagggttttgctttattgcccaggctgtctcgacctcctggccacaagtgatcctcccaccttggcctcccaaagtgctaggattacaggtgtgacccaccacatctggccacagacaataaaagttattggatagttgaacaatacagttaacaaacctgatatgatggacatataaaaaaccctgctggccaggcgcagtggctcacgcctataatcccagtactttgggaggccgaggagggtggatcacgaggtcaggagttcaagaccagcctgcccaagatggtgaaaacttgtctctactaaaaatacaaaaaaaaaattagccaggcatggtggcaggcgcctgtaatcccagctactcaggaggctgaggcagagaattgcctaaattcgggaggcagaggttgcagtgagccaagatcacactactgcactccagcctgggcaacagagcgagactccatctcaaaaaaaaaaaaaaaaccaaaaccctgctgctgtcagtgatgaaaattttgtctagttctgctactgacattaagttatgataaagtctgtctgaggagaaaaaagaaaaaaaaatcctacttttagcaattagagaatttacatttttttcaagtatatattagaggtttataaaaattgccacatataggccattcagccaaagaatttagggaggaaaatagggaaatctgagtaaagttgaaggaaaataaagagtagaaattaattgcaaaaagtagaaatttctttttttttttttgaaacggagtcttgctttgtcacccaggctggagtgcagtggggcgatctaggcaagctccacgacccgggttcacgccattctcctgccttagcctcccgagtggctgggactacaggcacccgccaccacacccggctaattttttggtatttttagtaaagatggggtttcactgtgttagccaggatggtctcgatctcctgacctcatgatccacccgccttggcctcccaaagtgctgggattacaggcatgagccaccgcgcccggcctagaaatttcaatagaatagagcagatcaacaaaacaaaaaactccactataacaacaaccataaaaagaacaaggggaggtacaatatgcagtattaggaataaaaatataaatgtgttccaactaaaggaagagaacatgcatttttaaaaacaagaagccactgtgaagaacttttgcctgtaaatttaaaacttggatgataaagacagtttcctaggaaaacatagtttaacaaaaattacttaggaataaatagatttgaatggactcataaataaaataattgggccaatagactaaaaatctctcccatcacttctaaagaaaatgctgagaggaatgttctattcagtaaatggcactaggactgttagttctccatgtggagaccagcctctgtaaaggtagctatggggttcatacacttctggtctaatcttcaagggaaacttgtctccaaaggccactcttctgtgatgaggaaatcatgcttctgtgattcactattccctcagcaaggtggtgagcagcatacctccctattatacatacctgctacaagcaacatacctcactattaggttggtgcaaaagtaattgtggtttttgcaattaatgtcaagaaacacaaatattttgcaccaacccagtacatacctgctacaagcagcacacctcaccgagtaatacttctcttagaagatgtttttcctcaagaccagtgtcagaggtcttttgattttcactgtggacacctcttaggaataaaagtagtaatggggaatctttttttaatatctatgtgcttacctatcacttaattacaaaatgccccaagaatattctgtgaagtgtgttctgaggaattttttaagaatctaaacccggcatgtgaatcaataataaagtacagtcatgagtcacttaatgtcacttaacaacagggatatgtcctaaaggcgccattaggcagttttgttgtatgcacatcatagagtgtacttacacaaacctaaatgacatagcctacacacctagaatatatggtattgctttgaggctacaaacctgtacagcatgttactgtactgaatgtgagaggcagttatagcacattggtaagaatttgtacatctaaatacatcttaagagaaaacgtacagtgaaaatgtggtattataatcttaagagaccactgttaggtatgcagtctgtcactgaccaaagcagcatttgtggcacgtgacttgcaaaagcaaacagaactgatttttctctttcttacagctagacagtctacagtataacctggttaattgaaagtattaataatataggtttgtggtaccatcaggctctataaaattgattctggcatttaatgattttctttggcaaaaactatttcaatattgcattttgggccaggcgcagtgactcatgcctataatcccagcactttgggaggccaagccaggcggatcacgaggtcaggagtttgagaccagcctgaccaacatggtaaaaccccattgctactaaaaatacaaaaattagccgggcatggcggcacgcacctgcagtcccagctacttaggaggctgaggcaggagaatcacttgaacctgggaggcagaggttgcagttagccaagatcgcaccattgcactccagcctgggcaacagagcgagactccatctcaaaaaaaaaaaaaaaaaaattacatatactccatctcaaaaaaaaaaaaaatatatatatatgtgtatatattgtgttttaccttgtttttaaccaacgtgattaactcggatacataccttaattcagtgacatttattgaatatgtcatttgccaagcactttaccagctgctataccatatagattaaaactactgtgcgcttataaagaattttgtttatatttttagtccttaggttctattatattttcttagaaaattataagctgaagttactaaactgcgttagaactttctatgtcaaaactctgccttcttggtaagggtgaagattcttttttttttttttctgagacaaggtctcactctgttgcccaggctatagtgtccaaatgatcctccatcctcagccactgccctgagtagctaggactataggtgtgagctactacaccagctaaatttttttcttttaaatagagatagggtctctgcaaattttttgtagtgatagggtcttgctgtgttgaccaacctggtctccaactcctggcctcaagcgatcttcccacctcagcctcccaaagtgctaggattacactatagccactgcaccccgctgggtcaggattcttaatgaaatgtgctactacagtaagcccaaagctatgcatgtttattcttaaaacaactccctgtagattaatgataaaaattaatgatttaaggtctgtgatttgagagttattgcttgtaaatttgaatgactgggctagtaacagtgacagtctgatctaccagagagacagtaagggtatgtacatattttttcttggtcattttcagcagcagtactcacccattgttgggaaagagtatatggtcttgattttctcttctcagacctaaccttattctcaccatagaccagtgtgtaatggtagttttaaccaaaaacaatgattgttttactttatgtgcatgttagatacggcatctttttactggaagtttatcatttataaggacaactttttcatgtttccttcatgtaacaccctaaggcatgtatctcccacttaatgccactttttgtattttttaatgttttctgtaaaaccaaaagcagttttgggaaaatggacaaagcccttttgagtttttcaaaagaacacagacatttcccgaattttattttaccttgacaggtttaaacaattacaagtttgtggtttgtatgaaacactttcaaagtgatcctatgtgagtaaaatctgatctgaaattttcttaaaaaggagttaatgtcatatatctactagtctaatatgttgctctttagcttgcttaaccgaaaaagacaattacctcttaagtataatttaaaatgttaaatattattgctatttaatatttttaagaacttacctccaaaagccagagagaagtaccccttcgtttctgcttcacttatcacttttcctttatatcgggcatcgatctcttgatacatagtgcttttaatgaaaattagatcactagaaaaagtagggaggttcatttccatagtgttgaaaatgccactgccaaatggaaagttttagtagaagaaatgctgtagtgtgtgctttttttgtctctctgcttgtcctttctcagttcaagggcaagtctcagaacagtagagatggtaggtggctgttggcatttggagcaaatcttcagacttttaaagcacagcgcaagaaatttccttacaagataagtttacaatttgtccaatccaaaaatgtgagttctccctccacactgaaagaggaattcataaacaacaagaaaatttccgtgattcattctttgatatctttgaattcagtgcagtacttctttcttagcctgaagaaaggcagtcttccaccatcagttgcggcaccgctgtgcttggtatgattctgtaatcagtgaaggagaaagggtctgtggcaactgcattagtctggccttctggaccaagataaggaaagagccttgctgttgccacatttgtagattgaagaggtaaaatcaccacgaaaacatagagggacttaaggctcagtggctgagtctgactcagtgacactgttagttcaaatgttttaaaaatacatatattgctttctggctcattgtaggcgctgcttagtattctggtagagcctttaccaagtgccttcttggtaactttgtaaatccatgaacatttcagaatttccaaagcagattcttttcattatgattcactaattactggctttttcctcctcaggtagtgttgtcagataaaagcactttttatctttttttttttattgtggtgttatctaaattgtaaagatttgtaaagttaaccatgcctgtatcatttatcttttagataattatgttaaatattcaatacttcaaatgttttttcttttgagaactcacaaaggaaatcattgtttgtacttaagtgacagaaatatgttaacatgtaatatgtaggttttcaccttctgtttacacaatgaagttatctgtgtaggtaaaaattgaaacagagtaaccgctagtctaagcgaagctcctctggagtgtgcagaataaacctccagactgggcccttcaggttcagtgtgctggaggatccaggcaggtctgagtcacttacaaagtcactgcttccaggcatgctcagcttctgctttttcttttcttttttttttttcctgagacggagttttgctcttgtcacccaggctggagtacagtggcgcaatctcggctcactgcaacctccaccacccaggttcaagtgattcttctgcctcagcctcctgagctgggattacaggcacacgccaccatgcccggctaatttttgtattgttagtagaaatgggatttcaccatgttggccaggctggtcttgaactcctgacttcaggtgatccacctgcctcggcctcccaaagtgctgggattacagacgtgagccaccacgcccggcctttgtttttgttgttgttgtttttttgttgttgttttgttttgtttttttgaggtggaatcttgctctgttgcccagactggagtgcactggcacaatctcagctcaccgcaacctctgcctcccaggctcaagcaattcttctgcctcggcctcaccagtagctgggattacaggcacatgccaccatgcctggctaattttttgtatttttagtagagatggggttttactatgttggccaggctggtcttgaactcctggcctcaagtgatccacccaccttggcctcccaaagtgctgggattacaagcgtgagccaccgcacccggccagctttttctttttaataaaaggaaagcacaggctaagcatttgctaccaacatttaaaaattaccatattttatacatccttaacctggatttctgatttttcttgtgataaaatgacgtgtgtgaccacacagcacttggattcctgcaagtactgcagtcagccagaattgtaggtaagacattttcatcactgatctcaccacaccctgaggtctcttatagtccgtgaggtatttgtgcttacaaccctgctgtggatgatcgattagtaaattggtagaaaaatgtgtaggagagtagaagttagggaaagtagagaaaagaagttcccccccttttttacaccccatctgacctatttcccagatccctaactatagatttttggaagcctaggaaatgggaattcaaatccatggaggtcaggggccatgcttccccctgcctttgtctctcccttatgatacataaagatgatatttgtgtgggatactagagcgactagaataccagttggggggggggggttggacatgtccaacatttggcagaaccgtaatcatttacaccagcattccccaacctttttggcaccagggaccggctttgtggaagaccatttttcaatggacggggattgggggattgtttcaggatgattcaaacacattacatttattgtgtactttatttctataggtgttgtaataaataatgaaataattatgcaactcaccatcatgtagaatcagtgggagcctggagcttgttttcctgcatctaaacagcagttccatctggaggtgatggaagacaatgacagatcatcaggcattagattctcataaggagccacaatctagatccctcgtatgtgcagttcacagtagggctggagctcctatgagaatctattgccacagctgatctgacaagaagcagagctcaggcagtaatgctctgttgtctgccactcaccttctgctgtgcagcctggttcctaacaggccacagaccagtaccaatccgtgaccctgaggttggggacccctgatttacaccacactttggaagctgtattttaaggagctatgggtactgtgtggcagtagcagatatacatcctaacagcaaaggcaaaaccctagtgcaattcactgttttacttagggttgcccattgtttaagaataaaacttttgcaagtgggagtaatcagttgtgatattgttgggtttattttcctaattcctaaagaagttcaatggtcatttcatgtgtctaaattctgtactgagattataatgttaatgggattgtggaaggagtatttcgggttaatatattcagatttgatttaatttagacagaggcaccaaatttttaaatgataaactgaagaccttgaagagtagcattttaaaattacctgtcctaagtcttttaatcattgttcaatattcaataagtagatattacaatttaaattttagaagttggactctttctctaccatattagtgttcagtggtggtctgaaatgagtgggttttttggccaaaagggttaagctgcaaagataattgaatgacattttccagagtttcttgcggatatacaacatctcatctacctaagtgtttgtaacatgccaaaatctgttatgatcccacgtcagtcagtcttaggctccatatcctttttcctgtgtgtgtgttttctgcccctctatcctagagcctttcttgtcttctcactctttcctaaccctttgatgttcttagagagcctccatgcttattcttgtcttaaaggaaatgatctgctgaggcagaggtatttgccttttcacttgccaggcctgacttatgtttatatacctattccatttttctatataaaaaatgtatttgtctatacccaaagcccgttttcttgtttttgtttcctggtgtaagagatctttgtcagtatcatctttagaaattgcataactttttttctctttatttattttctcaagcacagagtttcaggaaaaagaaattttataactcttaacatcaccaccaaaaagctttttattaaaccacctttttgcttggcaccatactgagaaaatctccagcctcctcagatccttctagaaagtaggttagatctaaataataaatgaatcacaaagacaacatatgtatgagagtgattcccagctctgtttctgtgacatttcacagcatctctagaagtctcaagggattttacgaagataccaaattaatttggcttttcttgatcttgtgtgagccatgtacctctctcaagatgagaaacagtgaaatattttatatgaaatcataataggttgctatatctttaaacgggtctaaggaaatagaaaactcttactcaaaactccacttcttaaaatttctcaatacaaaatagttcaaatacctttaatttttgtaatttgtatttttttttacattttcaaaagaaaggggccttcatttgaaaagcaaaggaaacatttaatgtttgatattcttagatggatctggatattttttgtggaaggcaatgaaatgtcctatcacacctcctaacttttttcttttttttttttagttaacaaatttttaaaaaataaacaaggtcccactgtgttgcccaggctggtcttgaactcctgggctcaagtgaacctcctgcctcagcctcccaaagtgttgggattagaggcatgagccaccacacccagccaacttttcaatgacttgtctatcctatgcaacatgactgacttaggatagctgttagcagtcacaatgtgtggtaggtatccattaagtaagtagtttctttcatcttgagaaaggccatttgtaaaacagtgtgccatcatttgccatagcaaggcaatactgtattgccaaaagcctgaattctctgtaggatagttaatcagagaaatttatttcagcaagtgaattgttggcagaatgtgttgggccttagagtgtaagttctctagagggaagaatgcttagctttggtttaaaggggaggtcctctgcagttttagctatctggtgaacttgtctgtctttcctcatgagtgacagtgacaggctccgtggcagctccctgggctttcttgccagttgcacgcactgaccgtttgatatgttggcagacagagctgattcttggatgcgtgtctgaacctctacaggtctgcttttggcagaatcgagtgtgactcttatcccttacccattaagctatcattatggctttcttatctttatttcttctgcaaacatgcctttgaaagtgtttggctctttttaggcagtttgataatatacaaaagcagaaggcatgtgtcttatttctaaattatattgtattttttcaaaggaaaagaggacatcttaaatgaaggtttttcaaaataagttgacagctttgatggacttactttgattattgataagtagttctttcctaagagttcggtttagaagtccctgtgaaaatacacttaattgcttctgtttagcacagaaaaaattgtgtgttcctctctaagcctgatgtgttgcatatcataaactttttttttttttttttttttgagacagagtcttgttctgtcacccagactggagtgcagtggtgcgatctcggctcactgcaacctctgcctcccgggtttaagcaattccccttccttagcctcccgagtagctgggattataaacatgcatcaccacgcccagctaatttttgtatttttagtagagacgggatttcaccatgttggccaggctggtctcctcacctcaggtgatccacccacctcagcctcccaaaattctgggattacaggcatgagccactgcacccggccgcatatcataaacttttcttatcactgtgtattgttttggtatgtccagattaatatagcttattgaaggaaaacgaatttttgtatttggacttcagtgtttggggtgttcattagccaagcttggaagaagcatatttcaagaaaggtagtcctatgtaattgccatatatggagtctttttaaagccctgatctgatttactgtagttagagcaagccttagccgctaagagcgtaactaagaacctgcagtagataatgcttaataattatctctgtaacaaggctgcttctgtgctccttccattgagatgttaaagctgagtgaatttgttgacttaccatgatgtaaaacattccaaaattacttgttattcattggagtttgattctgtttggagcactcaactctgtgaagaaaagaggcactgtgaaaatggattccaaacatgggaaactcggccgggcgcggtggctcacgcctgtaatcccagcactttgggaggccgaggtgggcggatcacgaggtcaggagatcgagaccatactggctaacatggttaaaccccatctctactaaaaatacaaaaagttagccgggtgtggtgacgggcgcctgtaatccccgggcgcctgtaatcccagctactcgggcggctgaggagaatggcgtgaacacgggaggcagagcttgcaatgagccaagatcgtgccactgcactccagcctgggtgacagtgagactccatctctcaaaaaaaaaaaaaaaagcaaacaaacaaacaaacatgggaaactcttcccagctggttgaaggctcagagactagtgagcctggacttccttcaggtagtgcaccacttgtgggacacatggccatacacgggctccatagatttagagcagttttagtgtaattagaggtttttccctgcctgagaagccctttgtaaacagggtaggaaaaaaaattcttgttcatgatcttcattcattaaaatgaagccgttcacttgctgtgtgtatcaataatattttcattaactctacaataacaatagaaagactcaaaattatatttctgttgagaagggaacatacatatatatatatataatttttttttttttctgagacagagtttcactcttgttgcccaggctggagtgcagtggcgtgatctcggctcactgcaacctccacctcccagttcaagagagtctcctgcctcagcctcccgagtagctggaattacaggcatccaccaccacgcctggctactttttgtatttttagtagagacgggtttcatcgtgttggccagggtggtctcgaactcctgacctcaggtgatccacccgccttggccttccagggtgccaggattacaggcatgagccaccgtgcccagccgagaaggaaacttttaaagttaagatttgccatgaagtcttttgtggaataatgggcttaattcagggtgaaacaaataattgagcattaaaataacttttaaagcggtggttttctaaattggtatatattgataattatagaattcaaataatagttataaaaatgattttttgatttatttaaaatctcttgtgctagcacttctatttcctatattgtatggcaccctcttaatgtgccttttaacttaattatgtataggctttcttcttttatgtgtcactttaatcatcgagcataactgaagctcactaactttttgtttctataaaaaattgtaatgttatttcaatgtaatgagatgtaagcaatgaaaatgtagtgacaagataactggtctaggagtgagaagacccaagtttgttttttgggtttttttgtttgttttgagacggagtttcgctcttgttgcccaggctgcagtgcagtggtgcaatctcgactcactgcaacctccacctcctggattcaagcaattctcctgtctccgcttcctgagtagctgggattacgggcatgcgctaccatgcccggctaattttgtatttttagtagagacggggtttcaccatgttggccaggctggtctcaaactcctgacctcaggtgctccgcccatcttggcctcccaaagtgttgggattacaggcgtgagccaccatgcccagcctgacccaagttttacttatagctctgagactgatttttttctctaatttgttaataagttacttagtctctccgttaacccctattcccatccataaaaatgcaaaatgaaagttccaattaaaccgagtagcatagacttgtctctccctgccacttgcaactataaaacctggaaatgacacaacagacaatctggagaactctgaaagatagaaagaggatgatctggtcaggaacccagaactggcagaacagcagcagcaaagtgtcttacaaacccccacccaacataagaagggggcctgggcctgatgtttcttgaccttcaacctagcaacagaaggtggcccgggtaggctcattcctctcctagactgaatgagagtcctgccagcaatactgggccagcccagcaaaactggcaaggattggaagccccactaataataattggccgccaggggacttctgcgtctcccttccatgaagtcagtggagcaggaatagcaaagaggatctcattacaaccagcttggaatggacagcagtcttctatgacttctgtggtttcatttatgtaatataatactcttgaaattacaacattgtagaaatagagaacaggttcctatttgccaagagtcagggacgggaggggccagagcaaggtggatttgggctataaaagggcaccaggtatcctggtggccatggaaatttctgtatctcgactgatgtcagtatcctggctgtgatagtataccataattttgtaaaatgttaccattggaggaaacaatttatagggcaccaagatctgtctgttctttacagttgcatttgaaggtacaattatttcaaaataaaaagttttaatgttttcttaaaaaaagcataatgatacctgccatttctgtgctagggaatcattgtaagtatttaaggaggtacaaggtatgctgaggtgtgtcatcatatgggcccacatggtagcaatgggtcttatccatccgtgtgtctgtttcagcttgtatgttcagtattctactctaccttatccaaaaagcagttatagtagctttaatatattataatctttaataaagttcatttatcttgcagcaagtttgtttagggctttctttgaactgagcaccatattgggaataaaaagaatgggataagaaatgccatagactgagctcagtccatttcacatgtaaacagtcagtcataggatggatatagagctggggtttgttttgaaagctttgtattgtaacaattttaatatcttttttttttttttagatggagtctcactctgttgcctaggctggagtgcagtggcgtgatctcggctcactgcaaccactgcctcccgggcccaagcgattctcctgcctcagcctcccaagtagctgggattacaggcacgccaccacagctggctaatttttgtatttttagtagagacgggtttcacctatgttggccaggctggtcttaaactcctgacctcaagtgatccgcccacctcagcctcccaaagtgctgggattacaggtgtgagccaccatgcccggcaacaattttaatatcaatttagaatgcatcttagaatcaatatgattcttagtttaattgggagccttttgcttaaaagcttgatagtacataaataatggttgcatcttacacttagtaacatcttaggttcactgagatctggtgataatgtctaaaactattttgtgtaatctttatctgaatgttttacctgtcctgattttattaaacagaatttggggaggagatacttgttttctttagatagagtattaacaatttgagggtctgatggtacatttagtgaattccatgatgataatatattatttacatacacccaaatgttgaaacctcatttcttcttatctttttttccctttgtttttcaagtgtcgatatatagtatctggttttatgacaagaatgactgtcaccgcatagcaaaactcatggctgagtaagtatattactccataaatttaactgatgatatgtgagaaatgaaaaataatcccctcccacttctctttgttactaaagtctgccaactcatgtatttccccaatttctttttactgccaaaaacttggaaaaggctgaaaagctttaaaatatatataattattatcttaactcctcccagtgtgcatttcagtttccttccagtcttccttctttgtgtatatattaagtagatgtgtgtgattgtttttttacaaaaataggatcctactgtatgtatactgcttttcatatcaacagcatttttccagggcattaaatctttctctgtagtatttatgacagctgcattgtatccagctctatagacagatcatgatttaaccagaactttactgttggacctgtaggttaaggctgccaaactgcccggctccagaggatatctgcatcaggtgtacagcctgaccatatacagcaactctgatttaggttctgtgcagatttccactgtaacaagtgataccatatgtgatagcctgatagagaactcatacacacatctgtatttagttcttttaagtgaacttgtttttgacacagactctaggcttaacaggccccaatccactcatgggttgtgttccagaagattttttgtgactcagaaccttgaaatttagaaaattattttccttgaattaatgttctaaagggcagttcattgtcctctctcaagctagcctgtagaagccagcccttgtgtgacctatccgtattgctggactgccattctggattctggaagcccattacacggggcttcagggggcctgagggactacagagctctgggcaaaatgctataataggtagacggtatattctggtgcacctctgctttttttcagtttttgcctgaatcttctcagaaatgtggacctctctcccccctccaccatccccatctgtcaaatcaaaattccttttgctctcttacagttttcaatcacatgtttaaaagaaaataatcttaaattttttaacagtctaatcttattttatttttattttattttactttatttggttttttttagacagagtctcgctctgtcacgcagtctggagtgcagtggcgcagtcacagctcagtgcagcctcaaacttctgggcttaagtgatcctcccatctcagcctctcaagtagctgggactacaggcatgcaccaccactatcagctaattttttggggggtgggtagagatagggtctcactatgtttcccaaactggtcttgaagtcctaggctcaagcgttcctcccaccttggcctcccaaagtgctgggattataggcgtgagccaccatgccaggccaacagcctaattttaaactcatgaaagtatatataagtaattaacccagaatctcagttcatggctaaggccaggttgtgatctaagactactaacatgtcctgatcggaagttatcggccccctgctttgttgcctgttctggctgtgagcttgcagggcagggccatgtttattacttgtgtacaccccaagggcatcgttctgtatgaacttgtagtcacttatacttgaaaaaatgttggcttgaaaaaagagccacgctttgtttttagaacactttttctcttaaaaaagataaaactatttttcattttttaatttaatttttttcttttgagataggatgttgccgtattgcccaggctagtctcaaactcctgggcttaagggatcctcctgccttagcctcccaagtaattgggactataggcacaagccaccatacccagctaaaaccatttttcaacatagccatttattagatgatcacttgttttagctttgaaagtgacagcaaaggcagcttacttgtggttacctagaagacacagggttggctgggcgcggtggctcacgcctgtaatcctagcactttggtgggccaaggcgggcagatcacctgagattggaagtgcgagaccagcctgaccaacatggagaaaccctgtctgtactaaaaacacaaaattagccaggtatggtggtgcatgcctgtaatcccagctactcgggaggctgaggcgagagaatcacttgaacccggaagctggaggttgcggtgagccaagatcgcgccattgcattccagcctgggcaacaagagtgaaactttgtctcaaaaaaacaaaaacaacaacaacaacaacaaaaaggcacagggttgttgattcatggttatccagaaatccagattttttctaaactttggaatgtattaatatataaacactttctcctgcagaatgaggacgtgggctttgagtgaaatgatctggctcttttagctctaacaactattgaaagaaaaccgtttatctatcagggcaagtgttacccctaatgcaagatttcaaatgataaatgaagctgaagactgaaggcctatctaaaaatattttattgaacccagaaataggattaggagtagaaatggaaagctggaagggaaaagaagagcattggggcttctttcaccagaaatgcccgaaaagggacaattgcttaaattttcagcttgtttgactagaaacagatgtgttattaaaagtgatttgagcctgggcacagtggctcatgcctgtagtcccagcactttgggaggtcaaggcggggaggattgcttaaggccaggagttcaagaccatcctggcctgatatagcaagactcatctctgtttaattaaaaaaaaaaaaaaaaaaaaaagggaagaagaaaagaaagtgattagagaagccaggcacagtggtgtgtacctgtcatttcagctataatacttgtgaggcccaggtgggcagatcacttgggccccaggagttcaagatcaatctgggcaacatagtgagatcccatctcaaaaaaaaaaagtgattagagaataccctggtgaaactgttgataatgagttttaagtgtctggcctatttatagctgaagagaatattgtatgttaccattaactttgtgataaatgcctctctggtcaccaaaactaaagaagactatctgtctttgttctaaatctgcctgcataaacctgtttgttactttttgttgttgttgtttgctacatatttgagaatatcacctctactatccaaaaatactagcacagttcttgttagtatattatacatataaataaatgtgtccatcagtgcccattcttttaaatacagttcttcccatcactatttgacagccacaatataataaagatcctccaagtaaaaaaactgatttactccaggctgggcgcggtggctcacgcctgtaatcccagcgctttgggaggccaagacaggcgtatcacgaggtcaggagatcgagaccatcctggccaatatggtgaaacctcgtctctagtaaaaatacaaaaaaattagcggggcatggtggcgggcacctgtagtcccagctactcaggaggctgaggcagaagaatggcgtgaacccgggaagcggagctttcagtgagccaagatcgtgccactgcactccagcctgggcgacagagcgagactccgtctcaaaaaaaaaaaaaacaaaaaaaaaaaacaacaaactgatttactccaaacaatgtttataaaaacgagaaactatgtaggaaaatgagtgagcttctagaccctatgtcatctaaatttgtatattctctggtcagtggtggcagagttgaaaacccactaaacttagaagctgttgactctcctaaagaggaaatccagtctgccagaaactctttttttttttttttttttttttgagacagagtcttgctctgtcacccaggaatgtggtggcgtgatctgggttcactgtaacctccgccctcctgggttcaagcagttctcctgcctcagcctcccgagtagctgggattacaagtgcctgccactgcacccagctaatttttgtatttttagtagagacagggtttcaccatcttgacctggctgaccttgaactcctgacctcatgatccacccaccttggcctcccaaagtgctgggattacaggcgtgagccaccacacccggcctcagaaactctttttaacaataaaaagttgtttgacggtttggccacatagactatgtaaactttggagaactcatggaagtaagctttattcctgatcttacagacatcttaggggtaggttttggtgtttgaaaggaaaggagaatggcatgagtgctatccataaagtttggattagaagaggccttagagtccaagcctcgtttatgtgagagtcccttccattaccacccccgacagcttctgctttcagcagtggtgagctttataaaattacctgttctggctgggcgcagtggctcacgcctgtaatcccagcactttgggaggctgaggtggtcagatcacttgaggtcaggagttcaagaccagcctagtcaacatggtgaaaccctgtctttattaaaaatacaaaaattagccgggcatgatagtgcatacctgtaatcccagctactagggaggctgaggcacgagaatcgcttgaacccgggagtcgaaggttgcagtaagccgagatcgcaccactgcactctagcccgggtgacagagtaaggctctgtctcaaaaaaaaaaaaaaaaaaaaaagaaaaagaaaagaaatattcttctcttaaaccaaaataatcacagaatcacagatcctagtctgggtcagggaagagttaaataccagcatggccaagtcaggcaacatgtcaggaggtaggtggaaaacaggccgtgtgacagatcctttatgaagatggattcaggctgatgtggcctatatttgagcattaaataaacaattcatgtttggtcttattctcatatcccataccagtctttcagtctaccatgaagctcatgatgctacatttgttttagaagtaatagtcttattaagagctataattatgaatctagatagaaaaactacatgttaccttaaagccacattttccaaacaggaattctacctcagagtaaaattctatagtcaaataaaatttgagaaaatctataggcctgcccttcttggagaatcacaataaattttagcatgcttaaaaatcaactggccagttgtggtggctcatgtctataatcccggcactttgggaggctgaggtgggaggattgcttgaggccaggagtttgagaccagcctgggcaacatggtgagaccttgtctgtacaataaaaaaataaataaaacaaacaaacaaaaattcaatgggtgggttgtggtaattcatgcctttaatcccagtattttgggaggctgaggcaggaggatcacttgagactaggagttttgggaccagccagggcaacatatcaaactccatctctacaaaaataataataaaactcaaggattctgttttttctttttttttaagtcggtttaatattgtttaacccagtatttttaaataaaaaagccatctctgttcacctcttccccacactctaatgagagctcctgtgcaggctgggttttttgttttttaaaacagggtttcactatgttgcctgggctggtctcaaactcctgggctcaagtgatcgtcctgcctcagcctcacaaagtgctaggattataggcatgagcactgtgcctggcctgaatgaatcttaaaaaaaacaaaaaaagttgctttattaaaatttattattcaagcttgaaagcttgaagaaaaatataggaaataataaaatatgtatgtgcttaccacccagctttcagttcctaatattttgctgtaattgtttcagatctttctttacaagggagaagggggtgttcttaaaaactgaaagcccacttagtgatttttttttttttttggagtcaaggtctcactctgttacccaggctggagtgcagtagtgtgatctcagttcactgcagcctctacctcccagactcaagcagtcctcccacctcagccttccaaatagctgggactacaggcgtgtaccactacgcccagctaatttttgtattttttgtagagacggggttttgccaagttgcccaggctaagttggtggtttttaaaagggagaataagggaaaccttttatttgcttatagtgttactaacttttaaggattcaccaagacctctattttcaagaactgactttgtccttgctagcccagtgtcaatccaaactttccacagaggatttgttcaactatgcagccttcctgtgtcttggtggaactgtcagttttcatatttactttagcaattagtttgactgattttgaaatacttcaagggaaaaagggagaaaccttagtggagtttgtaatgcatctctgccaactctaggaaggaattctgtatttttatccttctgaagggtaaatattggcactgttaatgagacggtgaaatggtaagtcatttatttctgaaatgaggtaactgaagttctgtgttatatattgcaagaataatgtaatcggctgggcgcggtggctcaggcctgtaatcccagcacttggggaggcctagggcagatcacgaggtcaggagattgagaccatcctggctaacacggtgaaaccccatctctactaaaaatacaaaacattagccgggtgtggtggtgggcgctgtagtcccagctactccggaggctgaggcaggaggatggtgtgaacccaggaggtggagtttgcagtgagccgagatcacaccactgcactccagcctgggcgacagtgcgagactccatctcaaaaaaaaaaaaaaaaaagaagaatgtcatcatgtgacactcttagtgtatccttggaagatgaacaccaaaagaaatcttgggtcagattttgtttcaagaggcctttctaaaaccttgttcttctcctctagtgtggtagaagaggagacacggcgatcccagcaagctgctcgggacaaacagagtcccagccaggccaatggctgcagcgaccacaggcccatcgacatcctggagatgctgagcagagccaaggatgagtatgagagggtgaggctctctgggtacttgggtgctgaccagggaagaccaaaacgggaggaggaggtctgcaggagactattttactagggaagctggcctccagggacggcagaaatataagttcaaaaagagagcgtgttagcacactcctgtaatcagtcccagctacttggcaggctgaggaaggaagatcacttgactccaggagttggaggctgcagtgggctatgattgtgccactccactctagtctgggcaacagtgagaccctgtgtctctctttttttttttttaaaacagatgtgtcttacaattttaaacctaaaacataaggaaagaacttgcttaccccagattacttgtttttggcaggaaaatttacaatgcttttttctattcctataagattactatgggagaagatggtcttggagtgcagaagttagctcgcagcagctagttctggtaaagcttcgtgcctcttcttcaccactgcagtttctgttaggatcctcagtggtcctaggaatttgtttaggctttgaaaagtattctgatagtttgtaccacataatactaaaaaatacactcatggtctgtaattggtggtagatgcacaaccttcattaagcttcatttggaattttacccaaatgagaggcttttctgaaattcactgttttctttctcttctgttgtgcattttagtttataaattagctgataaaattttctcccaaaagttgaataaaatggcaattgtggtactttcgttaatttattcaatacctgcttatgaaccatctactatgtgcaagcagtgggcatttcatggttatgactctcctggaattttacttggcacctcaaagcccccacacttcactggagtgagacaagctctctactgctgaactttgttttagcagaattatactgtcaccttactcttcattaaatattgaattaagtgctttcctttcatgcctatttcacctcaccagaacttcaaggaacaaaatgtgaaaaagcactgtccaaaagaccctgtttcccatacagttctgctataataccagctactaagttattaatcagtgatcctgaaaaaagcttcaaattggcaaaacgagttaaggtactgttgttagcatgactcttcctcctcccatcctcttgggactttacagagctcaaaactgagaggtcctgcaataagtaaaacaataacaccaattcccagattgacttgactgcaggaccattttttgcatactgccctttaacaactcaagaatttggagttcaggaaaaagtttgaaaaaagtgttctgaaagatagtttcttctgactaaaaataggcatgttcaccataaactacatagaccttctacattctgataacaaaggaagtcccacctccagggtggagaaatgtacatgagagcccatgagaagtttcaagtttgtaccaaattcttcaatgtctcacagagaattaggaggaatgaatggatctatggaagttaaatttggaggagcagtcacctctctaataaattaatcgattcttaggaaaccaaatgagaactaacttcaagaatggctttctgatttagaagttaccttacattcccctcttctacccttgatgacaagcggattttctacgtacatactttgttctgtttgtagagccctttcagtgttctcataggtacctagtaagtccagggctctgtcactcatcctgagtaataactgtatcaaggtaccacacgggacagaaactgtaggtgctgcgcactaaagcagatactccagtaagtggcctggcttactcaggctgagaggttaagtagccacaacgagaaagtaggaaataagacattagctttgaacacaaaactttaaaggaactctagggtcaggtgggcaatctaaacatctgacattattttgaattatatcaatattacaaaaggaatatagatagcatgatagtttctgttttaaataaacttctttcacactatggaataaaatatcgtctatgggtagattaaaatgaaaccctttgggatttggttaaatctttgatatttactttatcatgtgttctttctgattttgaaaactgtctgcaataggtggagcttctttgaattagagttttgttctcttatctgcatttgtctatcatctcatcagatggagctggtataagcagtgacccatgaattcatgggtcttggtgtttggatgggctcccttcagctgccacattttttcagacggcccctttgtttatctttaggtgaagactcagaagattggcaatcaagggcaggggtgcaagctaggcctcagtgttgggatttaatcctgattctgagtctccgctatctgctgagtatgatataatgaacgaaatttcagacttttgaatgagcacttgtaataatgagactcttttcttttttcagacagggtctctctgttgcccaggctggagtgcaggggcacaatcttggcccactgcagcctctacctcccaggctcaagacattctcccatcttagcctcccaattagccacgactataggccatgcatcaccatgcttggataattttgtttattttttgtagagatagagtctcactatgttgccctggctgatcttgacaagctcctgggctcaagctgtcctcccgccttggcctcccaaagtgctggaattataggtgtgagacactgtggccagcctagagactgtttgaaaattaaaaatctgtataataagcattttcttcaaaagaaagatattgcacttctataatatcttttaattaactttcctttttttttttttttgagatggagtctcgctctgttgccaggctacagtgcagtggcgcgatctcgactcactgcaacctccacctcccagattcaagtgatcctcctgcctcagcctcctgagtagctgggactacaggcatgcaccactatgaccggctaattttttgtatttttagtagagacagggtttcaccatgttggccaggatagtctcaatctcttgacctcgtgattggcccgcctcagcctcccaaagtcctgggattacaggcgtgagccaccgtacctagcctcaactttcttattttttatgtaaagaaagatagttgaaaccacacttggcccattatgagttgcttctagccataggatgtaatcctggattttggtcaggggggtgcggatggttgtttgtttggttttagtttaattgcaaaacagttttttaaagtccagggtatttttgttcttaaaaaatagaggccagacacagtgactcatgcccataattccagcaccttgggaggccgaggtgggaggattgcttgaatccacgagtttcagaccaccctgggcaacatagcaagaccttgtctctaccaaaaaaaaatttttttttaattagttaggcatggtggcacacacctgtagtcccagctactccggaggctgaggcgggaggagcacttgagcccagcagttcgaggctgcagtgagccatgattgaactgctgcattccagctcaggtgacagcaagactctgtttcttaaaaagaaaaaagaaaagaaaaaaataggataggccaggcgctgtggctatgtctataatcccagcgctttggaaggctggagcaggagaattgattgaggacaggcctggtcaacatataatgagatcccatctctataaaaaatttaaaaatcagccaggtgtggtggtgtgcacctgtggtcctggctgtttggaggctgaggtgggaagatcacgagcccaacagctccaagttacagtgagctattattctgccactgcactccagcctgggcaacagagcatgaccctgtctcaaaaaacaataaaaataaataaatacctaaataaacatgaacaccattatttttcttattatgtaagcagtataaactatagaaaagttttttctttttttaaaacagcttacagagaacgttttatattcaaaaattacagtaaacaaaaagaagaaaatatcatagttctaccacctagaaataatcactgctaatactttgttacgtatccttgcaaaaatatgtccaagtgtaagtggtatgtttgtgtacattagatttattaatgttctttggtaacctgttttgttccaaataactatcttttttattgacagtaactattcatctcacagagaatccctatgagatttcctttggtagaatgaagtttttgaaaaaactgatatttatagctgtgtatttttccttatgtgcattatataaatgataccctaggcttctctaattctattaagaacttggcgatatatccttatagctaaatccttgtaaaatcctcatgtacagcattaactttttattaggataaattactttaaatggaattggtagatcaaagcatttttatgtttttaagatttttaccaaatattataaaatcaccctccagcaggtttgtctgattgcccattttccctcatttttacaaacactggatgctgttattaacaaacacaaaatctccaagaaaggccctgcacaagtatcagaaatacattaaattcttgagaactttcattaaagtacaacctaacaatataagccagttttattgcttatacttaagaattgcaaatcaaatgccccaagagccagggaagccatggtagtgagtaaagcaggccgggtggaactgaagcaggttgagagctagttcgtatgtaaagggtcatttacagcccagctctcagttattgccgataaggttttgcaaccttatccagcctgtctctaaaaattacaaatctggggcttggggcagtggcatatggcttccagcactttggaaggctgaagcagatagattgcttgagtccaggagtttaagaccagcctggggccgggtgtggtggctcacgcctgtaatcccaacactttggaaggctgaagcgggtggattgcttgaggtcaggagttcaagaccagcctggccaacatggtgaaatcccatctctactaaaaatagaaaaattagctgggtgtggtggtatgtgcctatagtcccagctacttgggaggttgagggaggctgaggttcatgagaatcacttgaacccaagaggcgaaggttacagtgagccaagattgcgccactgcactccagcctgggtgacagagcaggactcagtccacaaaaaaaaaaaaaaaaaaaaaagaacagcctgggcaacatggttggtgaagtcccatctctacaaaaaaatagcaaaagaaaatcatagcttgctgcagccttaaactcttgggctcaagtgatccacctgtctcagcctccaccatgttggtcaggctggctttttttttttttttttttttgagacggagtcttgcactgttgcccaggctggagtgcagtggcccaatctcggctcactgcaagctctgcctcttgggttcacaccattctcctgcctcagcctcccgagtagctgggactacaggcgcccaccaccacgcctggctaattttttgtacttttagtatagacagggtttcacagtgttagccaggatggtctctatttttattttttgtagagatggggtctcactatgttgcccaggctggtcttgaactcttggtctcaagtgatcttcctgcctcagcttcctgaagtgctgggagccactgcttccagccccaactttttaatgtttctgaacatttataccttctgttttaagaacttgttatgaacaatattttaactttatattttctgtaatataattcagttccaagcattccacataatggggttgatatggttgatagtgatgttgcaaacagaggcatgttaaaagattgagatatttcataggctttcaccaaatgttccgccgctattcaaattgataacactgagtaaatgatgttctgaaataatataaggattaagtcatttgggtgggaaaaaacacatgccatccatttaatatttgagtacctactcctgtgataagcattaattgtctgtagcatggtatcaagaaaatctgtctgtgaactgagtttagggctgctttttaaaaaaatctcatatcttgcattttctgaactgtttttggtgtcggttttggcatggatgatgttcatcagatgccggatcagatagcacaaatattcaagaattcataacccataattccatgtccatctattggtctgatcattttttgaggattctttttaagaacaagattattttcatttttaatgtcatgagcacattaatggtaacttaataatattagtacaattagatgtccatatgcgacaaaaaaaacctaacctaataacatcttagagaataatcaactcaaaatgtgtcatcgatgtaaaatataaaactataaaacttttagaagaaaaatgtatttatcatatgacccaagaagtaccactcctaggtatttaccctagagaaacaaattttgccaggcacgatgtggctcacgcttgtaaccccagcactttgggaggccgaggagggtgaatcacctgaagtcaggagttcgagaccagcctggccaacatggtgaaaccccgtctctactaaaaatatgaaaattagctgggtgtggtggcgcgcgcctgtaatcccagctactcaggaggctgaggcaagagaattgcttgaatctgggaggcagagagcacagtaagctgagatcaagccactaaaatccaggctgggcaacagagtgagactccgtctcaaaaaaaaaaaagaaaaaaaaatttttgtccacttaaaaacctatatcaatgtttatagatgttgtattcataattaccaaaaaacggaaacaacacagatgtgcttctgtgagtgaatggttaaacactcacgtatttatataatgtaatactactcagcaataaaaaggagtgaactattaataccatacaacagcttggatgtaccttaaaggcattatgctaagtgcaagaagctggcattctacttatatttcatttatatgacatctttgaaaagacgaaactagagtgagagagaatagacctagttgccgggagtggagggagggcatgactgcaacaggacagcacaagggaatttttttttggatgatggaactgttttgtatcctgattatgctgatagggacataaatagaactgtacacccccttaaaaattcatttcaccatatgttagcttttatttgaaaataaaatcaggctgggcacagtggctcacacccataatcccagcactttgggaggccgaggtggatggatcacaaggtcaggagtttgagaccagcctggccaacatgctgaaaccctgtctctactaaaaatacaaaaaaaaaaagaaaaaccagctggacatggtggcttgcacctgtaatcccagctactcgggaggctgaggcaggagaatcgcttgaacccaggaggcagaggttgtagtgagccaagattgcgccactgcagtccagcctgggcaacagagcaagactccatcttggaaaaacaaataaataagattaaaagaatatgtgataaagtaataccattatctttttcttaaaaaggtgataaaaataacagttgtggccaacactgttgtctaaaattaggtgctcaatgttctagaaattttattgcatgttatttacattggagtacagagcaaacattttgaggttggtttttcttcttctttttaaaaaataacatttttgataacctcagatgctgttttgtgagccaaataatagcaaatttttttcacaagatatatttttttcttttaactttttaaagaatcagatgggtgactcaaatatctccagccctgggttacagccaagcactcagctctccaatctgggaagcaccgagactctagaagaaatgccctccgggtcacaggataaggtttgtacagctaaagctctagctttgtcctaagtaacaaagagtaacattcagtaaggattctaatgagtgcaagtttgatttgtcagttgtgtcaaggttcaaatgtgcagcaacataatgacatcctcctaggtcatgatccgagtaactgtttaatctggattttgcagtagcctgctacctggtttcccatcttttgctccctggttgcttcttacctattcttaacccaacagccagagtaatccttgcaaaacataagtcagatcatggcactcctctgcttaaaaccctccagcagtgtccgagctcactcaaatcatagccaggatcatgacagtggcccacgaggccctaccttatctggcccctctaccccaggcctcatctgtcactctgcattgctcacctggctccagtcccattggctctcttgtctttccccaaatgtgccagatatgttcctgcctcgagacaggcctttgcacttgttcccttggcctgtaatactttcctcccagatagggcttgctccctttactccctcaagcctcatatgtcctccataagtcaggccttctctgactaccctatttaaaataacccttggctaggcacagtggctcacacctataacgccagcactttggaaggttgaggcaggcagatcgcttgagcccaggagtttgaaaccagcctggccaattgacgaaaccctgtctctactaaaaatacaaaaattagctgggtgtggtggcacgtgcctgtaatgccagctactcaggaggctgcagcaccagaatggcttgaaccctggaggcagaggttgcagtgagccgagattgcaccagtgcactccagtctgagcaacagagtaagactctgtctcaaggaagaaaaaaataataacagtaacaccccttggacaggcacagtggctctcgtctgtaatctcagctctttgggaggccaaggcaggaggatcacttgagcccaggagttagagaccagcctgggcagcatagtgagaccccttctctagaaacaaattttaaaattagccagacgtgatgtcatgcacctgtggtcccagctaattgggaggctgaggtaggagcctcgcttgagctcaggaggtttgagattgcagtgagccatgatcacaccactgcactccagcctgggtagcagagcaaggccctgtctcaaaaatttaatttaatttaatttaatttaaaaataaaataaaactcccaggtgcagtggctcatgcctgtaatcccagcacttcaggaggccaaggcaggcagatcacctgaggtcaggagttcgagaccagcctggccaacatggcgaaaccccgtttctactaaaaatacaaaattagccgggtgtggtaatagacaccagtaatcccagctattcgggaagctgaggtaggagaaattgcttgaacccgggaggtggaggttgcagtgagccgtgattgcgccactgcactccagcctaggcgacagagcaaggctctggctcaaaataaataagtaaataaataaaataaaacaacccttcctcacctccatcctcttactgtactttattttctcactaaggtttctaaccagctaagatggtttctgtttttgttttttgtctgtctcctgcccaccaaaatataagcaccatgtaaaacagttttgtttttttgtttttaagctgtctcttacgggaaagaagggcagttttatgagccttgttcattgctgtatccttagcatgtagcactgtaaatatttgttgaattagttctctttataactgatagtctgataaaagaacagatatcaaataaaatccgtaggtttttaagtagactttttgttttgagataattacagatttatatgcagttgtaagaaataatgcagaaagatcctatgtacccattacccatttgcccattgataacattttgcaaaatatagtacgatatgacaaccaggatattaacacaatccacacatgttgttcagatttcctttgttgtgtgtatattcagttctgtgtaattttatctcatgtatagctttttgtatatccactaccacagtcaagatgctaaatattttcatcacccccaagatgttttgccctttcataaacacactgacttccctgtcataccctattctgcctctgcgtctacctctgcctccccgatcccgccatcgtttagccctggcaactattaatccattttccagttctataatgtcatttcaagaatattatataaatggaatcatatatataacctcttgagattgtctttcttcactcagcataattcctgaacatttcactgaagttgttacatgtatcaagtttgtttccttttattactgagagtattacatgatacgcaagtactaaaatttgtttaactgtttttggcaactcacttactgaagaacatctagattgttttcagttttgggttattacaaataaagctcctatgaacatttatgtacaggtttttatgtgaacataaatcttcatttctctgagataaatgcccaggagtgcaaatgtcaggtcatttggtattgcatgttttagtttaataagaaactgccttgggaggccaaggcgggtggatcacttgaggtcaggagttcgagactagcctgaccaacatggtgaaaccccgtctctactaaaaatacaaaaattggacgggcatggtggtggtggtacctgaatcccagctattcgggaggctgaggcacgagaatcgcttgaacctgggaggcaaaggttgcagtgagctgaggtcatgccattgcactccagcctgggcaacaagagcaaaaccctgtctcaaaaaaaaaagaaagaaaccaccaaactgttttctaggaagtctgtacagtcttacattcacatcaacaatgtatccaaaaatgtttttagatatttagataattaatttaaaccaaattttgtattctaccttcccataccccatttttactgtatctggatttaggatcatcatccaggagtgtgcagtgggcttactacttcccctttctaaatcatgaatcacttcatcttccttttgtgaatcatgaagttaaggattattgtaccgcctaatgcagatttgttgtgagaccctaaggaagaaatggaccagaaaaaaatgacttaagaattataaggtcaggcatggtgactcacacctgtaatctcgggactttgggaagtggaggcaggcggatcccttgagtccaggagtttgagaacagcctggccaacatggtgaaaccctgtctctaataaaaatacaaaaattagccgggtgtggtggtgcacgcctgtaatcacagctactcaggaggctaaagtgggaggatcacttgaaaccaggaggtggaggttatagtgagccaagatcgcaccactgcactccagcctgggcgaccaagggagaccctgtttcaaaaatccaacaacaaaaaaaagaatcagccaggcacagtggctcacgcctgtaatcctagcactttgggaggccaaggcaagtggatcacctgaggtcaggagttcaagaccagcctgaccaacatggtgaaaccccatctctactaaatagaaaagaaattagccaggggtggtggcacatgcctgtaatcccagctacttgagaggctgaggcaggagaatcgcttgaacccgggaggcggaggttgcagtaagctgagattgtgccattgcactccagcctggccaacaagagtgaaactccatctcaaaaaaaaaaaaaaagtcataaagcactgtccattgaaagatgaaaaatgagtgtgacaagccatagatgctaagcctttcaacaatagcactgcgtctgtagacatacagaactcaagtggtacagacagtgctgatgtgttattccgtcatttttcatatacttttaaaacttcacgtttggtcgggcatggaggctcacacctgtaatcccagcactttgcactttgggaggccgagacaggcagatcatgaggtcaggagtttgagaccagcctggccaacatggtgaaaccctgtctctactaaaaatacaaaaagtagccgggcgtgatggcatacgcctgtaatcccagctactcaggaggcagaggcaggagaattgcttgaacccaggagggggaggttgcagtgagccaagatcgtgccaccacactccagcctgggcgacagagcaagactccatctcggggtgggaggaagactccattatttaggttatagtgacaaaattttatgaaatactgagatctggatattgtcagaagtcatgtgattgactaaagttagtttaaatttatcatcagccgccacaggcagatactacatttgtttagtaacactgccatctagtgctgaggagcaagtactgctgtcaagccttaatagtattacattccatttcagttgcataattcacttgtttaaacttttcttgggattgtttctgtagtgtattttgttattgtttgtttcctatgttcaagaatagtgcctatcttatagtgtgcccactgcagtgaccagtagctccaaacagacatgtaaaattctctaaacatcaattctccgtgggatgaggagtgaaccatattaaacctgatgctgaagatgataattttgtcctgtgctgtacatgctgttgctcgctgaatgccatttcctgagctaaacggtcagactaacacttgatctacatgaagtattaaaaaactcagaatcctaacttgaagcatgttcaagcatgaggaaagaataacattttaccttttctgtggatgatggaaggttaattcatgaataaataagcccagctactagaggagggcaaccagtttttcttatcagaaacagaaaagaatgcagagactgtgaaacttttgggaatttgtgtgaagagaaatattctgctcacccaggctcctatgacaaattcaaccagttaggtataatcatgtgtcatttaacaatgggaatactttctgagaaatgtgtcattaggcgatttcattctccgaacatcatagagtgtatttatactttcacaaaccaagaaaccaagatggcattgcctactaacacctaggctcgatgggatagcctatggcttctaggctacagacctgtgcagcacattactgcactgcgtattataggcacttgtaacacactggtatttgtatatttaaccatagaaaaggtttagtaaaaacacaatattatattcttatgggaccactgttgtatatgcagtccatcattgaccaaaacatggtttgtgccaaatgatagtatttccaaacgttgatgcattttgatctgtagccacctcagttattcaaaccttagctgtacctgttttccggaggtaagtatcaccatccaggtgattaggtaacctatactttgctgaattgacatctccatatggtggcacactgcttaagaatgtagactgtattgttagaactgagttggagtctggttcttttgttgtatttgggcatcatctataaagtagcaataataatttacctactctagcagatgaatagagtaatacatgtaaagtgcttagcatatcgcctcccacatagtaagcattctgtgtatgatgattcattattaccatcacaaattcgtttattctctcttatatgagaaaacctccaaaactgtaatgctttaccatactccccattctagagaaagttagagaatctgtctggcctcgcagtagttatagggaggcagcatagagaatctagaaactttctgctgcttttaaagtcaggggtcagggttctaccatatggtggtttcatattttaatttaaagtaggtgtgtgtgtttgtagagacaacgtctcactctgttgcccaggctagattgcagtggcctgatcatagctcactgtaacctcaaactcttgggcttaaacaatcctcctgcctcagcctcccaagcagccaggaccacaggtgcacaccaccttgtgcagctaatttttaaattttttgtagaggcagggtctcaatatgttgaccaggctgatcttaaactcctggcttcaagcaatgcttccgcctaggcctgccaaagtgctgagattataagcatgaggcactctgcctgacttaaagtagatttttggctgttcaaagttaatttatgtttcactggacaaggaaaaattgctgtctggattatgcctcaggtgtattttgtgatgaggtttctccatgtcctgccatttgattattccttttcttaaatttctgcaacatagacccaatctgatctctgtttttcaaagtagtttatacctaaatattggtttgtgtgtttgtatacatatgtctgtaatagaatggggtggttatgagctgtttaatttgcattaataagaattagtcttgttggccaggcacggtggctgtaatcccagcactttgggagccgaggcagacagatcacctgaggtcagaagttcaagaacagcctggccaacatggtgaaatgccatctctactaaaaatacaaaaattaactgagcgtggtggtgcatgtctgcattcccagctacttgggacgttgaggcaggactatcacttgaacccaggaggtggaggttgcagtgagccgtgatcacaccactgcactccagcctgggtgacagcaagactccatctcaaaaattaaaaaaaaaaaaaaaagaattagtgttgttttccaatacttttttttgctaagaaacctgacccatttgttttctaaacatataatgtgtataaaaaggaattaacccaattcaaaactgggtaaaagattttaataggaatctccatataaggtatacaaatggccaataagcacatgaaaagatgctccacatcattagtcattagggacatgcaaattcaaaccacactgaagtatcacttcatactcattaggatggctaatatcattaaaatggaacatcacaagtgttggagagtatatggaaaatgctccatatactctgttacctcatatactgctgtatactggcaaccatgttggattgctggtgataatgtaaaatggttcaggcactatggaaaaaaacagttcggtgattcctcaaaaagttaaacttggaattactatatgacccagcaattctgctcctgggtatatacccaaaagaattgaaaacagacattcaaacagatacttccacaccagtctttatagcagcagtatttgcactagctagaaggtggaaacatctcaagaactccagtgtccattaatggatgaatggataaataaatgtcatatatacatgcattggaacattattcggccataaaaataagtgaagttctgatacatgttggaacacggatgaaccttaaaaacaacaacatgaatatactaaaggccactgaattttacacttaaatatggttaaaatggtaagttttatgtatattttactacagttttttaaaatagggagataaatgtctattgtgctgtcagtagacatttatgatgccatgaattcacaagtgactaagtcacagtgttcagtgtagtaaatggaacctgtgaacatgtctgcagctatgtggcctggacagagaagtctgtcccaagggagaatttgttgtctattttgacctagatggaatgggtttgaaatattaccagacagctgtgtccttgatgattctttgcattgggagtgaccaggaggtttataatagcctagccttggttatcttaccaggtgttttgttgttgtcttgcattgtgggatatgatattccaggagcatttaatgaatttttgtttggtactccatgcttgctattaagaccacatggtgggccgggcgcggtggctcatgcctgtaatcccagcactttgggaggccgcggcacgcagatcacctgaggtcagaagaagtttgagaccagcccgggcaacatggtgaatcctgtctctacaaaaaatacaaaaattagctggatgtggtgacgcacgcctataatcccagctgctcaggaggctgaggcataagaatcgcttgaacctgggaggaggaggttacagtgagccgaggtcacgccaccgcacttgagcctgggcgatagggctagactgtgtctcaaaaaaaaaaaaaagaccacatggtgtttatgtgattatagtttaagccaacttcaatttaatgctttttgggcaccagacattatattgagaatttaattttcacaacagtgttctgagatcattgtcacaatgtcctcgcttttcagataaggaactaaattagaaggattatgctgggctcaatggctcactacaaaaaatttaaaaataaactgatcatggtggcatgcacctgtggtcccagctacatgaaaggattgtttgagtctggaaggtcaaggctgcatgagctgtgatcacaccactgcactccagtctgactgaatgagaccctgtctcaaaaaaaagagaaagaaaaagaaagatgatgtaattttcccagttaacagctgaggtatcttttatttcagaccctaaactctacagtttttttcagaagtaaaaatatgaagaaattgaaccatataagatctttagtatttttttgtatccatggtctaaaattagatactgatgctgccttatatttgaagtgagagtctaacattagtagaatctctttattgaatatttttaaaggtgaaatggtttggtatgaagctacaacttttttacaactgtgggaggttcttgcctcttcctccacaacagttactttttactgactacattttttcagacctgccctgtccctctcacctagcagatgatgctgtcctcataccagggagagaagacagaatggcactcccttaactttctgtccttcacatgcaaacttgcctgcatgctcatcgctgctggccctctttctctgttgtctgacaggagcccctcctgacacaggatctcttgccttaagctccctctcctcatactgacttccccctactccccgaaagaactttggaagagagcactgttgagtgtctgccatgtactgatgggatctgtggtcctgggtggtggtgccattacttgggtaggcaagtccaagagcaagaaaggcaaggattggggaatacatgagaaagagagcccctgccttggcaaattcgctttccatgttgttaggagtgctgacattaaacacacacttcctgtgtgctgggttccatacatttcagcctcccaccagacctccctactttatagaggcctgagactcagagaagtggacagcactcctcaggccacacagctggaaaggagcagagccaggcagcggcagtcatcttcaggccctgcctgtgggtggttgataggacatcacagctgtgtcgctgcagcctcctgaggggatgcctttgctcccttgacttgtattaccatctttgtgttttaataacccaaaatgaaattaccgttttgtgttctaagtcagtacctccaggttctagatgtcccacagagacctccagacatgttcacaactaacttcagcttccccctctccctaaccctaggtgctcttcctgggctgggctggcctgcccaggcagtgataccaccacccaatacccagataccagggtgtcctctaggctccctgctcctacctgaccagccaccaactccttccattccaactccagttctcatcctcttctctgccagtatcttagtccagactctcctcaatctcacccctacaatttgtcctttatgtggccgaccaagtgcacgttctaaaatataaagcctgatggctcatcccctggacatgttgccattgccctgtggataaagtccagatcctctaacgtgtctcagatactctgcagtctgcccgcttcttctctctttccctgtcaccctcctacccagcctctgatccagctgtgctgaagcacgtgtggctctcagtggctgtgctccccagccagctcgcctcatccctccccagtttcactcctcttcctagtgccttccttcccactgagctctgcaactctgccttgtgtgtgtgtgtgcgggggtccggtgggggggcccttaccagttgtcctggcctcttttttcacatcacagtcacagcacaatgcctggcacctgataaattcaagaatttttatcaaatggatgaaacatttgcctggacaaaactgggtttgttttcctgtagaaatgtgatcataccatagtcttataatattgatattatactaatttgcagtgtactttggggccttacagactttctgaagccttgagaatcatgtgtttcagtgaactaattttttcagtataaacagatctaaacaactaattcactcattttaggaataaaaagttgaggctgtctgtgttttcaaagtgcttaggtgtgtctcccactaaaatgtaagctctgtgagaactgttgttactcccttgctgcatcgcgtgggcccaggttagagcaagacctggcaccctgtgagtactcaggaaataaaggttattgactatggaaatactgcttaaaagtacaggaaaacacgaatgtttttcctttgaacgattatggtatcaataagccaacttactaaaatatatataaattttaaattgtcaggcttacatgctttttctgaagaattctgtgactagggactaaggcagtgggagttggggatggcccactattaaatggctagatttattttctgatatttgagacccagtctctgaggtccagtgcctagcgtttcattgagaacagtgaaagtaaaggtagaatcacctgattagcatttggtccctgtgtctcctctagtgtcatttccctgtgtgttgttgacatgaggcaattgggcacagtcagctttgccaagaaaaagaatggtgaattctgatcctgctacccagagaccctaaaaatttgaattatattaccaatgcaaatttccatccaccaacctggggacactagatgaacctgggccttaatccttagtatatcttcagttttttccgttccttattttgatactccatccatccttgattctgcaaaatctttggcttctggaaaagaagtttggttatgctgatttataacagacctctttgactgggtggtttcatttgtttttcagtctgctccatctggacacaagcatctgacggtagaagagttatttggaacctctttgccaaaggaacaaccagcagttgtgggtctggattcagaagaaatggagaggttgccaggagatgcctcccagaaagagcccaattcattcctaccatttccctttgagcagttaggaggagcccctcaatcagaaaccctgggtgtcccttctgctgcccaccattcagtccagcctgaaatcaccaccccggtgctaatcactccagcctccatcacacagtccaatgaaaagcatgctccaacctacacaatcccgttgagccctgttctcagtcccactctgccagctgaagctcctactgcacaggttccccccagcttacctcgaaacagcaccatgatgcaggcagtgaagaccacgcctagacagaggtctccactcctgaaccagccagtccctgagctaagccatgccagtctgattgccaaccagagccccttcagggccccattgaacgtgacgaacacagctggcacatccctcccaagcgttgatcttctccagaaactcaggttgaccccacagcatgaccaaatacagacacaaccacttgggaaaggtgcaatggtagccagcttttctccggcagctggtcagctagccacacctgagagcttcatagagcctccctctaagacagcagcagcaagagtggcggcctcagcctccctgagcaacatggtgcttgctccccttcaggtaatggcaggagggtgggggtgggcagagtgggtaactgtaactggatgggatgaaactacagagaccttggttttaactgtcatgacatgacaatttttagagttgtccctttaaagtatgtcagaggctcggagacaggtgaggtaagaagccctatcatgaacaaccaagtaatttatattttcctatcgggatattcactttagtgggggttgtatgtttgttttgcttttgcccagcagttccaggagtcctcatttgactgaggaccaaattattccaaagcttaactccctatctcccacggcagtctcctagagtgcctaccttgtgccaagtaccctagaggtgccataagagcatcctagactcgaaggtatgaggtcaaataaagctgattttttcaactgcccatatttacatcaccttataaagaggtgccatgctgcctagatctcttatctctacagactcagcagcaaaaatatgcccaggctgaaggacagatatcacatgttcttactttatttgaactcatggagatagagaatagaaggatggttaccagaggctgggaagggtagtgggaaggtggggggaggtggggatggtgaatgcatacaaaaaaaaaaaaatagaatgaataagacctgtatttaataacacaacagggtgattatagtccataataatttaagtatatattttaaaataatgaaaagggtataattagattgtaacacaaaggaaaaattcgtgaggggatggatgccccgttttccatgatgtgattattatgcatcgcatgcctgtatcaaaacatttcatatacctcataaatacatacacctatatacccacaaaaattaaaaattatatatattcctgggctgtctctggcttttataagagacacaggtttcaggtttttctttaaagatacctgaaaggctctgcacacaccccttccctcaggagctaaagaggagaggctgtcgcagagctctagtgcagttgaattgttggctgcatggttacaggttcctgtcagactcttcccttgggaatctaggaactagttaatatctgaaccattttctgttactaacctagattttccactgggaaagtctttttcaattaagactaggaagtcttcttaattgaaacttcttatatccgtctgtcttttcttcataaacatttcagtctatgcagcagaaccaggatcctgaagtatttgtgcagcctaaggtgttatccagtgccatcccggtaaggactcgctttttttttttttttttttttttttttttaagactagtcgggtgccatagtgagaaagtagaaagagtagaacaaggaatttggtctgtaactggctgtgaacagtcaggtgagataattcactccctttggaccagccaggactccctctttctgaagaacacattatttttaagttctgctggatgtgaagtaaaaggttgtcagcttagtgaaaagagttagctatggagcccagcacatcttagatgcctttcctaggccaggtcctctcccaccccgtcctggcagagtccattgctgtggcttctgtggatctcgaggcgtctgcatggatatcttccctgactgtgtgtgtagagggcacggtgggcccttactcggtatttgtgaatgggtgactgctaagagtgtggtagcctggcttctataagtaggaaatactgccctggaagagctgtgatgtcccaggtggcagagccactatcctgctatagtcctctcatttcccattgctctgagaacaaagcctcccaggcctgtgtcttctgtcccatttgtcctcccttgcttcattttttgttgtccctactctccatcacccactaaccttgcaatgcacacaggtttttttttagctccctaaagtcatttctgttttcctttgagcctttgtaccctccttgagtcttggagtttaaatgggaaccagcttctgactggtcttacatcttggagtttaaatgggagccagcacctgactggtcttggaaacgagcctcttttctatgtgtcttgtccttctgcatggtgatctatctcagcctgcttttgcaccaaaaataaataaataaaaggtaaatagctcagatgccaaaaaccataccgttgaaactgtggcccgctctgtgctctttgtaaatgaggaggtgacatataagagaaagaaatgcagatctctgttgattgtatcaaatctgacaaatactgaaaatactgattattactggtttaatgtattcagataattagctggaattagcctagaagcacatctaaatggaggagagaggtagatgttagctttattttaagaaattttctcattgctatctataatagtataaaaaaatagattgaacataactggatttttttttttttttggaagcagagtcttgctttgttgcccaggctggagtgcagtggcactatctcagctcactgcaacccccaccttctgggttcaaatgattctcctgcttcagcgtcccaagtagctgggattacaggctcccatcaccacactccactacgtttttgtatttttagtagagatggggtttcaccatgttgatcaggctggtcttgaactcctgacctcaagtgatcctcccacctaggcctcccaaagtgctaggattacaggcatgagccaccactcccggccataattggatttttaaattcttctttattgcaatgtgatttacataaactgaaatgcagatttttagaggccaggtgtggtggctcatgcctgtaaccccagcactttgggaggcctaggtgggaggatcacttaagcccaggagttcaagaccatcctgggcaacattagtgagacctcgtctttacaaaaaaatcaaaaatggggggaggattgcttgagcccaggaagttgaagctgcagtgagtggtgactgcaccactgcactcccacctgggtgacagaatgagaccctgccttaaaaaaaaaaagacgagatggagtctttctctgtcacccaggctggagtgcaatggtgcagtctcggctcactgcaacctccacctcctgggttcaagcgattctcatgccttagcctcctgagtctgggattacaggcacacgccaccatgcccagctaatttttgtatttttagtacagacggggtttcaccatgttggccaggctggtctcgaaccccacctcggcctcccagagtgctgggattataggcatgaaccactgcgcccagccaaaacatgcagatttttaaatgagtttttgacacatgtatgtaatatcccttgggcaacccaatcaatatgtaacattttgtcactccagaaagttccctcatgtcctcttcagtcatttccccaactctcctcccaaaaagcctttacattttaaatttatcataggatttttcttactgtgcattctatactgttacttctcttacctactgtggtggttggacttggcttcccgtaatgattctaggacattcttacataaatgggctggtcatcctttagctaatggaagtttataaccagatgtcagatgttcacatgttcctactgaatgtttacctgaactcaaaatagtctgtctctgtgctccactcttctgctgcttatgcctgtttccacatggtccctattctgggcctggctactggcttctgcacttcggtacaaaatgaccattgtcactctccaggttgcaggcgccccactggttactgcaacgaccactgcagtgtcttcagtcctgctggccccaagtgttttccagcagacagttacaagatcttcggaccttgagaggaaagccagctccccttctcctctaactattggaacgccagaaagtcagagaaagccttccattattctcagcaagtctcagctccaggatacattaatacatctaataaaggtatgtaggataccaattttatctttgatttttcattatttaatgaaagaaattttataaattcctcttacagaatcagttcataaagtaaattcaaaagactagctggaggccaggcaaagtggctcacacctgtaatcccagcactatgggaggccaaggcaggcaaaaaaaaaacaaaaacagactagctgggagtactgtttctctttttttaagcatacagtcctggtggagaaatatctgcatgaactcaaaatattaatcatgattgtctctgggtggtgggattatcagttatacaaatcatttatacaatttttttcctaagctgttaccaaggaagtaaaatctgatgaggtaaatgtggcattcgtatccttaacctttaccatctcttctagaatgattccagcttcctcagtacacttcatgaagtctacttgcaggttctgaccaagaacaaagacaaccacaacctatgactggagcagaataagtctaaaggcagagccccagcctcagagacaaataggcttcatcatggaaacttctgagcagaacattgagtttgagaatcctgaaattgagcctatgagaaagagactcatttcttaagaatgttttccaagtgacattctcagtgataatggaggtttcactgtgaagcatcaccagcagatccttgttttgacaaaaaaaaaaaaaaaaaaaaaaaaaaagagagcgatcattgtgttaagttatgtgggtgttttcatcagctaggagcaaggctgtggaataaggagtcagattctcagcttgctttcactttcaaggacttacagaggagtagtcaccagcctcacagcagaagttcagcccggcccccaccgcttcccccagcctaccccatagaaacgggctttgggctgacaagtcaagttttgaacagagtagaaggcagctctgcaaagtagcttctagtttttaggaccagaatttaagccggcaaattaggaattatttcctcaagtgaagtatattttatatgaatgccccatttgggccttaaaagttgtgaaatttcttaatagcattttgtttttaagtgccccagtcctgccctgcagcaggcccccagtgcagcattaccatttgaatagggcactgtcaggctctggtggtgtggacacaggcatgtcatacctttgaaggaaaggctggggctgggaatgcccacatcctatcaaatcttcattttaggttaaactctccattggttctgaaaatgctaagtttgtgtgtgaagcacagccttattttccttttctgtcattgttgattgttttccttaacactttgacaaaaggaccagtggaccaatctgacaaagccattctggttcctttccttgagtgtactgagaatagttttaaagctatgcagaaaagggagctgttattcacactgcccttattttgttgtagaattatggagttaaaagaaaatgtgattccgaactctaccaatgtattcctaggctgtgagtactttcccggcccaaagtgtgaaaatatgtaaagaagctttgttatgctgctattgatctgccatgatttctatttattcttttatggcatgtaatggtgtttagtaatattttaatgtagattttgatttatttcagcaatagtaattttaagatattctttgaatgaaagtgtcttcgtttctatgatacaggtcattttgtagtatttaaccaattaagatgcactgcttacttttctgagcactatttaatgatggggtaaaaacccaattggctcaaccagctagcataaggattagctgtgaataatgctgacagatatgatggttccttaggaacaatcatttaagctttaatggtaactcaatcataagtccatagattatttttttctagctaaaattttagaaaattacttgtgaattacatacttgttttagtttggtcttagtttttagcataaagaatgattggcttttgttgatctaaacatgcttcctggacagggtttctgcttctcattttagtgtcttctattgctgtctacctaattatgtgtgaattgtgcagaattcagggaagcttataagttttcatgctcaattgtgaatagtttgttttcacagatagtatgtaaattaagcaaccaaaaatgaattccttatgcatcatctgggaacgagaaagctatagtgggatacagagtgttgctgacaccgggagatggtgtccagggagccacgtgacttccataaagtggacgcaccagtaggtgtgattgcacctcaagtgtagtctcagtgggcttcggtgaacagacgaatcaagggattcttgaatcgaaattatgcttttgagtatgtaatattatgagagagttaagagagaatatcctaaagagagtctgtgatcatactaattttcacctttaatgctaggaatggatatgatagacagtaaagagcatctatgataaggcttccttagtgtgaaagtaaacttaagtgcccaagtcatggagacttgaaaagggtaaacctgtttcacctcccaaatttatatattcaaagtatttacttaaaattcagaagccagaagttcatgtcatgattaccaggaagttcaggccagaatgaatccctagagaagccaggccaagcctggataattgcagctggatgaccctggcccgaaagtcacagttcagttgccttattcctagttcaggcttactatctagaacctcatgctagcttaggttgcatgtttacattgctgcagtgtctttactggaagcttagttggatcgaaatggacaccgagatggagatgcttctggctagatttcgcagaaccccaggagacctgcatttagaccactctgtccatttgtgtgcccacccccacccccagggtctaagtgtagactccaagaggagcagcccagagcttggaggagaggtgtgtctggggcaccactggtgggtggtgctgctcttctttttgttgtagttaatgcggtgtcttttaatggactctcaggcctcccagacagccttgttcctttaaggcagaagctcttcttcattgtgtacctcctgggattcatgaggtgtgagatttggcctgcttgactttgaattcaagtttttcaagtgactctcagtgtcagaagaagcatttcatgctgtccacatgtggtatgtccacagctcaccttcaaaggcttagatgtagccatcacagagagtggtattttattaagaacccaagtcccagcctgaccaacatggtgaaaccccatctctactaaaaatacaaaaattagccgggcgtggtggcacgcgcctatactcccagctacttaggaggctgaggcaggagaatcacttgaacccgggaggcagaggttgcagtgagccaagatcacaccactgcactctagcctgggcgacagtgagactccacctcaaaaaaaaaaaaaaaaaaaaaaaaaaaaaagtcacgctgggcccctctctacagggggacacacaggcttagtttagtatatgtctaaccagattttgcatgtcaagcatttgtccttttcctggcttatgttttcttgtagaaattatataaaccctatcaaatccactactaggtaaatttttaaaccatgcagctttattactctcctcccccaaagaatgtagtttgaaattttctcatttccatagtagaggccctaactgccattgtattactaataatgcaacatgaaattgaaggtgcctaactgctcaaaaaacaaaatcagccatcatactgtaactctgagaggaatgagaggtggcacaggcacgagtgggctcagcccgtgtgagtgaggagaactgaggaatcctagggtgcgcatcctgcatcctggctgcacgtttgctgcagagtatgtttttctttcttgcctcccttcagttttcttcagttgcgttcagtgtatcttctggaaccaatagtgccctgtgttctcaagtctctaaaatgctaagatctgagcaaagtcaagcagcttacactaggcttttttacagctgtgcttgagaacatttccgagtggaccagggccttgaggagcctgtttttcagcaaattcaacagatgtgtgcagtgattccctccgttttgtatttgacaccttcatttaaaatgctaagatgcaatatcattcacttcaaagtggggaaaatgcagaattgtgtttcctttttatctgtgtgattccttaagaaacatgtttttaaaatatgtgttctaaatggttttttattctgtattactgctttggccatgtggctctcatgactttcattgtaccagattctcagctccctgaaacatggggacgagaagctctggaattacagcaagatttttgttccatgagcgcaatactgtatcattaacatttttaatggtatggattttatagcatctgtgtatgtttgcaaatattaagttattacatgttttaaaatgagcgtttttcatcttaaattttatatgtttgcaaatatatttttttaataaaatttcaaaaccaagttttagcaccta

SEQ ID NO: 308 - DNA, 12189 bp, Homo sapiens
  source 1..12189: mol_type = genomic DNA; note = NC_000019.10:49848554-49860742 PTOV1 [organism=Homo sapiens] [GeneID=53635] [chromosome=19]
aacttggcagcatttttttttttttaagagatggagtcttgctttgttgctcaggctggagttgcagtggtgagatctcagctcactgcaacctccaccccctgggttcaatcgattctcctgccttagcctccagagtagctgggactacaggcatacaccaccatgcccggttaacttttgtatttttagtggagacggtgtttcaccatgttggccagactggtcttgaactcctgacctgaagtgatctgcccacctcggcttcccaaagtgcagaattacaggtgtgagccaccacgcctggcatgtttttcttttaacaactcccttttagtctttccaaagcaagcaatctggtttgtgtataaacaactgtcttgcattaatttcattagtttgatagtaaattaaacaagaacttctggcataaacaggtttggatcaaacagctacctttcaggaagtaaacagcttgagagatggaagtggaattgcttagtcataatagtagcctgctagccccagcagtgggcttcacagatgaaaaggaaagtgtctttcaagttggtggaccgagttaagtgagatggtttcagagagttttgttgcagtattactgatagaatttcagcctacattttcatttcactttctgacatgagttcccattttgctcactctggagtacaccctggtataccgctctccatgcttatacaattcagggcattcaaactcacgtgtgtcctgatgggttctgagggatgggaaggcattaacaggtagagaacaggaaggatgggagagagattttttggggggcggcagcaggggccacagtaccaagtttggatttaattctaaaggcactgggaagccattggatggttttgattattgtagtgacagagaaggcagcaagagttaggagacgtcacccaggcaagagatcttgatggtttggaccaacaagaatggggagaagtgaggattccgggagattaaagcagctcctgttttttctccttcctgctgccaggttgtcctcacatgggtgattgacagggcattggaggtacctgttgataactaacttgcagtttgtgttcagggagcactgactccgtttggccacaatgcaggttggatttggggtttaaggctgggctccagtcagccctcgggagcccctgggcaggaaaacatggacaggcctacgggttcttctgccatttcactggccactcctccgtgtcctttgctggttgcttctcattgtcgtgactgctaaagggatgagtgtcccagtctctttgtgagctcatccagtctccattcaaacactgatgactcccgaatttctctctccaggctatgacatcaatatctatctacattgtttagtcaacatccgaaacagaagtagggactccgtctctaacctcctacagctgtgtctatttctcctctctaccttcactcgactccgcccacactggctcccttttattccttctactttcaggatttgtctttgctgttctgtcctctttgcacacttttccagccatctggaatggcaggttgctcacaggtcgttttcttgacttcccttgcttgctaactttacctcgctatggtcatatcccatcgccctgtggatgtgcgctagttaacacttagcacagcctgtgattatgtctctccccagtggaccgtggggcctgtgagggacgtggtctgattcggtcgtcgccgagcacagaactggacagggtactcataacagatttttgttgttgtttttaaagaaaagctaacatttgagtagtgactgcgccaagcagtcaagcacagcccctcgggctcgatccccataaccactctagggttaggtattacccacgtttaaggaacaaaaatcgagggaaaaatcttatacaactactagtaagtagtcattccattttagcagagcgaatgagcgaatccacggaaggccggggagcgacgtgagtggcgagaagcttggagtcgccagggacggcgggcggagcctgggcgccggggctaatgggcggagcctccagggacagctggccccgcccaggccgcgcggggcccgctgggagttggagtcccttgcccacctcgccacgtcaccgactgcaaaccttcagctgtctcaggctcgggtgcaatccgtaccctcagtgggttccctttcagtgggttcctttgtccccaggcccattattccgtcctcccctcttccctgatgtattttggcgcggtctcctggctctgcgggcccagggctccggatgaggtctcccgccgtcccgacccccgcaaggggccagcttggtgtcgccttcgttcttctgccaccccattcggtaggggctcccgttcccgccacgccccctgaagttgtggctcgcgcgtcttcccaggactcccccgcgccggagaggcccgcaggaccgccgagcccacactccgctcccgcccgggccccgctcccccgcgccgccttggtacgctccggccacgccccctcggacgcgcttggtacgcgccgggctcccccgctcgcctcagtggttcggccgcggcgaccccactccggcggcgcgtcccccgagcttggtacggctcagcccgtctcccccgaagccgcgcgcccgcgcccgcgcccctcagtcggtggagcccgcagccccccttgtggcccgcggcagctccccgcccgctcggcccgcgcccgccatggtccgtccgcgccgtgccccgtaccgctccggcgccgggggccccctcgggggtcgcggccgccctccgcggcccctcgtggtgcgcgccgtccgctcgcgctcctggcctgccagcccccgaggcccgcagcctccgcggatccgggcccgctcggcccctcccatggtgagccccccgccctttttccagagccttccacggccccgcccccccagcccctatcccgggctcacgcctttgtccgcagcccccgccgctccggggtgtcccctgtggcccgaagggtggtcccgcccggggccgggttcccccgtggagcacccggtggttcgcgccgcgctctcccctttgttgcgcgttcgggccggggtggggggttgggggacgggggcggggcgggctcatattactgctgactccgcggcccgatttaaacgcgggctgggggcggcagacaggcagccggcacgctcgcttgtttttcctattggagagttgctcgctctccgggcaggaaacctggaaatgggggcggttttgggggacagcggcgagggaggggcccgcgctttgtaccagcgcccccagatgtcgcacccgtgggcgttctcccctggcggccgctccgtgcccgtggagtgcgcacctagaatacgcgcccgcgcccacatgtgggatgctttgatggactgccgtgagcccagaccttaaacgtaaacattcagcttcgcaggtactttgggctgcacacgcttctccggacccaaaagatgcacatgcttttcagaaaccgtaaggtttacctggggctgtaaaaccgcacatcgcgactttgcaccgtgcacacgcttgccccgatgtgagatttcccctgggttcgcgctcgggtccgcttcttaaatacactgcctcagcggtgtggatggcacagagctgtggcagccctactgaaaccttaaacaggcttcctggggtcataaacatggataccgagacttagatcacctcccacaacttaaacgtaccccttcactccactgccttcgccccttcctgcagcattcgcatctagttgttcaaaagtgctttccgggtcctcagacatgcaccccaaggttttaaacctcagtgcaagtactagatgggcttccctgtgcaatagggatgtcaggcgcgcagttttgcacacgattgccaagatgtgagatttactttaggttgcaccttaaccgtcgtttttaaatatgatcgtcccatcttgatgtgctgctcctgctgtggaaggtatccctgggttttaggcaagcatatgtgttctttactatggctccagatcccagcatatttgaagtcctgagtcaacctgctctcctagacaagcagacattaagtatgtcgcttgggctcttaagtgcgttctcctgacttttacccatctttgtggcagtaaatgcatacgtgtcactgtatatgcggactagatacctcaggtcccagcgccataaacaacttgtatgttgtaagtgtaccctcatctcgaaagtcacctccagctgtgcgttttaactcatctcagatgctggatgtccggtatggtgcctgaagcccccggggcaacatccactctctgtccaactcattctaacgccaagatactcaggttttctatctgatcttctgacgactgcccaaaagtcagaatcacctgcgtgggtgaagaatcacctgcgtgggtggagaatcacctgcgtgggtggagagcaagtttgttcaggtttttctctttttaagcactcacaaaataaaattttttgtgtttgctagtattctggaaggaaagatctccttgtgcttcatagaaaatttggaaaatacctgtttgtaataagataaaaataaatcacccttataatttgttttcccccgcctggaggcgcctattacggggaaactctcgtgggtttcctgctgccaggctgtttgcggagctttcccttgtttgctttgagatgtttttggttttaaaaaacaataagtgaggtcaggcttggtggccctcgtctgtaatcccagcactttgggaggccgaggcgggcggatcacttgaggtcaggagttcgagaccagtctggccaacatggtgaaaccccatctctactaaaaaaaaaaaaaaaaaaaaaattagccgggcatgatggcgcggcttgcagtgagcgaggttgcagtgagctgagatcgcaccactgcactccagtctgggaaatgagtgaaactctgtctcaaaaaaaaaatagtaataaaaatagtggggagagtgcctgtgagtagcatttgtggcgttgcttggctttattgctagaactttctcttggtgttctacatgttttggtctgtgagacccctctgggggtggtgtcccagctgtcttccaaatgtttcccccttttcctcgctgtctttctcctggatggtttagtcccctctgtgtttcttgtcatctccttcctgcctccccccggggtcagacttataaggccagagaggtgggcactggcctgagccagaggaaggaattgaactttgggatgacagggagctttaggagagtttcagcctgggaaagacagggcaagctggtgtgtgggacagacacagcgcaagccggcttgtgcctgtggaggctgcaaggaagccctgggcccagcctggggcacggggaaagccccctacagctggcttctaacttgggtctcaagaatcgatcaggcgcacagctggggcaaaggctggaggtggggctggctgaaggcttcaggactctgctgggccagtgtcaaggtgacagcaggctctgggaaggaagggtcctgagggtgggcagcgggaaaggacatgaggaccagcgtgtgggggtcctgaggggtgagcagagggtttggacatggccccgtgggcttccagcaggggatttggggctgaatattgggacgtcccctctggggtgtgtggggactgcctgtccttgcaggccccggcctcagttttcccacctatcccccactccattgcaggaaggtgctcgggtcttcggggcactgggtcccatcggtccctcctcacctgggctcaccctcgggggtctggccgtgagcgagcaccggctcagcaacaagctgctggcttggagcggcgtcctcgagtggcaggaggtgagtctctgtggggctgcggctggcctccagggtcttgtcttgtccctgcggggacaggccagggcatctaggctgtgcacagtgacgcccctcctgcccccacagaagcgcagaccctactctgactccactgcaaagctgaagcggaccctgccctgccaagcctacgtgaaccaaggcgagaacctgtgagtgccggggcgtggcagccagggcggtggcaggggcagtggctgtggccgtggggatcagggcagccctttctgaccagctccttcccatagggagaccgaccagtggccgcagaagctgatcatgcagctgatccctcagcagctgctggtgagacccgcccctcccaccccatccactctgagcacccccatgcctggctgacccagctgtctgtcctgtcgcccccagaccaccctgggccccctgttccggaactcccagttggcacagttccacttcaccaacagagactgcgactcgctcaaggggctctgccgcatcatgggcaacggcttcgtgagtggggcgggctcccttgtagcactgtggtgacaagtacagctggaggcagcgctctgctcacacagtccaggcgggggtcggggggtctcccctggggccgagggtagccctcgtggcctctcggaccccatctggaaatgactgactccaggcaccctccgtagagcacagggtgaaggaactcagcctgagaggcctccagtttctgcatctgtgcccagcttcgaggtggccctgggggcgtgagtgcagggagggactggggccagccctgttggggcccaggagcctgtcggggacacatagcgtatggcagggacctggtaaatgggtgtgctaggcacaagagccagccaggagggagtggcacgttggggcttggtattctggtctgtaaaatgggctaacctccccgagtggcctgagctggccgtgagggagcagagctgagggtgctgaagcaggcgcggtgagtaggtcctcaggcctggctccaaggggacccaggtatccagccagtggctgtgcagggactgagtggggcaggcgcggccatgacctggacccggggggctgccaagggatctgagagcggcttccgcagcactccagggttgggctggttgaggggtagagatgacattttctgaggtagggaggacaggggagccgtgcttcctagggccaccgggaggctggagggagggaatttgtgtaaagcgcttgagatggtgactttagtacctagtgagtgctgggtgaacccagctggtgaggctgttcaggtgactgagattctggcgcagggcaggtcagaaagggggcttgggctgtgaaagatggcaggtgctggagaggaggcaggggtggggtgggagcgagttgtctgcccagaggacctggctctgggacattcccagtccctgttccctgttgggacagtctgcctctacccgtcccagctgccgttgagcgccctgggttccgctagggcctcccttctccctcaggagaccaggggcagaccagggcttgtgcctggcatgaggtctcttaagtgacccgttcccccttcacccagcaccgtttgttgagggcctgccatatctgggccccgagtacccagtctgtagggaaagtggacatccatactcaccccccaggcatggccctgggaggctgactgtgcatggctccagggaggccagggacagggccctgagcgggtgatccctgggctggacaccaaggttgagaagttaggccggcagcgtggaggggacagcactgtgggggtggcccggtgtggggaggggacatggggttttgggacggtcacaccacttcatctagacaccacagccaggcacatctgtcaggcttagttctcccatgcgccatcctcaagaggcaccagcactttatctgttgagcctttatgtggcaccaactgtgtgcactattacccggttttacagatgatggaggcccagaagcaggaggtggctggtgttaggtcacacagctaggaggcagcagaacggtggggcgctgcctgtgctcttaacccccaggccaagtcaccccatcaggcagtcaggagggctggcggcagggggtgatgtgggtgggaggtagtgccttcttggcattctcaccgcagcctgggtgccgggtgccactctgacctcagccatggcagggtcgggggatgccgatgggcgctgcacgggctctcagaggcccctcacctatggccatggccttgactgtgggggcctctgtccaccgatgatctcccttcatcccctacaggtggggcggtccagggtggtgggggcacagtggccccgggcagtgaccacagggtcctgacccgcggcccccgcaggcgggctgcatgctgttcccccacatctccccctgtgaggtgcgcgtgctcatgctcctgtactcgtccaagaagaagatcttcatgggcctcatcccctacgaccagagcggcttcgtcagtgccatccggcaggtcatcaccacccgcaagcaggtgtgccagccaagcacagcccctctggggacagagggggattagaccccactgccctggttgggcagccagacttggtgtgggcggagtgtgatgcgatggctggagcaaggagctgcaggggagcccggaggatgccgggcgggttcccaccagggctccatggaaaagcggccactgggcggctctgcagggctggagggtgggtcttggcgcggcggcagggaagccagcggagcggggagctgggcaggggttgggatcgtcctgcggctggaaggccctgcctggtaaccacgtgtcctggtcatgccttgccagttgaggcagactctgcaggtcctgtgcaccaggtgagggccgggacctgtctcaggccactggggagccatggggggctgtgagcagatgaggggcagggcctgttcccctgggactagagaatggacccagctggggctaacaggccaaggctcggagggagggatggcaggccccaggacagacagacaggtttcccaggagcctgggcccctcttcccaccccgttcccttccaacaggcagtgggacctggtggtgtcaactcaggcccagtccagatcgtcaacaacaagtttctggcatggagtggtgtcatggagtggcaggaggtgagcactcggcagcccagggacttgggacccccagatcctcacggactgtggctgggaggggacactggcattgggggtctccagccctgagggctcctctttgcctctcccccaaaagcccaggcctgagcccaacagtcggtccaagaggtggctgccatcccacgtctacgtgaaccagggggagatcctgtgagtgctgggctggggggtggaggcagcatccaggggagctggggcttcctgaccctcgtccctttgtgccccacaggaggaccgagcagtggccaaggaagctgtacatgcagctcatcccgcagcagctgctggtgaggggctggggccgggtgctggagcctgcacgcagtagctcttccagagggcggggctgggggcaagagcgcctccccaggtggcctgagctggctgtgagggagcggagctgagggtgctgaagcaggtgtggtgggtagctcctcaggcttggcttcaaggggtcccaggcagccagctggtggctgtgcagggactgagcggggcaggggcagccacgacctgcacctggggggctgccaagggatctgagagcggcttccacagcactccagggttgggctggttgagcggtggagatgacgtttcctgaggtagggaggacaggggagtctcagtttggtcctgggcccgggggactcagcgggctgggagccgggaggccgtggtgggagaagccagagctgggggtcccctcgcttccccgcagaccaccctagtgccgctgttccggaactcgcgcctggtccagttccacttcaccaaggacctggagacactgaagagcctgtgccggatcatggacaatggcttcgtgagtggtgccagcagacgcaggggaggggccggccagggcagagcgagcccggaccgctcacgggggcggacatgggagaggaacagagcaccatgtcccagaccagctggggagagagggtggctagtgtgggcgtgacttctgggggctctgtgctgtccccacggcactggatggggcactgaccctggttctgcgggggcctgctcctcctctgccacatcagggctgactcagcaccaactccgcgctctccactcctcagggacaggcgcccttgtcactcctggtttcccgggagcttgtgccacatcccaaaggcccattgctgggcagggagggctgtctgcccccagcaaggtcccagaatatttggcgattgtcttatctgggggaggctcagctgactcctcttctctctctcgggctcagtttctccatctgtgaggtggagaaggttggactttggtgtttctgagccctccccccgatgtccaccttccagctgggccatacttgggtaatatcccgaaactaccttaaaattaccttcgactcagtctgagtaaactgtccacgaagctgttcgtgggtggggggggcctgggtgtaggtgcttttacatgaaagcaatttcaagcattccctcaggggccgggtgcggtggctcacgcctgcaatcccagcactttgggaggccgaggcgggtggatcacctgaggtcaggagtttgagaccagcctggccaacatggtgaaaccccgtctctactaaaaatacaaaaattagccaggcatgatggccactcaggaggctgagtcacaagaatggcttgaacccgggaggcagaggttgcagtgagctgagatcatgccattgtactccagcctgggcgacaagagcgaaactcagtctcaaaaaaaaaaaaaaagtttcctcaaggaaacccagaaaggctccatgtacctcagcccttgcttgtgctgggccggccgctgcagatccctcgggctcctgagttgaagccatggccggttggctcaggtggctgtggtgaggtggccccagacacagcctggcctgcccaggagctctgaaatgcaggttcttgggcccttcccgacagagcctgttggcctttggcccacccattgctcttggccaccgtgtcatcccaataagggggcccacctccagggtgggtggggggtgtgaggacagagcagttaggctgtgcctggctcatggagcccacggcatgatgccgtggttggagggatgctggtccctgtggtgctgtctggtgacaccacgccctgtgcctgccaggccggctgcgtgcacttttcctacaaagcatcgtgtgagatccgcgtgcttatgctcctgtactcttcagagaagaaaatcttcattggcctcatcccccatgaccagggcaactttgtcaacggcatccggcgtgtcattgccaaccagcagcaggtcctgcagcggaacctggagcaggagcaacagcaacgaggggtgaggtggccggcctccagggctgctcagtctccctccacccccgctgcctgctcaccactggcctctgatttctcgccgtagatgggggggtagtggttaccccgggctgggcccctccaggagtcacagatgaggcccccgcagagactggtgagtggtgaccctgtcatgtacaggagggaccctggggcatgtggggggggtggggttgggaaagaagcagggcgaccttggccttggggagagcagagcagagggagaggcagcagtcccagcggtcctaggctgtcgggaaactgcagcccagcctcagggccatgggaggtggtatccaggcctgggtggggccaggcctctgctcacagggatgtggggtcagtgcttgggagcctgtggccagcagcccccactgcacccctgcccccaggtgacacgcttctgagcaggggcccctggggacttcaactgcccagcaacatggaggatggtgtcctgaggcctccaaggacggtccccacccctctacgtttccccaataaagccttttaaaaacctg

SEQ ID NO: 309 - DNA, 16207 bp, Homo sapiens
  source 1..16207: mol_type = genomic DNA; note = NC_000006.12:31494918-31511124 MICB [organism=Homo sapiens] [GeneID=4277] [chromosome=6]
cttttccggaccctgcagtggcgcctaaagtctgcgaggaggaagtcgcctctgtgctcgtgagtccagggatctaaggcaagtgctgagggagaaaacatagttgatggggcagagcagagggggctggaggtggggtggagggggagggctttgaacagaagacctgggaggcttggtgggggaggggacccaggcctcggcgctgagaagcaactcccctggagctcaagaccttcttggcctcccctagcccaggggaggactggcttcatgtctccctgaaaccgcttctaaatgccttagaacaaaccttaaatattcattattattattgaactattaaaagtcttttttggaggcgagctgaatgagaccctttgctggagctggcacacggaggaagtcctggagggagggtagacaccgtggagggaagggcttgggacctgtgtcaggagagctgggtccatctgcctctctgtctcaaactatgcttatgatctttagcagtgaaaataatctctctaaggtggggacaggaccccagtccctgctgtgcttaataaattatgaggatcaaaataaattatcagtgaatgtgtatgggaagactaagaaattgttaaaattctcgaatacattacattttcatccacagaaaagtgtaggctagggatgataggggaatagttagtaatgacagggatagttgaacttaaaaaaaaaggttgtgaggccaacaaaaaagaaatggacacagttcctgatcctggagggttcatagtctaatgggggaggagggtagaagatggtaggtgatggctgggtgtgtggcactcgcctgtagtcccagctactcaagaggctgtggtgggaggattgcttgagcccaggcatttgaggctgcagtgagctataatcacaccactgcattccaactgagtgacacagcaagactcctctcttaaaaaaataaaataaagtaaatgaaaaaaataagattcaagacagggcacagtcggtaccatcaggaaggttcaaaccatgggctagatcagtagttctaaaacttgactacacatcggaatcacgtagggaactttaaaagatactaaggtttaggtccaacctaggtttactgatttaactggttgtggctgtggcctgggaacatggatattaaaaactctccaggtggttctacgcagtggctaggtttgaagaccactgcctagatgtcccaatgactaagaatgtgcgctggggacaagccaattctcttagtagaggctttccagacagaattcttattattgagaattgagaattcacatgccacacataatttatcgttttaaagtgtacagatcagtggcttctagcataatcacaaggttgtgccaccgtcaccactatctacttgggaagattttcttcctttttttcttttttttttttttttttgaggcggagccttgctctgttgcccaggctggagtgcagtggcgcaatctcagctcactgcaagctccgcctcccgggttgaccccattctcctgcctcagccttctgagcagctgggactacaggtacccgccaccacgcccagctaagttttttgtatttttagtagagacggggtttcactgtgttagcaggatgctctcgatctcctgacctcgtgatctgcccacctcgacctcccaaagtgctgggattacaggcgtgagccaccgtgcccggaccctttttcctttttttttttttttaaaggctagtcaagtgaaacagtgggagtgaagatgaaacaaaaacatctataactggttgtgatcaattagttgtaaacaccactgcactcagaccagcctaactgggaagattttgaggatatgctgtggtctgatgggttccaaggcagaggtgacagtaacctggaagagggagactgcttaggcagtggcatcctggtgggatagggtgaggagatcccagagcccacgtttactgcaaccctggggaaatgtcaccagagaaatgggggtggtgccagacaatagattgtgggagctatggtttccatggtagagtagaagcatccaccatgtgtgacattcagcagatggggcgctgtgggtggcttggagcactctggttgtaactgaggcaggcacagtgtttaggaagcctgtgcagtaatccagactgaagggaggggaaagcctagactaagactatggctgtgggattgaaatagcgttgaaggagctgactttgactcccggagatgaaggagaaagaggaaatcagaagggaccaaggatggtgaagttcttaagagaaactgaggaggaagagaggatgatgtggtgggagacgtgtagagagtccttgtagatctgtcatattgaaggggactatggtcccagaggtacagatgtcctaaaacaggctggaaaagggagtctggagagagcttggtgttgtaatgaaccatggggagccgcctcgttggccctgtgattacccaggaactgaatagagagggggccctgggagacctcagacacttagaggatataagggggtgaaaggggggacctggctttgagtcgaagggaggagaaggagattatatagctgaaacgtctaagagaatttgtgatctgagcgtttctactggggcaagtgcttctgaaaggcagaggcggctgagatctggaaacaggtctgcaaatctggtcactggtctcattgcagtaacgctgtgcgcggttgagggagtgtattgggagaaaaaccacgcgttgtctgtcccggaaggaacaagccagtgagagccggcctgatgggaggaccggcgaaaggggcttggtgaagcccgcgctccttgggggtgggaatgcggggatggggtggtcgcgatgcagggagggcgacagggtccaggtcgtgctcataagtttggagctgtactctcagctactcggggctggtccttgattttggctgcgctcgcgcacgctcccccttttctggccgccaggtcccgccttctaaatttccccaggtctccaggccgctagaattttctcttctgaacgtggccccgccctctccactcatgattggccctaagttccgggcctcagttttcactggataagcggtcgctgagcggggcgcaggtgactaaatttcgacggggtcttctcacgggtttcattcagttggccactgctgagcagctgagaaggtggcgacgtaggggccatggggctgggccgggtcctgctgtttctggccgtcgccttcccttttgcacccccggcagccgccgctggtgagtggggttcctggcggtccccggcggagcgggagcggcggggcgtttccgggggtccgggtgggttgccgcgagcgctgtgcggtcagggcggggctcaggtgtgctgtctggagtgcagggagctggacgccgcctgttcccgccacacctcagccctgctttcccatctcccgtctctttttttttttttttttttttttttttttttttttttctttctgagacggagtctctgtcgcctaggctgtagtgcagtggcgcgatcttggctcactgcaagcgccgcctcccgggttcacgccattctcctgcctcagcctccctagtagctgggactacaggcgcccgccaccacgcccggctaattttttgtgtttttagtagagatggggtttcaccgtgttagtcaggatggtctcgatctcctgacctcgtgatccgcccgcctcggcctcccaaagtgctgggattacaggcgtgagccaccgcgcccgacctcctgtctcctttcagtcctcctcgggatcgcgcatcacccgcattttctggtctctcctgcacttgctctcctcgcctctcctccgtctcctctcacttttcggacaaaccagtccttctgaggcccctgggttcccgggctgctcctgtgaatggcattggaaggccgttccagcgcggccgctgaggcagccacttcccccggtgctgggggcggatctcaggtccctgaagtcctgtcctctcccggagccgatgtgttctcagctcctgggccgcagctcctggagttggggccctcctttcttgggacccggaggtggtgcttcttgctgctgtggggactgtggggggtcctgactctcaagctgaggggttggagtctgcaggctccgggcagaggattcttcctgcgacttctgtcatccccagctcattctcccctcgcctccggctccgggggtcctctcctctctcgcatcccacccctactaatgaccaatgatctaaggacaccagattccctctcacctcctccctgcccatcttacggcgccctgggtcctgttgctctcccagctccctgctaccccttcctgtgtgctgttctctgatccatttctagggtgtcctctgccttcatcccccgcccccgccactgaaggtccctcctgcctcctttatgggcctttcctgcaagcagccttcactccgtgctgcccctatgcctccccattcccaaatgtccctgactctaactttctggtgctgccttttgtccgggggggtcttccctccatcccactcccctccagacccccaaggagagccctgatgctaatggcagttgggccttaggcagggcgcagggcagcgcagatgccccctcccctccagtgcaggtgcctgctctgggccctgcctcattgtggccccttccccactccttcatcctcagcctcaccctcttgaggaccccaccctccagcccacaggtgctggaccatccctccctggtccctccgcccctctccaccttgggaccttgtgctgctcctatctcttgcccagctgcctggggccctcagcaagttctcatctttcagtgggaaagtgggagtgctggagcatatgacagtgctgagaatctttcccaagccccaccctcccccagagcaccctcccctcctgtcctcaccctaccccaagttctcccacagtcactcctgccccatgctcatgccgccctccagttcttgctctgcccatctcccctccccaacccagacctaaaacaggctgttgggccagctgttccttgaccttccttcttttcttttggttccttgaccccagtgggctctcactccccacaccgcatatctaaaatctgttttgcctgctcttggggtgccactgctccccctccagcattactccttttggcaggtccttcctcaggctgagaatctccccctctaccttggttttctctctctggccagcacccccaccccttgctttgtttttaatttttaacttttgtttgggtacgtagtagatatgtatgtatatatttatggggtacatgggatattttgacacaggcctacaatatgtcataatcacatcagggtaaatgggttatctatcacaacaagcatttatcctttctttgtgctacaaacaatcccattatgctctttcagttatttttaaatgtacaataaattattgttggctgtactcaccctgctgtgctatctactagatcttattcattctaactatatttttgtacccattaaccatccgcactcccccactccccactacccttctcagcctctggtagtcgtcattctattgtctctccccatgaggtccattgttttaatttttggctgccacaaataagtgagaacatgcgaagtttgtctctctgggcctggggcttatttcacttcacatgatgacctccagttctttgcaaatgacatgatggctgaatagtactccacatacacgtgtgcaccacattttctttctccattcgtctgttgatggacacttaggtcgcttgcagatcttggctattttgaatagtgctgcaataaacatggaaaagtagatagctctttaatataccgatttcctttcttttgggtatatgcctaacagtgggagtgctggagcatatgacagctctattatatttttagtttttggaagaacctccacattatttcccacagtggttatactagtttacgttcccaccaacagtgtacaagggttctcttttgctacatcctcgccaggattccttattgcctgtcttctggataaaagccagtttatctggggtgggatgatatctcgtaggagttttgatttgccttcatctgatgacgaatgatgttgagcaccttttgatatacctgtttgccatttgtatgtcttcttttgagaaatgactattcagatcttttgctcatttttaagttggattattagatatttttcctatagagttgtttgagatccttatatgttttggttactaatcctttgtcagatgaatagtttgaaaatattttctcccattcttggatggtctcttcactttgtttattgtttcctttgctgtgcagaagctttttaacttgatatgatcccatttatgcatttttactttggttgcctctgcttgtggggtattacttaaaaaatctttgccagtccaatatcttagagagtttccccaatgttttctttcatagttttcatagtttgaggtcatagatttacatctttaatcctttttgattggatttttatatgtggtgagagatagggtccagtttcattcttctgcataaggatatctagtttccccagcaccatttattgaagagactctcctttgccctgtatgtgttcttggtaactttgttagaaataacttcactgtagatatatggatttgtttctgggttctctattctgtttcattggtccgtgtgtctgtttttatgccactaccgtgctgttttgattactctagctctgtagtataatttgaagtcagataatgtgattccgctagttttgttctttttgctcagggtagctttatctattctgggttttttgtgattccatatacattttaggattgtttttctatttctgtgaagaatgtcattggtgttttgatagcaattgcattgaatttgtagattgctttgggtaggatggatattttaacaaaattgattcttccggctgggcacggtggctcactcctgtaatcccagcactttgggaggccgagtcaggtggatcacttgagatcaggagttcaagaccagcctgatcaacatggggaaaccccgcctctactaaaaatacaaaattagccaggcgtggtggcatatgcctgtaatcccagctactcaggaaagctgaggcaggagaatcgcttgaacccaggaggcagaggttgtggtgagctgagattgcaccattgcactccagcctgggcaacaggagcaaaactccatctcagaaaataaaaataaacattgattcttccagtccgtgaacatggaatgccttttccattttttgtgtcctcttcaatgttttgcatcagtgctttatagtttttattggagagatctttcacttcttcagttaagtctattcctaggtattttattttatttgtagctaatgaaaatgggattcgtttcttgatttctttttcagattatttgctgttagcacatagaagtgctattgttttttgcatgttgattttgtatcctgcaactttactgaatttgttcttcagttctaatagttttttggtggagtctttaggttttccaaatatcagaccacatgatgtgcaaacaaggataatttgacttcttcttttccaattttgatgccctttatttccttctcctgtcagattgctctagctaggacttgcagtattgtgttgcataactgtagtgaaagtagtcatccttgtcttgttccagatcttaaagaaaaggctttcagttttcccccattcagtatgttactagctgtgagttgtcatatatggcttttgttatattgaggtctgttccttgtatactcagtttttttagagtttttatcatgaagggatgttaaacttatcaaatgctttttcagtatcaattgaaatggtgatatggcttttgtcctttattctgttgatacgatgtattacattgattgatttgtgtatgcatacctggaatacattccacttggtcatgaagaatgatctttttaatatactgttgaatgtggtttgctagtatttcattgatgatatttgcctcaatgttcatcagggatataggcctgtagttttctttttttgatgtgtctttgcctgattttgatatcaggatattcctggctttgtaaaatgagtttggaagtattccctcctcctctgtttttcagaacaatttgaataggactgatatttcttgttctttaaacgtttaattgtggtaaattatacattacatacattttactgttttaaccgcttttaagtgtatactcggtggcattagatacattcacatttttgtgcaacccaaaactctgtacccattaatcagtaactccccattcctccctacctctggcccctggtaaccatcattctactttttgtttctatgaatttgaccactctaggtacctcatttaagtagaatcgtgtaatgtttgtctttttgattctggcttatttcacttataatatttcgaggttcatccaggttgtagtatgggtcagattttcattccttttaatgatgaataatactcattatatgtatgtaccacatcttggttatccattcctcagacaatggacacttgggttacttctaccttttggatattggcaaatatttcatttctcttgggtatatatttatttcttttgagtatttcttttgggtatatatccagaaatagaattgttggatcatacggtatttcattttttaatttttagaggaatcaccatagtgttttccattgcaggcgtgccattttgtatttctagaagcagtatacaggggcttcagtttctctacctccttgccaaacttgctgtgtgtgtgtgtgtgtgtgtgtgtgtgtgtgtgtgtgataatagccaccctgattggtttgaagtggtatctcattgtggtttggatttgcattttcctaatgagtactgatattgagcatcttttcatgtgtttattgatcatttgtatattttctttgaagaattggccattgaagtcttgcccatttttctcccccacatagcttctcatggctattttgcccatttttgagtgggttgactgttttgttgtttttgtcaaacttttttgcatattctggaaactaatctctctctttttctttttttttttttttttttttttgagatggagtcttgctctgttgcccaggctggagtgcagtggcacgatctcagctcactgcaagctccgcccgctagcttcatgccattctcccgcctcagcctcccgagtagctgggactacaggcgcccgccaccacacccggctaattttttgtatttttagtagagatagggtttcaccatgttagccaggatggtctcaatctcctgacctggtgatacacccgcctcggcctcccaaagtgctggaactacaggcttgagccaccacgcctggccttctggaaactaatctcttatcagatatatgacttgcaatatttatttcatttcaggggttgattgctttctcactctgattgtgccctttgatgcacagatattttgaatttttcatgagtccagtttgtcagttctttctattctatctgtgctttggcgtcatatccatgaaagcactgtcaaaccctatgtcatgaacattatacccaatgtttttttctaagatatttttatgttttagttcttgagtttagagtttaggtctttgattcattttgagttaatttttgtatatagtacaaattaagggtccaattttatattatttgaacatccagttcccccagcactatttgctgaaaagatggacttactctttgagaccctgtcacctgcccaccccagtggacactagctggtccatccaattgctgtcctggggccttgtcatgctactcttccactttggacccaagcccacatcattgctcccctctgggatactgaccccactataaacttcactggggctacaaccttcctaccccttgtgcctcatgaccaccccctcccttgtccccaccatgcccatgatgagtcttttctcaaggcagctcgccttgcctccatctcaccctcacctgtgcaccacagccacactggacatgggtccctctgagcctgagtcccttcccattcccactgtcccctctggcaagaccttccttccaacactgccttcatgctcctcccttgcccctgcagggcagcctctccccttggcccctattcccttagggggcttgtggccacccagtcctggcacctgacctacaagtttgccatcttcattcccccttcttctgttcatcagccccctcctctatcctcccaccctcacagttttccttgtatatgaaatcttcgttcttgtccttttgcccatgcgcatttcctgcctcctcagggaggtcgggacagcagacctgtgtgttaaacatcaatgtgaagttatttccaggaagaagtttcacctgtgatttcctcttccccagagccccacagtcttcgttacaacctcatggtgctgtcccaggatggatctgtgcagtcagggtttctcgctgagggacatctggatggtcagcccttcctgcgctatgacaggcagaaacgcagggcaaagccccagggacagtgggcagaaaatgtcctgggagctaagacctgggacacagagaccgaggacttgacagagaatgggcaagacctcaggaggaccctgactcatatcaaggaccagaaaggaggtgagagtcggcaggggcaagagtaatgggaggccttctccaggaaagttggagacagagagcagggacctgtctcttcccgctggatctggctgggggtggggatgaggaatagggtcagggaggctcagcagggtggtgagccggaactcagcccacacagggaggcatggaggagggccagggaggggtcgctgctgggctgagttcctcacttgggtggaaaggtgatgggttcgggaatggagaagtcactgctgggtgggggcaggcttgcattccctccaggagattagggtctgtgagatccatgaagacagcagcaccaggggctcccggcatttctactacgatggggagctcttcctctcccaaaacctggagactcaagaatcgacagtgccccagtcctccagagctcagaccttggctatgaacgtcacaaatttctggaaggaagatgccatgaagaccaagacacactatcgcgctatgcaggcagactgcctgcagaaactacagcgatatctgaaatccggggtggccatcaggagaacaggtaccgaccctggccaggggctctactgttcccgcaattctgctagagttgcctcgcctcccagctctgtccggggaaaccctccctgtgctatggatgcaggcgtttcctgttggcatattgtgtcctgatttgcctctcctgttagagccattggataaagacagtgggtctgggactgaactgtccagtgttgtaatctgggaaagcagtgggccctctgacagaagcctgagcctggtgtgggagttaggcaggagaggaagccctcagggccagggctgccccctctgcctcccggcctgcccatcccggagagttccctcctggccccatgacccaggagtccacccttgacatccccctcctcagcatcaatgtggggatcccagagcctgaggccacagtcccaaggcccatcctcctgctagcctggaggaattaggccccagggtgaggacagacttacagaaggtccggtatctgtgagggattcagccagagtgagaacagtggagaggagcagccctgttccctgcatctcccttagaggggagcagggcttcactggctctgccctttcttctccagtgccccccatggtgaatgtcacctgcagcgaggtctcagagggcaacatcaccgtgacatgcagggcttccagcttctatccccggaatatcacactgacctggcgtcaggatggggtatctttgagccacaacacccagcagtggggggatgtcctgcctgatgggaatggaacctaccagacctgggtggccaccaggattcgccaaggagaggagcagaggttcacctgctacatggaacacagcgggaatcacggcactcaccctgtgccctctggtgagcctggggtgaccctggagagggtcaggccagggtaggaacagcaaggacggctgtggctctctgcccagtgtataacaagtccctttttttcagggaaggcgctggtgcttcagagtcaacggacagactttccatatgtttctgctgctatgccatgttttgttattattattattctctgtgtcccttgttgcaagaagaaaacatcagcggcagagggtccaggtgagaaaaggggacagtttctggagatgggaaagctcctttctaggcagtagggtctcctcattgctcctgcccagacaagacgtaggtgacaaggctgctgggacaggggatggaagctggggtatttgggaggggaatgggagctgcatctccatctacacccataagtgcttcccaagccagggctggggcaaggccttcgaatatccagctgtggcctcctcctgctgcaagtgaggagtgggcagcagggagggctgtggcacctgctctgtccccatcccagcctctctgtctctcgggctcactagggtgcgtccaggtggggtgagttgggaatcacgtgctgattgctgagggcctggatgatcatggtgtcagagggaggaaatagtaaaggtggctgtgatctggggagggccagaaactggagaggaatccaaggagaggcgatgcccacccgtgtgcctcctccaggaggcactttccaggttcccactacctggcctccctgagtttccttgcagatgacacagatgaatagataagcagatgtccctgggccatttgaggagcggggcccagcccctcatcagggcagatgtggtccctgttttcatcctacctccagcgtgttttcttctgcagtccctgagggacacagtccccaggcgccatctctttgaggctttgttctgtgctctgtggccttaccttgccctccctgagccaatttccctttctcaaggtggtcactgcctggtaagtttggagtaagggacagtcagaagcatttcccccacagtcaggttgtttgatgggagatgaaaagagacagcagaagttttgtgtttctgcaaaaacagaggcagtgcaggggacagtgagaggctggggtgtccaggagacctgagtctggcggtaggggcgctggtttctcatccttgaacctagttgcactgtcagtcggcccctcatgcctgagcagatgggaaggttcgtcccctgccctgcagcaagagggccccatccaggaggcacccacagcaggggcagtgcaggtctgtggtcactcctgctctcacctgcggcgtctcccgtggagggattgtcacttctggttccctgtgggcaggaatggtttcctcgtaggtcactggggttttggccaggaaaagggtatgaaattcatgtgccagtttctcaaaattcctgctttcaatgttgatgtccaataaagatgttcgtaatttcagctctataatcttaataggatttcctctaatactgctgttgtaaagcatattaaataaaacaggaactcaaatttggagccccctctccagaagggtctgtgtggagatggtggctgtggcagcggcagttcccaggtgcagagggtgggcagaggcagcctcaggctaaggggtctcccctactccacgtggagaaaagtccttgtaggttgcaagggcagtggcctgggtggaatccctgctagggacagagcaggaaggcctcacagcctcaccaagcagcagccctggggtgaagtaagtggaccaggagtaagtggaccaggcaggagcagtagtgactcaacagcaggtcacaggcctaggtgggtgctgaaggtcatgggaggccaggcctcctcgagcaaggtggggggtcccagggtcaggtcaggtgcagatcctgtggcagccacgtctttccatgctgggcctgctgggccccccaggcttcctgatggggtccccagttaggagctgcctgctcagggctgggaggggaggagtgctgagctgcagatagagggcagggcccacagtgggcagggcctgccctggtgtgcaggtgcctctgcaggagagaagggcctggggactgagagcaagggtcagggcctctctttggggaggcctctcactgtaacaggactggtcaggcctgagaggagggcactgggttccctcttgggtcttgtccttttgtcttggggccctttcactccctgcacggtgagtggtgggcacaggacaggggctgatgttgatggagtgatgggagagaactgacaggggctgggaaaagcaaggagggaggaagaaaaaagtgggggcctcatcttctctcagagaaagggcgaatctgattttggggcaactgaagagagaaaagtccttagggaataaacacaacactgcacccagtggagcatttacccgtttccctcttctccagagcttgtgagcctgcaggtcctggatcaacacccagttgggacaggagaccacagggatgcagcacagctgggatttcagcctctgatgtcagctactgggtccactggttccactgagggcacctagactctacagccaggcggccaggattcaactccctgcctggatctcaccagcactttccctctgtttcctgacctatgaaacagagaaaataacatcacttatttattgttgttggatgctgcaaagtgttagtaggtatgaggtgtttgctgctctgccacgtagagagccagcaaagggatcatgaccaactcaacattccattggaggctatatgatcaaacagcaaattgtttatcatgaatgcaggatgtgggcaaactcacgactgctcctgccaacagaaggtttgctgagggcattcactccatggtgctcattggagttatctactgggtcatctagagcctattgtttgaggaatgcagtcttacaagcctactctggacccagcagctgactccttcttccacccctcttcttgctatctcctataccaataaatacgaagggctgtggaagatcagagcccttgttcacgagaagcaagaagccccctgaccccttgttccaaatatactcttttgtctttctctttattcccacgttcgccctttgttcagtccaatacagggttgtggggcccttaacagtgccatattaattggtatcattatttctgttgtttttgtttttgtttttgtttttgtttttgagacagagtctcactctgtcacccaggctgcagttcactggtgtgatctcagctcactgcaacctctgcctcccaggttcaagcacttctcgtacctcagactcccgaatagctgggattacagacaggcaccaccacacccagctaatttttgtattttttgtagagacggggtttcgccaagttgaccagcccagtttcaaactcctgacctcaggtgatctgcctgccttggcatcccaaagtgctgggattacaagaatgagccaccgtgcctggcctattttattatattgtaatatattttattatattagccaccatgcctgtcctattttcttatgttttaatatattttaatatattacatgtgcagtaattagattatcatgggtgaactttatgagtgagtatcttggtgatgactcctcctgaccagcccaggaccagctttcttgtcaccttgaggtcccctcgccccgtcacaccgttatgcattactctgtgtctactattatgtgtgcataatttataccgtaaatgtttactctttaaataga

SEQ ID NO: 310 - DNA, 16189 bp, Homo sapiens
  source 1..16189: mol_type = genomic DNA; note = NT_167244.2:2827486-2843674 MICB [organism=Homo sapiens] [GeneID=4277] [chromosome=6]
cttttccggaccctgcagtggcgcctaaagtctgcgaggaggaagtcgcctctgtgctcgtgagtccagggatctaaggcaagtgctgagggagaaaacatagttgatggggcagagcagagggggctggaggtggggtggagggggagggctttgaacagaagacctgggaggcttggtgggggaggggacccaggcctcggcgctgagaagcaactcccctggagctcaagaccttcttggcctcccctagcccaggggaggactggcttcatgtctccctgaaaccgcttctaaatgccttagaacaaaccttaaatattcattattattattgaactattaaaagtcttttttggaggcgagctgaatgagaccctttgctggagctggcacacggaggaagtcctggagggagggtagacaccgtggagggaagggcttgggacctgtgtcaggagagctgggtccatctgcctctctgtctcaaactatgcttatgatctttagcagtgaaaataatctctctaaggtggggacaggaccccagtccctgctgtgcttaataaattatgaggatcaaaataaattatcagtgaatgtgtatgggaagactaagaaattgttaaaattctcgaatacattacattttcatccacagaaaagtgtaggctagggatgataggggaatagttagtaatgacagggatagttgaacttaaaaaaaaaggttgtgaggccaacaaaaaagaaatggacacagttcctgatcctggagggttcatagtctaatgggggaggagggtagaagatggtaggtgatggctgggtgtgtggcactcgcctgtagtcccagctactcaagaggctgtggtgggaggattgcttgagcccaggcatttgaggctgcagtgagctataatcacaccactgcattccaactgagtgacacagcaagactcctctcttaaaaaaataaaataaagtaaatgaaaaaaataagattcaagacagggcacagtcggtaccatcaggaaggttcaaaccatgggctagatcagtagttctaaaacttgactacacatcggaatcacgtagggaactttaaaagatactaaggtttaggtccaacctaggtttactgatttaactggttgtggctgtggcctgggaacatggatattaaaaactctccaggtggttctacgcagtggctaggtttgaagaccactgcctagatgtcccaatgactaagaatgtgcgctggggacaagccaattctcttagtagaggctttccagacagaattcttattattgagaattgagaattcacatgccacacataatttatcgttttaaagtgtacagatcagtggcttctagcataatcacaaggttgtgccaccgtcaccactatctacttgggaagattttcttcctttttttcttttttttttttttttttgaggcggagccttgctctgttgcccaggctggagtgcagtggcgcaatctcagctcactgcaagctccgcctcccgggttgaccccattctcctgcctcagccttctgagcagctgggactacaggtacccgccaccacgcccagctaagttttttgtatttttagtagagacggggtttcactgtgttagcaggatgctctcgatctcctgacctcgtgatctgcccacctcgacctcccaaagtgctgggattacaggcgtgagccaccgtgcccggaccctttttcctttttttttttttttaaaggctagtcaagtgaaacagtgggagtgaagatgaaacaaaaacatctataactggttgtgatcaattagttgtaaacaccactgcactcagaccagcctaactgggaagattttgaggatatgctgtggtctgatgggttccaaggcagaggtgacagtaacctggaagagggagactgcttaggcagtggcatcctggtgggatagggtgaggagatcccagagcccacgtttactgcaaccctggggaaatgtcaccagagaaatgggggtggtgccagacaatagattgtgggagctatggtttccatggtagagtagaagcatccaccatgtgtgacattcagcagatggggcgctgtgggtggcttggagcactctggttgtaactgaggcaggcacagtgtttaggaagcctgtgcagtaatccagactgaagggaggggaaagcctagactaagactatggctgtgggattgaaatagcgttgaaggagctgactttgactcccggagatgaaggagaaagaggaaatcagaagggaccaaggatggtgaagttcttaagagaaactgaggaggaagagaggatgatgtggtgggagacgtgtagagagtccttgtagatctgtcatattgaaggggactatggtcccagaggtacagatgtcctaaaacaggctggaaaagggagtctggagagagcttggtgttgtaatgaaccatggggagccgcctcgttggccctgtgattacccaggaactgaatagagagggggccctgggagacctcagacacttagaggatataagggggtgaaaggggggacctggctttgagtcgaagggaggagaaggagattatatagctgaaacgtctaagagaatttgtgatctgagcgtttctactggggcaagtgcttctgaaaggcagaggcggctgagatctggaaacaggtctgcaaatctggtcactggtctcattgcagtaacgctgtgcgcggttgagggagtgtattgggagaaaaaccacgcgttgtctgtcccggaaggaacaagccagtgagagccggcctgatgggaggaccggcgaaaggggcttggtgaagcccgcgctccttgggggtgggaatgcggggatggggtggtcgcgatgcagggagggcgacagggtccaggtcgtgctcataagtttggagctgtactctcagctactcggggctggtccttgattttggctgcgctcgcgcacgctcccccttttctggccgccaggtcccgccttctaaatttccccaggtctccaggccgctagaattttctcttctgaacgtggccccgccctctccactcatgattggccctaagttccgggcctcagttttcactggataagcggtcgctgagcggggcgcaggtgactaaatttcgacggggtcttctcacgggtttcattcagttggccactgctgagcagctgagaaggtggcgacgtaggggccatggggctgggccgggtcctgctgtttctggccgtcgccttcccttttgcacccccggcagccgccgctggtgagtggggttcctggcggtccccggcggagcgggagcggcggggcgtttccgggggtccgggtgggttgccgcgagcgctgtgcggtcagggcggggctcaggtgtgctgtctggagtgcagggagctggacgccgcctgttcccgccacacctcagccctgctttcccatctcccgtctcttttttttttttttttttctttctgagacggagtctctgtcgcctaggctgtagtgcagtggcgcgatcttggctcactgcaagcgccgcctcccgggttcacgccattctcctgcctcagcctccctagtagctgggactacaggcgcccgccaccacgcccggctaattttttgtgtttttagtagagatggggtttcaccgtgttagtcaggatggtctcgatctcctgacctcgtgatccgcccgcctcggcctcccaaagtgctgggattacaggcgtgagccaccgcgcccgacctcctgtctcctttcagtcctcctcgggatcgcgcatcacccgcattttctggtctctcctgcacttgctctcctcgcctctcctccgtctcctctcacttttcggacaaaccagtccttctgaggcccctgggttcccgggctgctcctgtgaatggcattggaaggccgttccagcgcggccgctgaggcagccacttcccccggtgctgggggcggatctcaggtccctgaagtcctgtcctctcccggagccgatgtgttctcagctcctgggccgcagctcctggagttggggccctcctttcttgggacccggaggtggtgcttcttgctgctgtggggactgtggggggtcctgactctcaagctgaggggttggagtctgcaggctccgggcagaggattcttcctgcgacttctgtcatccccagctcattctcccctcgcctccggctccgggggtcctctcctctctcgcatcccacccctactaatgaccaatgatctaaggacaccagattccctctcacctcctccctgcccatcttacggcgccctgggtcctgttgctctcccagctccctgctaccccttcctgtgtgctgttctctgatccatttctagggtgtcctctgccttcatcccccgcccccgccactgaaggtccctcctgcctcctttatgggcctttcctgcaagcagccttcactccgtgctgcccctatgcctccccattcccaaatgtccctgactctaactttctggtgctgccttttgtccgggggggtcttccctccatcccactcccctccagacccccaaggagagccctgatgctaatggcagttgggccttaggcagggcgcagggcagcgcagatgccccctcccctccagtgcaggtgcctgctctgggccctgcctcattgtggccccttccccactccttcatcctcagcctcaccctcttgaggaccccaccctccagcccacaggtgctggaccatccctccctggtccctccgcccctctccaccttgggaccttgtgctgctcctatctcttgcccagctgcctggggccctcagcaagttctcatctttcagtgggaaagtgggagtgctggagcatatgacagtgctgagaatctttcccaagccccaccctcccccagagcaccctcccctcctgtcctcaccctaccccaagttctcccacagtcactcctgccccatgctcatgccgccctccagttcttgctctgcccatctcccctccccaacccagacctaaaacaggctgttgggccagctgttccttgaccttccttcttttcttttggttccttgaccccagtgggctctcactccccacaccgcatatctaaaatctgttttgcctgctcttggggtgccactgctccccctccagcattactccttttggcaggtccttcctcaggctgagaatctccccctctaccttggttttctctctctggccagcacccccaccccttgctttgtttttaatttttaacttttgtttgggtacgtagtagatatgtatgtatatatttatggggtacatgggatattttgacacaggcctacaatatgtcataatcacatcagggtaaatgggttatctatcacaacaagcatttatcctttctttgtgctacaaacaatcccattatgctctttcagttatttttaaatgtacaataaattattgttggctgtactcaccctgctgtgctatctactagatcttattcattctaactatatttttgtacccattaaccatccgcactcccccactccccactacccttctcagcctctggtagtcgtcattctattgtctctccccatgaggtccattgttttaatttttggctgccacaaataagtgagaacatgcgaagtttgtctctctgggcctggggcttatttcacttcacatgatgacctccagttctttgcaaatgacatgatggctgaatagtactccacatacacgtgtgcaccacattttctttctccattcgtctgttgatggacacttaggtcgcttgcagatcttggctattttgaatagtgctgcaataaacatggaaaagtagatagctctttaatataccgatttcctttcttttgggtatatgcctaacagtgggagtgctggagcatatgacagctctattatatttttagtttttggaagaacctccacattatttcccacagtggttatactagtttacgttcccaccaacagtgtacaagggttctcttttgctacatcctcgccaggattccttattgcctgtcttctggataaaagccagtttatctggggtgggatgatatctcgtaggagttttgatttgccttcatctgatgacgaatgatgttgagcaccttttgatatacctgtttgccatttgtatgtcttcttttgagaaatgactattcagatcttttgctcatttttaagttggattattagatatttttcctatagagttgtttgagatccttatatgttttggttactaatcctttgtcagatgaatagtttgaaaatattttctcccattcttggatggtctcttcactttgtttattgtttcctttgctgtgcagaagctttttaacttgatatgatcccatttatgcatttttactttggttgcctctgcttgtggggtattacttaaaaaatctttgccagtccaatatcttagagagtttccccaatgttttctttcatagttttcatagtttgaggtcatagatttacatctttaatcctttttgattggatttttatatgtggtgagagatagggtccagtttcattcttctgcataaggatatctagtttccccagcaccatttattgaagagactctcctttgccctgtatgtgttcttggtaactttgttagaaataacttcactgtagatatatggatttgtttctgggttctctattctgtttcattggtccgtgtgtctgtttttatgccactaccgtgctgttttgattactctagctctgtagtataatttgaagtcagataatgtgattccgctagttttgttctttttgctcagggtagctttatctattctgggttttttgtgattccatatacattttaggattgtttttctatttctgtgaagaatgtcattggtgttttgatagcaattgcattgaatttgtagattgctttgggtaggatggatattttaacaaaattgattcttccggctgggcacggtggctcactcctgtaatcccagcactttgggaggccgagtcaggtggatcacttgagatcaggagttcaagaccagcctgatcaacatggggaaaccccgcctctactaaaaatacaaaattagccaggcgtggtggcatatgcctgtaatcccagctactcaggaaagctgaggcaggagaatcgcttgaacccaggaggcagaggttgtggtgagctgagattgcaccattgcactccagcctgggcaacaggagcaaaactccatctcagaaaataaaaataaacattgattcttccagtccgtgaacatggaatgccttttccattttttgtgtcctcttcaatgttttgcatcagtgctttatagtttttattggagagatctttcacttcttcagttaagtctattcctaggtattttattttatttgtagctaatgaaaatgggattcgtttcttgatttctttttcagattatttgctgttagcacatagaagtgctattgttttttgcatgttgattttgtatcctgcaactttactgaatttgttcttcagttctaatagttttttggtggagtctttaggttttccaaatatcagaccacatgatgtgcaaacaaggataatttgacttcttcttttccaattttgatgccctttatttccttctcctgtcagattgctctagctaggacttgcagtattgtgttgcataactgtagtgaaagtagtcatccttgtcttgttccagatcttaaagaaaaggctttcagttttcccccattcagtatgttactagctgtgagttgtcatatatggcttttgttatattgaggtctgttccttgtatactcagtttttttagagtttttatcatgaagggatgttaaacttatcaaatgctttttcagtatcaattgaaatggtgatatggcttttgtcctttattctgttgatacgatgtattacattgattgatttgtgtatgcatacctggaatacattccacttggtcatgaagaatgatctttttaatatactgttgaatgtggtttgctagtatttcattgatgatatttgcctcaatgttcatcagggatataggcctgtagttttctttttttgatgtgtctttgcctgattttgatatcaggatattcctggctttgtaaaatgagtttggaagtattccctcctcctctgtttttcagaacaatttgaataggactgatatttcttgttctttaaacgtttaattgtggtaaattatacattacatacattttactgttttaaccgcttttaagtgtatactcggtggcattagatacattcacatttttgtgcaacccaaaactctgtacccattaatcagtaactccccattcctccctacctctggcccctggtaaccatcattctactttttgtttctatgaatttgaccactctaggtacctcatttaagtagaatcgtgtaatgtttgtctttttgattctggcttatttcacttataatatttcgaggttcatccaggttgtagtatgggtcagattttcattccttttaatgatgaataatactcattatatgtatgtaccacatcttggttatccattcctcagacaatggacacttgggttacttctaccttttggatattggcaaatatttcatttctcttgggtatatatttatttcttttgagtatttcttttgggtatatatccagaaatagaattgttggatcatacggtatttcattttttaatttttagaggaatcaccatagtgttttccattgcaggcgtgccattttgtatttctagaagcagtatacaggggcttcagtttctctacctccttgccaaacttgctgtgtgtgtgtgtgtgtgtgtgtgtgtgtgtgtgtgtgataatagccaccctgattggtttgaagtggtatctcattgtggtttggatttgcattttcctaatgagtactgatattgagcatcttttcatgtgtttattgatcatttgtatattttctttgaagaattggccattgaagtcttgcccatttttctcccccacatagcttctcatggctattttgcccatttttgagtgggttgactgttttgttgtttttgtcaaacttttttgcatattctggaaactaatctctctctttttcttttttttttttttttttttttttgagatggagtcttgctctgttgcccaggctggagtgcagtggcacgatctcagctcactgcaagctccgcccgctagcttcatgccattctcccgcctcagcctcccgagtagctgggactacaggcgcccgccaccacacccggctaattttttgtatttttagtagagatagggtttcaccatgttagccaggatggtctcaatctcctgacctggtgatacacccgcctcggcctcccaaagtgctggaactacaggcttgagccaccacgcctggccttctggaaactaatctcttatcagatatatgacttgcaatatttatttcatttcaggggttgattgctttctcactctgattgtgccctttgatgcacagatattttgaatttttcatgagtccagtttgtcagttctttctattctatctgtgctttggcgtcatatccatgaaagcactgtcaaaccctatgtcatgaacattatacccaatgtttttttctaagatatttttatgttttagttcttgagtttagagtttaggtctttgattcattttgagttaatttttgtatatagtacaaattaagggtccaattttatattatttgaacatccagttcccccagcactatttgctgaaaagatggacttactctttgagaccctgtcacctgcccaccccagtggacactagctggtccatccaattgctgtcctggggccttgtcatgctactcttccactttggacccaagcccacatcattgctcccctctgggatactgaccccactataaacttcactggggctacaaccttcctaccccttgtgcctcatgaccaccccctcccttgtccccaccatgcccatgatgagtcttttctcaaggcagctcgccttgcctccatctcaccctcacctgtgcaccacagccacactggacatgggtccctctgagcctgagtcccttcccattcccactgtcccctctggcaagaccttccttccaacactgccttcatgctcctcccttgcccctgcagggcagcctctccccttggcccctattcccttagggggcttgtggccacccagtcctggcacctgacctacaagtttgccatcttcattcccccttcttctgttcatcagccccctcctctatcctcccaccctcacagttttccttgtatatgaaatcttcgttcttgtccttttgcccatgcgcatttcctgcctcctcagggaggtcgggacagcagacctgtgtgttaaacatcaatgtgaagttatttccaggaagaagtttcacctgtgatttcctcttccccagagccccacagtcttcgttacaacctcatggtgctgtcccaggatggatctgtgcagtcagggtttctcgctgagggacatctggatggtcagcccttcctgcgctatgacaggcagaaacgcagggcaaagccccagggacagtgggcagaaaatgtcctgggagctaagacctgggacacagagaccgaggacttgacagagaatgggcaagacctcaggaggaccctgactcatatcaaggaccagaaaggaggtgagagtcggcaggggcaagagtaatgggaggccttctccaggaaagttggagacagagagcagggacctgtctcttcccgctggatctggctgggggtggggatgaggaatagggtcagggaggctcagcagggtggtgagccggaactcagcccacacagggaggcatggaggagggccagggaggggtcgctgctgggctgagttcctcacttgggtggaaaggtgatgggttcgggaatggagaagtcactgctgggtgggggcaggcttgcattccctccaggagattagggtctgtgagatccatgaagacagcagcaccaggggctcccggcatttctactacgatggggagctcttcctctcccaaaacctggagactcaagaatcgacagtgccccagtcctccagagctcagaccttggctatgaacgtcacaaatttctggaaggaagatgccatgaagaccaagacacactatcgcgctatgcaggcagactgcctgcagaaactacagcgatatctgaaatccggggtggccatcaggagaacaggtaccgaccctggccaggggctctactgttcccgcaattctgctagagttgcctcgcctcccagctctgtccggggaaaccctccctgtgctatggatgcaggcgtttcctgttggcatattgtgtcctgatttgcctctcctgttagagccattggataaagacagtgggtctgggactgaactgtccagtgttgtaatctgggaaagcagtgggccctctgacagaagcctgagcctggtgtgggagttaggcaggagaggaagccctcagggccagggctgccccctctgcctcccggcctgcccatcccggagagttccctcctggccccatgacccaggagtccacccttgacatccccctcctcagcatcaatgtggggatcccagagcctgaggccacagtcccaaggcccatcctcctgctagcctggaggaattaggccccagggtgaggacagacttacagaaggtccggtatctgtgagggattcagccagagtgagaacagtggagaggagcagccctgttccctgcatctcccttagaggggagcagggcttcactggctctgccctttcttctccagtgccccccatggtgaatgtcacctgcagcgaggtctcagagggcaacatcaccgtgacatgcagggcttccagcttctatccccggaatatcacactgacctggcgtcaggatggggtatctttgagccacaacacccagcagtggggggatgtcctgcctgatgggaatggaacctaccagacctgggtggccaccaggattcgccaaggagaggagcagaggttcacctgctacatggaacacagcgggaatcacggcactcaccctgtgccctctggtgagcctggggtgaccctggagagggtcaggccagggtaggaacagcaaggacggctgtggctctctgcccagtgtataacaagtccctttttttcagggaaggcgctggtgcttcagagtcaacggacagactttccatatgtttctgctgctatgccatgttttgttattattattattctctgtgtcccttgttgcaagaagaaaacatcagcggcagagggtccaggtgagaaaaggggacagtttctggagatgggaaagctcctttctaggcagtagggtctcctcattgctcctgcccagacaagacgtaggtgacaaggctgctgggacaggggatggaagctggggtatttgggaggggaatgggagctgcatctccatctacacccataagtgcttcccaagccagggctggggcaaggccttcgaatatccagctgtggcctcctcctgctgcaagtgaggagtgggcagcagggagggctgtggcacctgctctgtccccatcccagcctctctgtctctcgggctcactagggtgcgtccaggtggggtgagttgggaatcacgtgctgattgctgagggcctggatgatcatggtgtcagagggaggaaatagtaaaggtggctgtgatctggggagggccagaaactggagaggaatccaaggagaggcgatgcccacccgtgtgcctcctccaggaggcactttccaggttcccactacctggcctccctgagtttccttgcagatgacacagatgaatagataagcagatgtccctgggccatttgaggagcggggcccagcccctcatcagggcagatgtggtccctgttttcatcctacctccagcgtgttttcttctgcagtccctgagggacacagtccccaggcgccatctctttgaggctttgttctgtgctctgtggccttaccttgccctccctgagccaatttccctttctcaaggtggtcactgcctggtaagtttggagtaagggacagtcagaagcatttcccccacagtcaggttgtttgatgggagatgaaaagagacagcagaagttttgtgtttctgcaaaaacagaggcagtgcaggggacagtgagaggctggggtgtccaggagacctgagtctggcggtaggggcgctggtttctcatccttgaacctagttgcactgtcagtcggcccctcatgcctgagcagatgggaaggttcgtcccctgccctgcagcaagagggccccatccaggaggcacccacagcaggggcagtgcaggtctgtggtcactcctgctctcacctgcggcgtctcccgtggagggattgtcacttctggttccctgtgggcaggaatggtttcctcgtaggtcactggggttttggccaggaaaagggtatgaaattcatgtgccagtttctcaaaattcctgctttcaatgttgatgtccaataaagatgttcgtaatttcagctctataatcttaataggatttcctctaatactgctgttgtaaagcatattaaataaaacaggaactcaaatttggagccccctctccagaagggtctgtgtggagatggtggctgtggcagcggcagttcccaggtgcagagggtgggcagaggcagcctcaggctaaggggtctcccctactccacgtggagaaaagtccttgtaggttgcaagggcagtggcctgggtggaatccctgctagggacagagcaggaaggcctcacagcctcaccaagcagcagccctggggtgaagtaagtggaccaggagtaagtggaccaggcaggagcagtagtgactcaacagcaggtcacaggcctaggtgggtgctgaaggtcatgggaggccaggcctcctcgagcaaggtggggggtcccagggtcaggtcaggtgcagatcctgtggcagccacgtctttccatgctgggcctgctgggccccccaggcttcctgatggggtccccagttaggagctgcctgctcagggctgggaggggaggagtgctgagctgcagatagagggcagggcccacagtgggcagggcctgccctggtgtgcaggtgcctctgcaggagagaagggcctggggactgagagcaagggtcagggcctctctttggggaggcctctcactgtaacaggactggtcaggcctgagaggagggcactgggttccctcttgggtcttgtccttttgtcttggggccctttcactccctgcacggtgagtggtgggcacaggacaggggctgatgttgatggagtgatgggagagaactgacaggggctgggaaaagcaaggagggaggaagaaaaaagtgggggcctcatcttctctcagagaaagggcgaatctgattttggggcaactgaagagagaaaagtccttagggaataaacacaacactgcacccagtggagcatttacccgtttccctcttctccagagcttgtgagcctgcaggtcctggatcaacacccagttgggacaggagaccacagggatgcagcacagctgggatttcagcctctgatgtcagctactgggtccactggttccactgagggcacctagactctacagccaggcggccaggattcaactccctgcctggatctcaccagcactttccctctgtttcctgacctatgaaacagagaaaataacatcacttatttattgttgttggatgctgcaaagtgttagtaggtatgaggtgtttgctgctctgccacgtagagagccagcaaagggatcatgaccaactcaacattccattggaggctatatgatcaaacagcaaattgtttatcatgaatgcaggatgtgggcaaactcacgactgctcctgccaacagaaggtttgctgagggcattcactccatggtgctcattggagttatctactgggtcatctagagcctattgtttgaggaatgcagtcttacaagcctactctggacccagcagctgactccttcttccacccctcttcttgctatctcctataccaataaatacgaagggctgtggaagatcagagcccttgttcacgagaagcaagaagccccctgaccccttgttccaaatatactcttttgtctttctctttattcccacgttcgccctttgttcagtccaatacagggttgtggggcccttaacagtgccatattaattggtatcattatttctgttgtttttgtttttgtttttgtttttgtttttgagacagagtctcactctgtcacccaggctgcagttcactggtgtgatctcagctcactgcaacctctgcctcccaggttcaagcacttctcgtacctcagactcccgaatagctgggattacagacaggcaccaccacacccagctaatttttgtattttttgtagagacggggtttcgccaagttgaccagcccagtttcaaactcctgacctcaggtgatctgcctgccttggcatcccaaagtgctgggattacaagaatgagccaccgtgcctggcctattttattatattgtaatatattttattatattagccaccatgcctgtcctattttcttatgttttaatatattttaatatattacatgtgcagtaattagattatcatgggtgaactttatgagtgagtatcttggtgatgactcctcctgaccagcccaggaccagctttcttgtcaccttgaggtcccctcgccccgtcacaccgttatgcattactctgtgtctactattatgtgtgcataatttataccgtaaatgtttactctttaaataga

SEQ ID NO: 311 - DNA, 16206 bp, Homo sapiens
  source 1..16206: mol_type = genomic DNA; note = NT_113891.3:2972259-2988464 MICB [organism=Homo sapiens] [GeneID=4277] [chromosome=6]
cttttccggaccctgcagtggcgcctaaagtctgcgaggaggaagtcgcctctgtgctcgtgagtccagggatctaaggcaagtgctgagggagaaaacatagttgatggggcagagcagagggggctggaggtggggtggagggggagggctttgaacagaagacctgggaggcttggtgggggaggggacccaggcctcggcgctgagaagcaactcccctggagctcaagaccttcttggcctcccctagcccaggggaggactggcttcatgtctccctgaaaccgcttctaaatgccttagaacaaaccttaaatattcattattattattgaactattaaaagtcttttttggaggcgagctgaatgagaccctttgctggagctggcacacggaggaagtcctggagggagggtagacaccgtggagggaagggcttgggacctgtgtcaggagagctgggtccatctccctctctgtctcaaactatgcttatgatctttagcagtgaaaataatctctctaaggtggggacaggaccccagtccctgctgtgcttaataaattatgaggatcaaaataaattatcagtgaatgtgtatgggaagactaagaaattgttaaagttctcgaatacattacattttcatccacagaaaagtgtaggctagggatgataggggaatagttagtaatgacagggatagttgaacttaaaaaaaaaggttgtgaggccaacaaaaaagaaatggacacagttcctgatcctggagggttcatagtctaatgggagaggagggtagaagatggtaggtgatggctgggtgtgtggcactcgcctcgcctgtagtcccagctactcaagaggctgtggtgggaggactgcttgagcccaggcatttgaggctgcagtgagctataatcacgccactgcattccaactgagtgacacagcaagactcctctcttaaaaaaataaaataaaataaatgaaaaaaataagattcaagacagggcacagtcggtaccatcaggaaggttcaaaccatgggctagatcagtagttctaaaacttgactacacatcggaatcacgcagggaactttaaaagatactaaggtttaggtccaacctaggtttactgatttaactggttgtggctgtggcctgggaacatggatattaaaaactctccaggtggttctacgcagtggctaggtttgaagaccactgcctagatgtcccaatgactaagaatgtgcgctggggacaagccaattctcttagtagaggctttccagacagaattcttattattgagaattgagaattcatatgccacacataatttatcgttttaaagtgtacagatcagtggcttctagcataatcacaaggttgtgccaccgtcaccactatctacttgggaagattttcttcctttttttctttttttttttttttgaggcggagccttgctctgttgcccaggctggagtgcagtggcgcaatctcagctcactgcaagctccgcctcccgggttgaccccattctcctgcctcagccttctgagcagctgggactacaggtacccgccaccacgcccagctaagttttttgtatttttagtagagacggggtttcactgtgttagcaggatgctctccatctcctgacctcgtgatctgcccacctcgacctcccaaagtgctgggattacaggcgtgagccaccgtgcccggaccctttttccttttttttttttttaaaggctagtcaagtgaaacagtgggagtgaagatgaaacaaaaacatctataactggttgtgatcaattagttgtaaacaccactgcactcagaccagcctaattgggaagattttgaggatatgctgtggtctgatgggttccaaggcagaggtgacagtaacctggaagagggagactgcttaggcagtggcatcctggtgggatagggtgaggagatcccagagcccacgtttactgcaaccctggggaaatgtcaccagagaaatgggggtggtgccagacaatagattgtgggagctatggtttccatggtagagtagaagcatctaccatgtgtgacattcagcagatggggcgctgtgggtggcttggagcactctggttgtaactgaggcaggcacagtgtttaggaagcctgtgcagtaatccagactgaagggaggggaaagcctagactaagactatggctgtgggattgaaatagcgttgaaggagctgactttgactcccggagatgaaggggaaagaggaaatcagaagggaccaaggatggtgaagttcttaagagaaactgagtaggaagagaggatgatgtggtgggagacgtgtagagagtccttgtagatctgtcacattgaaggggactatggtcccagaggtacagatgtcctaaaacaggctggaaaagggagtctggagagagcttggtgttgtaatgaaccatggggagccgcctcgttggccctgtgattacccaggaactgaatagagagggggccctgggagacctcagacacttagaggatataagggggtgaaaggggggacctggctttgagtcgaagggaggagaaggagattatatagctgaaacgtctaagagaatttgtgatctgagcgtttctactggggcaagtgcttctgaaaggcagaggcggctgagatctggaaacaggtctgcaaatctggtcactggtctcattgcagtaacgctgtgcgcggttgagggagtgtattggcagaaaaaccacgcgttgtctgtcccggaaggaacaagccagtgagagccggcctgatgggaggaccgccgaaaggggcttggtgaagcccgcgctccttgggggtgggaatgcggggatggggtggtcgcgatgcagggagggcgacagggtccaggtcgtgctcataagtttggagctgtactctcagctactcggggctggtccttgattttggctgcgctcgcgcacgctcccccttttctggccgccaggtcccgccttctaaatttccccaggtctccaggccgctagaattttctcttctgaacgtggccccgccctctccactcatgattggccaagttccgggcctcagttttcactggataagcggtcgctgagcggggcgcaggtgactaaatttcgacggggtcttctcaccggtttcattcagttggccactgctgagcagctgagaaggtggcgacgtaggggccatggggctgggccgggtcctgctgtttctggccgtcgccttcccttttgcacccccggcagccgccgctggtgagtggggttcctggcggtccccggcggagcgggagcggcggggcgtttccgggggtccgggtgggttgccgcgagcgctgtgcggtcagggcggggctcaggtgtgctgtctggagtgcagggagctggacgccgcctgttcccgccacacctcagccctgctttcccatctcccgtctcttttttttttttttttttttttctttctgagacggagtctctgtcgcctaggctgtagtgcagtggcgcgatattggctcactgcaagctccgcctcccgggttcacgccattctcctgcctcagcctccctagtagctgggactacaggcgcccgccaccacgcccggctaattttttgtgtttttagtagagatggggtttcaccgtgttagtcaggatggtctcgatctcctgacctcgtgatccgcccgcctcggcctcccaaagtgctgggattacaggcgtgagccaccgcgcccgacctcccgtctcctttcagtcctcctcgggatcgcgcatcacccgcattttctggtctcctcctgcacttgctctcctcgcctctcctccgtctcctctcacttttcggacaaaccagtccttctgaggcccctgggttcccgggctgctcctgtgaatggcattggaaggccgttccagcgcggccgctgaggcagccacttcccccggtgctgggggcggatctcaggtccctgaagtcctgtcctctcccggagccgatgtgttctcagctcctgggccgcagctcctggagttggggccctcctttcttgggacccggaggtggtgcttcttgctactgtgaggactgtggggggtcctgactctcaagctgaggggttggagtctgcaggctccgggcagaggattcttcctgcgacttctgtcatccccagctcattctcccctcgcctccggctccgggggtcctctcctctctcgcatcccacccctactaatgaccaatgatctaaggacaccagattccctctcacctcctccctgcccatcttacggcgccctgggtccttttgctctcccagctccctgctaccccttcctgtgtgctgttctctgatccatttctagagtgtcctctgccttcatcccccgcccccgccactgaaggtccctcctgcctcctttatgggcctttcctgcaagcagccttcactccgtgctgcccctatgcctccccattcccaaatgtccctgactctaactttctggtgctgccttttgtccgggggggtcttccctccatcccactcccctccagacccctaaggagagccctgatgctaatggcagttgggccttaggcagggcgcagggcagcgcagatgccccctcccctccagtgcaggtgcctgctctgggccctgcctcattgtggccccttccccactccttcatcctcagcctcaccctcttgaggaccccaccctccagcccacaggtgctggaccatccctccctggtccctccgcccctctccaccttgggaccttgtgctgctcctatctcttgcccagctgcctggggccctcagcaagttctcatctttcagtgggaaagtgggagtgctggagcatatgacagtgctgagaatctttcccaagccccaccctcccccagagcaccctcccctcctgtcctcaccctaccccaagttctcccacagtcactcctgccccatgctcatgccgccctccagttcttgctctgcccatctcccctccccaacccagacctaaaacaggctgttgggccagctgttccttgaccttccttcttttcttttggttccttgaccccagtgggctctcactccccacaccgcatatctaaaatctgttttgcctgctcttggggtgccactgctccccctccagcattactccttttggcaggtccttcctcaggctgagaatctccccctctaccttggttttctctctctggccagcacccccaccccttgctttgtttttaatttttaacttttgtttgggtacgtagtagatatgtatgtatatatttatggggtacatgggatattttgacacaggcctacaatatgtcataatcacatcagggtaaatgggttatctatcacaacaagcatttatcctttctttgtgctacaaacaatcccattatgctctttcagttatttttaaatgtacaataaattattgttggctgtactcaccctgctgtgctatctactagatcttattcattctaactatatttttgtacccattaaccatccgcactcccccactccccactacccttctcagcctctggtaatcgtcattctattgtctctccccatgaggtccattgttttaatttttggctgccacaaataagtgagaacatgcgaagtttgtctctctgggcctggggcttatttcacttcacatgatgacctccagttctttgcaaatgacatggtggctgaatagtactccacatacacgtgtgcaccacattttctttctccattcgtctgttgatggacacttaggtcgcttgcagatcttggctattttgaatagtgctgcaataaacatggaaaagtagatagctctttaatataccgatttcctttcttttgggtatatgcctaacagtgggagtgctggagcatatgacagctctattatatttttagtttttggaagaacctccacattatttcccacagtggttatactagtttacgttcccaccaacagtgtacaagggttctcttttgctacatcctcgccaggattccttattgcctgtcttctggataaaagccagtttatctggggtgggatgatatctcgtaggagttttgatttgccttcatctgatgacgaatgatgttgagcaccttttgatatacctgtttgccatttgtatgtcttcttttgagaaatgactattcagatcttttgctcatttttaagttggattattagatatttttcctatagagttgtttgagatccttatatgttttggttactaatcctttgtcagatgaatagtttgaaaatattttctcccattcttggatggtctcttcactttgtttattgtttcctttgctgtgcagaagctttttaacttgatatgatcccatttatgcatttttactttggttgcctgtgcttgtggggtattacttaaaaaatctttgccagtccaatatcttagagagtttccccaatgttttcttttatagttttcatagtttgaggtcatagatttacatctttaatcctttttgattggatttttatatgtggtgagagatagggtccagtttcattcttctgcataaggatatctagtttccccagcaccatttattgaagagactctcctttgccctgtatgtgttcttggtaactttgttagaaataacttcactgtagatatatggatttgtttctgggttctctattctgtttcattggtccgtgtgtctgtttttatgccactaccgtgctgttttgattactctagctctgtagtataatttgaagtcagataatgtgattcctctagttttgttctttttgttcagggtagctttatctattctgggttttttgtgattccatatacattttaggattgtttttctatttctgtgaagaatgtcattggtgttttgatagcaattgcgttgaatttgtagattgctttgggtaggatggatattttaacaaaattgattcttccggctgggcacggtggctcactcctgtaatcccagcactttgggaggccgagtcaggtggatcacttgagatcaggagttcaagaccagcctgatcaacatggagaaaccccgcctctactaaaaatacaaaattagccaggcgtggtggcatatgcctgtaatcccagctactcaggaaagctgaggcaggagaatcgcttgaacccaggaggcagaggttgtggtgagctgagattgcaccattgcactccagcctgggcaacaggagcaaaactccatctcagaaaataaaaataaacattgattcttccagtccatgaacatggaatgccttttccattttttgtgtcctcttcaatgttttgcatcagtgctttatagtttttattggagagatctttcacttcttcagttaagtctattcctaggtattttattttatttgtagctaatgaaaatgggattcgtttcttgatttctttttcagattatttgctgttagcacatagaaatgctattgatttttgcatgttgattttgtatcctgcaactttactgaatttgttcttcagttctaatagttttttggtggagtctttaggttttccaaatatcagaccacatgatgtgcaaacaaggataatttgacttcttcttttccaattttgatgccctttatttccttctcctgtcagattgctctagctaggacttgcagtattgtgttgcataactgtagtgaaagtagtcatccttgtcttgttccagatcttaaagaaaaggctttcagttttcccccattcagtatgttactagctgtgagttgtcatatatggcttttattatattgaggtctgttccttgtatactcagtttttttagagtttttatcatgaagggatgttaaacttatcaaatgctttttcagtatcaattgaaatggtgatatggcttttgtcctttattctgttgatacgatgtattacattgattgatttgtgtatgcatacctggaatacattccacttggtcatgaagaatgatctttttaatatactgttgaatgtggtttgctagtatttcattgatgatatttgcctcaatgttcatcagggatataggcctgtagttttctttttttgatgtgtctttgcctgattttgatatcaggatattcctggctttgtaaaatgagtttggaagtattccctcctcctctgtttttcagaacaatttgaataggactgatatttcttgttctttaaacgtttaattgtggtaaattatacattacataaattttactgttttaaccgcttttaagtgtatactcggtggcattagatacattcacatttttgtgcaacccaaaactctgtacccattaatcggtaactccccattcctccctacctctggcccctggtaaccatcattctactttttgtttctatgaatttgaccactctaggtacctcatttaagtagaatcgtgtaatgtttgtctttttgattctggcttatttcacttataatatttcgaggttcatccaggttgtagtatgggtcagattttcattccttttaatgatgaataatactcattatatgtatgtaccacaccttggttatccattcctcagacaatggacacttgggttacttctaccttttggatattggcaaatatttcatttctcttgggtatatatttatttcttttgagtatttcttttgggtatatatccagaaatagaattgttggatcatacggtatttcattttttaatttttagaggaatcaccatagtgttttccattgcaggcgtgccattttgtatttctagaagcagtatacaggggcttcagtttctctacctccttgccaaacttgctgtttgtgtgtgtgtgtgtgtgtgtgtgtgtgtgtgtgtgtgtgtgtgtgtgataatagccaccctgattggtttgaagtggtatctcgttgtggtttggatttgcattttcctaatgagtactgatattgagcatcttttcatgtgtttattgatcatttgtatattttctttgaagaattggccattgaagtcttgcccatttttctcccccacatagcttctcatggctattttgcccatttttgagtgggttgactgttttgttgtttttgtcaaacttttttgcatattctggaaactaatctctctctttttctttttttttttttttttttttttttgagatggagtcttgctctgttgcccaggctggagtgcagtggcacgatctcagctcactgcaagctccacccgctagcttcatgccattctcccacctcagcctccctagtagctgggactacaggcgcccgccaccacacccggctaattttttgtatttttagtagagatagggtttcaccatgttagccaggatggtctcaatctcctgacctggtgatacacccgcctcggcctcccaaagtgctggaattacaggcttgagccaccacgcctggccttctggaaactaatctcttatcagatatatgacttgcaatatttatttcatttcaggggttgattgctttctcactctgattgtgccctttgatgcacagatattttgaatttttcatgagtccagtttgtcagttctttctattctatctgtgctttggcgtcatatccatgaaagcactgtcaaaccctatgtcatgaacattatacccaatgtttttttctaagatatttttatgttttagttcttgagtttagagtttaggtctttgattcattttgagttaatttttgtatatagtacaaattaagggtccaattttatattatttgaacatccagttcccccagcactatttgctgaaaagatggacttactctttgataccctgtcacctgcccaccccagtggacactagctggtccatccaattgctgtcctggggccttgtcatgccactcttccactttgaacccaagcccacatcattgctcccctctgggatactgaccccactataaacttctctagggctacaaccttcctaccccttgtgcctcatgaccaccccctcccttgtccccaccatgcccatgatgagtcttttctcaaggcagctcgccttgcctccatctcaccctcacctgtgcaccacagccacactggacatgggtccctctgagcctgagtcccttcccattcccactgtcccctctggcaagaccttccttccaacactgccttcatgctcctcccttgcccctgcagggcagcctctccccttggcccctattcccttagggggcttgtggccacccagtcctggcacctgacctacaagtttgccatcttcattcccccttcttctgttcatcagccccctcctctatcctcccaccctcacagttttccttgtatatgaaatcttcgttcttgtccttttgcccatgtgcatttcctgcctcctcagggaggtcgggacagcagacctgtgtgttaaacatcaatgtgaagttatttccaggaagaagtttcacctgtgatttcctcttccccagagccccacagtcttcgttacaacctcatggtgctgtcccaggatggatctgtgcagtcagggtttctcgctgagggacatctggatggtcagcccttcctgcgctatgacaggcagaaacgcagggcaaagccccagggacagtgggcagaagatgtcctgggagctgagacctgggacacagagaccgaggacttgacagagaatgggcaagacctcaggaggaccctgactcatatcaaggaccagaaaggaggtgagagtcggcaggggcaagagtaatgggaggccttctccaggaaagttggagacagagagcagggacctgtctcttcccgctggatctggctgggagtggggatgaggaatagggtcagggaggctcagcagggtggtgagccggaactcagcccacacagggaggcatggaggagggccagggaggggtcgccgctgggctgagttcctcacttgggtggaaaggtgatgggttcgggaatggagaagtcactgctgggtgggggcaggcttgcattccctccaggagattagggtctgtgagatgcatgaagacagcagcaccaggggctcccggcatttctactacaatggggagctcttcctctcccaaaacctggagactcaagaatcgacagtgccccagtcctccagagctcagaccttggctatgaacgtcacaaatttctggaaggaagatgccatgaagaccaagacacactatcgcgctatgcaggcagactgcctgcagaaactacagcgatatctgaaatccggggtggccatcaggagaacaggtaccgaccctggccaggggctctactgttcccgcaattctgctagagttgcctcgcctcccagctctgtccggggaaaccctccctgtgctatggatgcaggcgtttcctgttggcatattgtgtcctgatttgcctctcctgttagagccattggataaagacagtgggtctgggactgaactgtccagtgttgtaatctgggaaagcagtgggccctctgacagaagcctgagcctggggtgggagttaggcaggagaggaagccctcagggccagggctgccccctctgcctcccggcctgcccatcccggagagttccctcctggccccatgacccaggagtccacccttgacatccccctcctcagcatcaatgtggggatcccagagcctgaggccacagtcccaaggcccatcctcctgctagcctggaggaattaggccccagggtgaggacagacttacagaaggtccgggatctgtgagggattcagccagagtgagaacagtggagaggagcagccctgttccctgcatctcccttagaggggagcagggcttcactggctctgccctttcttctccagtgccccccatggtgaatgtcacctgcagcgaggtctcagagggcaacatcaccgtgacatgcagggcttccagcttctatccccggaatatcacactgacctggcgtcaggatggggtatctttgagccacaacacccagcagtggggggatgtcctgcctgatgggaatggaacctaccagacctgggtggccaccaggattcgccaaggagaggagcagaggttcacctgctacatggaacacagcgggaatcacggcactcaccctgtgccctctggtgagcctggggtgaccctggagagggtcaggccagggtaggaacagcagggacggctgtggctctctgcccagtgtataacaagtccctttttttcagggaaggcgctggtgcttcagagtcaacggacagactttccatatgtttctgctgctatgccatgttttgttattattattattctctgtgtcccttgttgcaagaagaaaacatcagcggcagagggtccaggtgagaaaaggggacagtttctggagatgggaaagctcctttctaggcagtagggtctcctcattgctcctgcccagacaagacgtaggtgacaaggctgctggaacaggggatggaagctggggtatttgggaggggaatgggagctgcatctccatctacacccataagtgcttctcaagccagggctggggcaaggccttcgaatatccagctgtggcctcctcctgctgcaagtgaggagtgggcagcagggagggctgtggcacctgctctgtccccatcccagcctctctgtctctcgggctcactagggtgcgtccaggtggggtgagttgggaatcacgtgctgattgctgagggcctggatgatcatggtgtcagagggaggaaatagtaaaggtggctgtgatctggggagggccagaaactggagaggaatccaaggagaggcggtgcccacccgtgtgcctcctccaggaggcactttccaggttcccaccacctggcctccctgagtttccttgcagatgacacagatgaatagataagcagatgtccctgggccatttgaggagcggggcccagcccctcatcagggcagttgtggtccctgttttcatcctacctccagcgtgttttcttctgcagtccctgagggacacagtccccaggcgccatctctttgaggctttgttctgtgctctgtggccttaccttgccctccctgagccaatttccctttctcaaggtggtcactgcctggtaagtttggagtaagggacggtcagaagcatttcccccacagtcaggttgtttgatgggggatgaaaagagacagcagaagttttgtgtttctgcaaaaacagaggcagtgcaggggacagtgagaggctggggtgtccaggagacctgagtctggcggtaggggcgctggtttctcatccttgaacctaattgcactgtcagtcggcccctcatgcctgagcagatgggaaggttcgtcccctgccctgcagcaagagggccctgtccaggaggcacccacagcaggggcagtgcaggtctgtggtcactcctgctctcacctgcggcgtctcccgtggagggattgtcacttctggttccctgtgggcaggaatggtttccacgtaggtcactggggttttggccaggaaaagggtatgaaattcatgtgccagtttatcaaaattcctgctttcaatgttgatgtccaataaagatgttcgtaatttcagctctataatcttaataggatttcctctaatactgctgttgtaaagcatattaaataaaacaggaactcaaatttggagccccctctccagaagggtctgtgtggagatggtggctgtggcagcggcagttcccaggtgcagagggtgggcagaggcagcctcaggctaaggggtctcccctactccacgtggagaaaagtccttgtaggttgcaagggcagtggcctgggtggaatccctgctagggacagagcaggaaggcctcgcagcctcaccaagcagcagccctggggtgaagtaagtggaccaggagtaagtggaccaggcaggagcagtagtgactcaacagcaggtcacaggcctaggtgggtgctgaaggtcatgggaggccaggcctcctcgagcaaggtggggggtcccagggtcatgtcaggtgcagatcctgtggcagccatgtctttccatgctgggcctgctgggccccccaggcttcctgatggggtccccagttaggagctgcctgctcagggctgggaggggaggagtgctgagctgcagatagagggcagggcccacagtgggcagggcctgccctggtgtgcaggtgcctctgcaggagaggagggcctggggactgagagcaagggtcagggcctctctttggggaggcctctcactgtaacaggactggtcaggcctgagaggagggcactgggttccctcttgggtcttgtccttttgtcttggggccctttcactccctgcacggtgagtggtgggcacaggacaggggctgatgttgatggagtgatgggagagaactgacaggggctgggaaaagcaaggagggaggaagaaaaaagtgggggcctcatcttctctcagagaaagggtgaatctgattttggggcaactgaagagagaaaagtccttagggaataaacacaacactgcacccagtggagcatttacccgtttccctcttctccagagcttgtgagcctgcaggtcctggatcaacacccagttgggacaggagaccacagggatgcagcacagctgggatttcagcctctgatgtcagctactgggtccactggttccactgagggcgcctagactctacagccaggcggccaggattcaactccctgcctggatctcaccagcactttccctctgtttcctgacctatgaaacagaaaataacatcacttatttattgttgttggatgctgcaaagtgttagtaggtatgaggtgtttgctgctctgccacgtagagagccagcaaagggatcatgaccaactcaacattccattggaggctatatgatcaaacagcaaattgtttatcatgaatgcaggatgtgggcaaactcacgactgctcctgccaacagaaggtttgctgagggcattcactccatggtgctcattggagttatctactgggtcatctagagcctattgtttgaggaatgcagtcttacaagcctactctggacccagcagctgactccttcttccacccctcttcttgctatctcctataccaataaatacgaagggctgtggaagatcagagcccttgttcacgagaagcaagaagccccctgaccccttgttccaaatatactcttttgtctttctctttattcccacgttcgccctttgttcagtccaatacagggttgtggggcccttaacagtgccatattaattggtatcattatttctgttgtttttgtttttgtttttgtttttgtttttgagacagagtctcactctgtcacccaggctgcagttcactggtgtgatctcagctcactgcaacctctgcctcccaggttcaagcacttctcgtacctcagactcccgaatagctgggattacagacaggcaccaccacacccagctaatttttgtattttttgtagagacggggtttcgccaagttgaccagcccagtttcaaactcctgacctcaggtgatctgcctgccttggcatcccaaagtgctgggattacaagaatgagccaccgtgcctggcctattttattatattgtaatatattttattatattagccaccatgcctgtcctattttcttatgttttaatatattttaatatattacatgtgcagtaattagattatcatgggtgaactttatgagtgagtatcttggtgatgactcctcctgaccagcccaggaccagctttcttgtcaccttgaggtcccctcgccccgtcacaccgttatgcattactctgtgtctactattatgtgtgcataatttataccgtaaatgtttactctttaaataga

SEQ ID NO: 312 - DNA, 16382 bp, Homo sapiens
  source 1..16382: mol_type = genomic DNA; note = NT_167245.2:2742529-2758910 MICB [organism=Homo sapiens] [GeneID=4277] [chromosome=6]
cttttccggaccctgcagtggcgcctaaagtctgcgaggaggaagtcgcctctgtgcttgtgagtccagggatctaaggcaagtgctgagggagaaaacatagttgatggggcagagcagagggggctggaggtggggtggagggggagggctttgaacagaagacctgggaggcttggtgggggaggggacccaggcctcggcgctgagaagcaactcccctggagctcaagtccatcttggcctcccctagcccaggggaggactggcttcatgtctccctgaaaccgcttctaaatgccttagaacaaaccttaaatattcattattattattgaactattaaaagtcttttttggaggcgagctgaatgagaccctttgctggagctggcacacggaggaagtcctggagggagggtagacaccgtggagggaagggcttgggacctgtgtcaggagagctgggtccatctccctctctgtctcaaactatgcttatgatctttagcagtgaaaataatctctctaaggtggggacaggaccccagtccctgctgtgcttaataaattatgaggatcaaaataaattatcagtgaatgtgtatgggaagactaagaaattgttaaaattctcgaatacattacattttcatccacagaaaagtgtaggctagggatgataggggaatagttagtaatgacagggatagtggaacttaaaaaaaaaggttgtgaggccaacaaaaaagaaatggacacagttcctgatcctggagggttcatagtctaatgggggaggagggtagaagatggtaggtgatggctgggtgtgtggcactcgcctgtagtcccagctactcaagaggctgtggtgggaggattgcttgagcccaggcatttgaggctgcagtgagctataatcacgccactgcattccaactgagtgacacagcaagactcctctcttaaaaaaataaaataaaataaatgaaaaaaataagattcaagacagggcacagtcggtaccatcaggaaggttcaaaccatgggctagatcagtagttctaaaacttgactacacatcggaatcacgtagggaactttaaaagatactaaggtttaggtccaacctaggtttactgatttaactggttgtggctgtggcctgggaacatggatattaaaaactctccaggtggttctacgcagtggctaggtttgaagaccactgcctagatgtcccaatgactaagaatgtgcgctgggtacaagccaattctcttagtagaggctttccagacagaattcttattattgagaattgagaatccacatgccacacataatttatcgttttaaagtgtacagatcagtggcttctagcataatcacaaagttgtgccaccgtcaccactatctacttgggaagattttcttcctttttttcttttttttttttttttgaggcggagccttgctctgttgcccaggctggagtgcagtggcgcaatctcagctcactgcaagctccgcctcccgggttgaccccattctcctgcctcagccttctgagcagctgggactacaggtacccgccaccacgcccagctaagttttttgtatttttagtagagacggggtttcactgtgttagcaggatgctctcgatctcctgacctcgtgatctgcccacctcgacctcccaaagtgctgggattacaggcgtgagccaccgtgcccggaccctttttccttttttttttttttaaaggctagtcaagtgaaacagtgggagtgaagatgaaacaaaaacatctataactggttgtgatcaattagttgtaaacaccactgcactcagaccagcctaattgggaagattttgaggatatgctgtggtctgatgggttccaaggcagaggtgacagtaacctggaagagggagactgcttaggcagtggcatcctggtgggatagggtgaggagatcccagagcccacgtttactgcaaccctggggaaatgtcaccagagaaatgggggtggtgccagacaatagattgtgggagctatggtttccatggtagagtagaagcatccaccatgtgtgacattcagcagatggggcgctgtgggtggcttggagcactctggttgtaactgaggcaggcacagtgtttaggaagcctgtgcagtaatccagactgaagggaggggaaagcctagactaagactatggctgtgggattgaaatagcgttgaaggagctgactttgactcccggagatgaaggggaaagaggaaatcagaagggaccaaggatggtgaagttcttaagagaaactgaggaggaagagaggatgatgtggtgggagacgtgtagagagtccttgtagatctgtcatattgaaggggactatggtcccagaggtacagatgtcctaaaacaggctggaaaagggagtctggagagagcttggtgttgtaatgaaccatggggagccgcctcgttggccctgtgattacccaggaactgaatagagagggggccctgggagacctcagacacttagaggatataagggggtgaaaggggggacctggctttgagtcgaagggaggagaaggagattatatagctgaaacgtctaagagaatttgtgatctgagcgtttctactggggcaagtgcttctgaaaggcagaggcggctgagatctggaaacaggtctgcaaatctggtcactggtctcattgcagtaacgctgtgcgcggttgagggagtgtattgggagaaaaaccacgcgttgtctgtcccggaaggaacaagccagtgagagccggcctgatgggaggaccggcgaaaggggcttggtgaagcccgcgctccttgggggtgggaatgcggggatggggtggtcgcgatgcagggagggcgacagggtccaggtcgtgctcataaggttggagctgtactctcagctactcggggctggtccttgattttggctgcgctcgcgcacgctcccccttttctggccgccaggtcccgccttctaaatttccccaggtctccaggccgctagaattttctcttctgaacgtggccccgccctctccactcatgattggccctaagttccgggcctcagttttcactggataagcggtcgctgagcggggcgcaggtgactaaatttccacggggtcttctcaccgttttcattcagttggccactgctgagcagctgagaaggtggcgacgtaggggccatggggctgggccgggtcctgctgtttctggccgtcgccttcccttttgcacccccggcagccgccgctggtgagtggggatcctggcggtccccggcggagcgggagcggcggggcgtttccgggggtccgggtgggttgccgcgagcgctgtgcggtcagggcggggctcaggtgtgctgtctggagtgcagggagctggacgccgcctgttcccgccacacctcagccctgctttcccatctctcgtctctttttttttttctttctgagacggagtctctgtcgcctaggctgtagtgcagtggcgcgatcttggctcactgcaagctccgcctcccgggttcacgccattctcctgcctcagcctccctagtagctgggactacagacgcccgccaccacgcccggctaatttttttttttttttttttttttttttttttttgagacggagtctcgctctgtcgcccaggccggactgcggactgcagtggcgcaatctcggctcactgcaagctctgcttcccgggttcacgccattctcctgcctcagcctcccgagtagctgggactacaggcgcccgccaccgcgcccggctaattttttgtgtttttagtagagatggggtttcaccgtgttagtcaggatggtctcgatctcctgacctcgtgatccgcccgcctcggcctcccaaagtgctgggattacaggcgtgagccaccgcccccgacctcccgtctcctttcagtcctcctcgggatcgcgcatcacccgcattttctggtctctcctgcacttgctctcctcgcctctcctccgtctcctctcacttttcggacaaaccagtccttctgaggcccctgggttcccgggctgctcctgtgaatggcattggaaggccgttccagcgcggccgctgaggcagccacttcccccggtgctgggggcggatctcaggtccctgaagtcctgtcctctcccggagccgatgtgttctcagctcctgggccgcagctcctggagttggggccctcctttcttgggacccagaggtggtgcttcttgctgctgtggggactgtggggggtcctgactctcaagctgaggggttggagtctgcaggctccgggcagaggattcttcctgcgacttctgtcatccccagctcattctcccctcgcctccggctccgggggtcctctcctctctcgcatcccacccctactaatgaccaatgatctaaggacaccagattccctctcacctcctccctgcccatcttacggcgccctgggtcctgttgctctcccagctccctgctaccccttcctgtgtgctgttctctgatccatttctagggtgtcctctgccttcatcccccgcccccgccactgaaggtccctcctgcctcctttatgggcctttcctgcaagcagccttcactccgtgctgcccctatgcctccccattcccaaatgtccctgactctaactttctggtgctgccttttgtccggggggggtcttccctccatcccactcccctccagacccccaaggagagccctgatgctaatggcagttgggccttaggcagggcgcagggcagcgcagatgccccctcccctccagtgcaggtgcctgctctgggccctgcctcattgtggccccttccccactccttcatcctcagcctcaccctcttgaggaccccaccctccagcccacaggtgctggaccatccctccctggtccctccgcccctctccaccttgggaccttgtgctgctcctatctcttgcccagctgcctggggccctcagcaagttctcatctttcagtgggaaagtgggagtgctggagcatatgacagtgctgagaatctttcccaagccccaccctcccccagagcaccctcccctcctgtcctcaccctaccccaagttctcccacagtcactcctgccccatgctcatgccgccctccagttcttgctctgcccatctcccctccccaacccagacctaaaacaggctgttgggccagctgttccttgaccttccttcttttcttttggttccttgaccccagtgggctctcactccccacaccgcatatctaaaatctgttttgcctgctcttggggtgccactgctccccctccagcattactccttttggcaggtccttcctcaggctgagaatctccccttctaccttggttttctctctctggccagcacccccaccccttgctttgtttttaatttttaacttttgtttgggtacatagtagatatgtatgtatatatttatggggtacatgggatattttcacacaggcctacaatatgtcataatcacatcagggtaaatgggttatctatcacaacaagcatttatcctttctttgtgctacaaacaatcccattatgctctttcagttatttttaaatgtacaataaattattgttggctgtactcaccctgctgtgctatctactagatcttattcattctaactatatttttgtacccattaaccatccgcactcccccactccccactacccttctcagcctctggtattcgtaattctattgtctctccccatgaggtccattgttttaatttttggctgccacaaataagtgagaacatgcgaagtttgtctctctgggcctggggcttatttcacttcacatgatgacctccagttctttgcaaatgacatgatggctgaatagtactccacatacacgtgtgcaccacattttctttctccattcgtctgttgatggacacttaggtcgcttgcagatcttggctattttgaatagtgctgcaataaacatggaaaagtagatagctctttaatataccgatttcctttcttttgggtatatgcctaacagtgggagtgctggagcatatgacagctctattatatttttagtttttggaagaacctccacattatttcccacagtggttatactagtttacgttcccaccaacagtgtacaagggttctcttttgctacatcctcaccaggattccttattgcctgtcttctggataaaagccagtttatctggggtgggatgatatctcgtaggagttttgatttgccttcatctgatgacgaatgatgttgagcaccttttgatatacctgtttgccatttgtatgtcttcttttgagaaatgactattcagatcttttgctcatttttaagttggattattagatatttttcctatagagttgtttgagatccttatatgttttggttactaatcctttgtcagatgaatagtttgaaaatattttctcccattcttggatggtctcttcactttgtttattgtttcctttgctgtgcagaagctttttaacttgatatgatcccatttgtgcatttttactttggttgcctgtgcttgtggggtattacttaaaaaatctttgccagtccaatatcttagagagtttccccaatgttttctttcatagttttcatagtttgaggtcatagatttacatctttaatcctttttgattggatttttatatgtggtgagagatagggtccagtttcattcttctgcataaggatatctagtttccccagcaccatttattgaagagactctcctttgccctgtatgtgttcttgctaactttgttagaaataacttcactgtagatatatggatttgtttctgggttctctattctgtttcattggtccgtgtgtctgtttttatgccactaccatgctgttttgattactctagctctgtagtataatttgaagtcagataatgtgattcctctagttttgttctttttgctcagggtagctttatctattctgggttttttgtgattccatatacattttaggattgtttttctatttctgtgaagaatgtcattggtgttttgatagcaattgcattgaatttgtagattgctttgggtaggatggatattttaacaaaattgattcttccggctgggcacggtggctcactcctgtaatcccagcactttgggaggccgagtcaggtggatcacttgagatcaggagttcaagaccagcctgatcaacatggggaaaccccgcctctactaaaaatacaaaattagccaggcgtggtggcatatgcctgtaatcccagctactcaggaaagctgaggcaggagaatcgcttgaacccaggaggcagaggttgtggtgagctgagattgcaccattgcactccagcctgggcaacaggagcaaaactccatctcagaaaataaaaataaacattgattcttccagtccatgaacatggaatgccttttccattttttgtgtcctcttcaatgttttgcatcagtgctttatagtttttattggagagatctttcacttcttcagttaagtctattcctaggtattttattttatttgtagctaatgaaaatgggattcgtttcttgatttctttttcagattatttgctgttagcacatagaaatgctattgttttttgcatgttgattttgtatcctgcaactttactgaatttgttcttcagttctaatagttttttggtggagtctttaggttttccaaatatcagaccacatgatgtgcaaacaaggataatttgacttcttcttttccaattttgatgccctttatttccttctcctgtcagattgctctagctaggacttgcagtattgtgttgcataactgtagtgaaagtagtcatccttgtcttgttccagatcttaaagaaaaggctttcagttttcccccattcagtatgttactagctgtgagttgtcatatatggcttttattatattgaggtctgttccttgtatactcagtttttttagagtttttatcatgaagggatgttaaacttatcaaatgctttttcagtatcaattgaaatggtgatatggcttttgtcctttattctgttgatacgatgtattacattgattgatttgtgtatgcatacctggaatatattccacttggtcatgaagaatgatctttttaatatactgttgaatgtggtttgctagtatttcattgatgatatttgcctcaatgttcatcagggatataggcctgtagttttctttttttgatgtgtctttgcctgattttgatatcaggatattcctggctttgtaaaatgagtttggaagtattccctcctcctctgtttttcagaacaatttgaataggactgatatttcttgttctttaaacgtttaattgtggtaaattatacattacatacattttactgttttaaccgcttttaagtgtatactcggtggcattagatacattcacatttttgtgcaacccaaaactctgtacccattaatcggtaactccccattcctccctacctctggcccctggtaaccatcattctactttttgtttctatgaatttgaccactctaggtacctcatttaagtagaatcgtgtaatgtttgtctttttgattctggcttatttcacttataatatttcgaggttcatccaggttgtagtatgggtcagattttcattccttttaatgatgaataatactcattatatgtatgtaccacatcttggttatccattcctcagacaatggacacttgggttacttctaccttttggatattggcaaatatttcatttctcttgggtatatatttatttcttttgaatatttcttttgggtatatatccagaaatagaattgttggatcatacggtatttcattttttaatttttagaggaatcaccatagtgttttccattgcaggcgtgccattttgtatttctagaagcagtatacaggggcttcagtttctctacctccttgccaaacttgctgtttgtgtgtgtgtgtgtgtgtgtgtgtgtgtgtgtgtgtgtgtgtgataatagccaccctgattggtttgaagtggtatctcgttgtggtttggatttgcattttcctaatgagtactgatattgagcatcttttcatgtgtttattgatcatttgtatattttctttgaagaattggccattgaagtcttgcccatttttctcccccacatagcttctcatggctattttgcccatttttgagtgggttgactgttttgttgtttttgtcaaacttttttgcatattctggaaactaatctctctttctttttttttttttttttttttttttttttttttttttttttttttgagatggagtcttgctctgttgcccaggctggagtgcagtggcacgatctcagctcactgcaagctccgcccgctagcttcatgccattctcccgcctcagcctcccgagtagctgggactacaggcgcccgccaccacacccggctaattttttgtatttttagtagagatagggtttcaccatgttagccaggatggtctcaatctcctgacctggtgatacacccgcctcggcctcccaaagtgctggaactacaggcttgagccaccacgcctggccttcaacctcttatcagatatatgacttgcaatatttatttcatttcaggggttgattgctttctcactctgtgccctttgatgcacagatattttgaatttttcatgagtctagtttgtcagttctttctattctatctgtgctttggcgtcatatccatgaaagcactgtcaaaccctatgtcatgaacattatacccaatgtttttttctaagatatttttatgttttagttcttgagtttagagtttaggtctttgattcattttgagttaatttttgtatatagtacaaattaagggtccaattttatattatttgaacatccagttcccccagcactatttgctgaaaagatggacttactctttgagaccctgtcacctgcccaccccagtggacactagctggtccatccaattgctgtcctggggccttgtcatgccactcttccactttggacccaagcccacatcattgctcccctctgggatactgaccccactataaacttcactggggctacaaccttcctaccccttgtgcctcatgaccaccccctcccttgtccccaccatgcccatgatgagtcttttctcgaggcagctcgccttgcctccatctcaccctcacctgtgcaccacagccacactggacatgggtccctctgagcctgagtcccttcccattcccactgtcccctctggcaagaccttccttccaacactgccttcatgctcctcccttgcccctgcagggcagcctctccccttggcccctattcccttagggggcttgtggccacccagtcctggcacctgacctacaagtttgccatcttcattcccccttcttctgttcatcagccccctcctctatcctcccaccctcacagttttccttgtatatgaaatcttcgttcttgtccttttgcccatgtgcatttcctgcctcctcagggaggtcgggacagcagacctgtgtgttaaacatcaatgtgaagttatttccaggaagaagtttcacctgtgatttcctcttccccagagccccacagtcttcgttacaacctcatggtgctgtcccaggatggatctgtgcagtcagggtttctcgctgagggacatctggatggtcagcccttcctgcgctatgacaggcagaaacgcagggcaaagccccagggacagtgggcagaagatgtcctgggagctaagacctgggacacagagaccgaggacttgacagagaatgggcaagacctcaggaggaccctgactcatatcaaggaccagaaaggaggtgagagtcggcaggggcaagagtaatgggaggccttctccaggaaagttggagacagagagcagggacctgtctcttcccgctggatctggctgggggtggggatgaggaatagggtcagggaggctcagcagggtggtgagccggaactcagcccacacagggaggcatggaggagggccagggaggggtcgccgctgggctgagttcctcacttgggtggaaaggtgatgggttcgggaatggagaagtcactgctgggtgggggcaggcttgcattccctccaggagattagggtctgtgagatccatgaagacagcagcaccaggggctcccggcatttctactacgatggggagctcttcctctcccaaaacctggagactcaagaatcgacagtgccccagtcctccagagctcagaccttggctatgaacgtcacaaatttctggaaggaagatgccatgaagaccaagacacactatcgcgctatgcaggcagactgcctgcagaaactacagcgatatctgaaatccggggtggccatcaggagaacaggtaccgaccctggccaggggctctactgttcccgcaattctgctagagttgcctcgcctcccagctctgtccggggaaaccctccctgtgctatggatgcaggcgtttcctgttggcatattgtgtcctgatttgcctctcctgttagagccattggataaagacagtgggtctgggactgaactgtccagtgttgtaatctgggaaagcagtgggccctctgacagaagcctgagcctggggtgggagttaggcaggagaggaagccctcagggccagggctgccccctctgcctcccggcctgcccatcccggagagttccctcctggccccatgacccaggagtccacccttgacatccccctcctcagcatcaatgtggggatcccagagcctgaggccacagtcccaaggcccatcctcctgctagcctggaggaattaggccccagggtgaggacagacttacagaaggtccgggatctgtgagggattcagccagagtgagaacagtggagaggagcagccctgttccctgcatctcccttagaggggagcagggcttcactggctctgccctttcttctccagtgccccccatggtgaatgtcatctgcagcgaggtctcagagggcaacatcaccgtgacatgcagggcttccagcttctatccccggaatatcacactgacctggcgtcaggatggggtatctttgagccacaacacccagcagtggggggatgtcctgcctgatgggaatggaacctaccagacctgggtggccaccaggattcgccaaggagaggagcagaggttcacctgctacatggaacacagcgggaatcacggcactcaccctgtgccctctggtgagcctggggtgaccctggagagggtcaggccagggtaggaacagcagggacggctgtggctctctgcccagtgtataacaagtccctttttttcagggaaggcgctggtgcttcagagtcaacggacagactttccatatgtttctgctgctatgccatgttttgttattattattattctctgtgtcccttgttgcaagaagaaaacatcagcggcagagggtccaggtgagaaaaggggacagtttctggagatgggaaagctcctttctaggcagtagggtctcctcattgctcctgcccagacaagacgtaggtgacaaggctgctgggacaggggatggaagctggggtatttgggaggggaatgggagctgcatctccatctacacccataagtgcttcccaagccagggctggggcaaggccttcgaatatccagctgtggcctcctcctgctgcaagtgaggagtgggcagcagggagggctgtggcacctgctctgtccccatcccagcctctctgtctctcgggctcactagggtgcatccaggtggggtgagttgggaatcacgtgctgattgctgagggcctggatgatcatggtgtcagagggaggaaatagtaaaggtggctgtgatctggggagggccagaaactggagaggaatccaaggagaggcgatgcccacccgtgtgcctcctccaggaggcactttccaggttcccactacctggcctccctgagtttccttgcagatgacacagatgaatagataagcagatgtccctgggccatttgaggagcggggcccagcccctcatcagggcagatgtggtccctgttttcatcctacctccagcgtgttttcttctgcagtccctgagggacacagtccccaggcgccatctctttgaggctttgttctgtgctctgtggccttaccttgccctccctgagccaatttccctttctcaaggtggtcactgcctggtaagtttggagtaagggacagtcagaagcatttcccccacagtcaggttgtttgatgggagatgaaaagagacagcagaagttttgtgtttctgcaaaaacagaggcagtgcaggggacagtgagaggctggggtgtccaggagacctgagtctggcggtaggggcgctggtttctcatccttgaacctaattgcactgtcagtcggcccctcatgcctgagcagatgggaaggttcgtcccctgccctgcagcaagagggccccgtccaggaggcacccacagcaggggcagtgcaggtctgtggtcactcctgctctcacctgcggcgtctcccgtggagggattgtcacttctggttccctgtgggcaggaatggtttcctcgtaggtcactggggttttggccaggaaaagggtatgaaattcatgtgccagtttctcaaaattcctgctttcaatgttgatgtccaataaagatgttcgtaatttcagctctataatcttaataggatttcctctaatactgctgttgtaaagcatattaaataaaacaggaactcaaatttggagccccctctccagaagggtctgtgtggagatggtggctgtggcagcggcagttcccaggtgcagagggtgggcagaggcagcctcaggctaaggggtctcccctactccacgtggagaaaagtccttgtaggttgcaagggcagtggcctgggtggaatccctgctagggacagagcaggaaggcctcgcagcctcaccaagcagcagccctggggtgaagtaagtggaccaggagtaagtggaccaggcaggagcagtagtgactcaacagcaggtcacaggcctaggtgggtgctgaaggtcatgggaggccaggcctcctcgagcaaggtggggggtcccagggtcatgtcaggtgcagatcctgtggcagccatgtctttccatgctgggcctgctgggccccccaggcttcctgatggggtccccagttaggagctgcctgctcagggctgggaggggaggagtgctgagctgcagatagagggcagggcccacagtgggcagggcctgccctggtgtgcaggtgcctctgcaggagagaagggcctggggactgagagcaagggtcagggcctctctttggggaggcctctcactgtaacaggactggtcaggcctgagaggagggcactgggttccctcttgggtcttgtccttttgtcttggggccctttcactccctgcacggtgagtggtgggcacaggacaggggctgatgttgatggagtgatgggagagaactgacgggctgggaaaagcaaggagggaggaagaaaaaagtgggggcctcatcttctctcagagaaagggtgaatctgattttggggcaactgaagagagaaaagtccttagggaataaacacaacactgcacccagtggagcatttacccgtttccctcttctccagagcttgtgagcctgcaggtcctggatcaacacccagttgggacaggagaccacagggatgcagcacagctgggatttcagcctctgatgtcagctactgggtccactggttccactgagggcacctagactctacagccaggcggccaggattcaactccctgcctggatctcaccagcactttccctctgtttcctgacctatgaaacagagaaaataacatcacttatttattgttgttggatgctgcaaagtgttagtaggtatgaggtgtttgctgctctgccacgtagagagccagcaaagggatcatgaccaactcaacattccattggaggctatatgatcaaacagcaaattgtttatcatgaatgcaggatgtgggcaaactcacgactgctcctgccaacagaaggtttgctgagggcattcactccatggtgctcattggagttatctactgggtcatctagagcctattgtttgaggaatgcagtcttacaagcctactctggacccagcagctgactccttcttccacccctcttcttgctatctcctataccaataaatacgaagggctgtggaagatcagagcccttgttcacgagaagcaagaagccccctgaccccttgttccaaatatactcttttgtctttctctttattcccacgttcgccctttgttcagtccaatacagggttgtggggcccttaacagtgccatattaattggtatcattatttctgttgtttttgtttttgtttttgtttttgtttttgagacagagtctcactctgtcacccaggctgcagttcactggtgtgatctcagctcactgcaacctctgcctcccaggttcaagcacttctcgtacctcagactcccgaatagctgggattacagacaggcaccaccacacccagctaatttttgtattttttgtagagacggggtttcgccaagttgaccagcccagtttcaaactcctgacctcaggtgatctgcctgccttggcatcccaaagtgctgggattacaagaatgagccaccgtgcctggcctattttattatattgtaatatattttattatattagccaccatgcctgtcctattttcttatgttttaatatattttaatatattacatgtgcagtaattagattatcatgggtgaactttatgagtgagtatcttggtgatgactcctcctgaccagcccaggaccagctttcttgtcaccttgaggtcccctcgccccgtcacaccgttatgcattactctgtgtctactattatgtgtgcataatttataccgtaaatgtttactctttaaataga

SEQ ID NO: 313 - DNA, 5553 bp, Homo sapiens
  source 1..5553: mol_type = genomic DNA; note = NT_167246.2:2810648-2816200 MICB [organism=Homo sapiens] [GeneID=4277] [chromosome=6]
aagttatttccaggaagaagtttcacctgtgatttcctcttccccagagccccacagtcttcgttacaacctcatggtgctgtcccaggatggatctgtgcagtcagggtttctcgctgagggacatctggatggtcagcccttcctgcgctatgacaggcagaaacgcagggcaaagccccagggacagtgggcagaagatgtcctgggagctaagacctgggacacagagaccgaggacttgacagagaatgggcaagacctcaggaggaccctgactcatatcaaggaccagaaaggaggtgagagtcggcaggggcaagagtaatgggaggccttctccaggaaagttggagacagagagcagggacctgtctcttcccgctggatctggctgggggtggggatgaggaatagggtcagggaggctcagcagggtggtgagccggaactcagcccacacagggaggcatggaggagggccagggaggggtcgccgctgggctgagttcctcacttgggtggaaaggtgatgggttcgggaatggagaagtcactgctgggtgggggcaggcttgcattccctccaggagattagggtctgtgagatccatgaagacagcagcaccaggggctcccggcatttctactacgatggggagctcttcctctcccaaaacctggagactcaagaatcgacagtgccccagtcctccagagctcagaccttggctatgaacgtcacaaatttctggaaggaagatgccatgaagaccaagacacactatcgcgctatgcaggcagactgcctgcagaaactacagcgatatctgaaatccggggtggccatcaggagaacaggtaccgaccctggccaggggctctactgttcccgcaattctgctagagttgcctcgcctcccagctctgtccggggaaaccctccctgtgctatggatgcaggcgtttcctgttggcatattgtgtcctgatttgcctctcctgttagagccattggataaagacagtgggtctgggactgaactgtccagtgttgtaatctgggaaagcagtgggccctctgacagaagcctgagcctggggtgggagttaggcaggagaggaagccctcagggccagggctgccccctctgcctcccggcctgcccatcccggagagttccctcctggccccatgacccaggagtccacccttgacatccccctcctcagcatcaatgtggggatcccagagcctgaggccacagtcccaaggcccatcctcctgctagcctggaggaattaggccccagggtgaggacagacttacagaaggtccgggatctgtgagggattcagccagagtgagaacagtggagaggagcagccctgttccctgcatctcccttagaggggagcagggcttcactggctctgccctttcttctccagtgccccccatggtgaatgtcacctgcagcgaggtctcagagggcaacatcaccgtgacatgcagggcttccagcttctatccccggaatatcacactgacctggcgtcaggatggggtatctttgagccacaacacccagcagtggggggatgtcctgcctgatgggaatggaacctaccagacctgggtggccaccaggattcgccaaggagaggagcagaggttcacctgctacatggaacacagcgggaatcacggcactcaccctgtgccctctggtgagcctggggtgaccctggagagggtcaggccagggtaggaacagcagggacggctgtggctctctgcccagtgtataacaagtccctttttttcagggaaggcgctggtgcttcagagtcaacggacagactttccatatgtttctgctgctatgccatgttttgttattattattattctctgtgtcccttgttgcaagaagaaaacatcagcggcagagggtccaggtgagaaaaggggacagtttctggagatgggaaagctcctttctaggcagtagggtctcctcattgctcctgcccagacaagacgtaggtgacaaggctgctggaacaggggatggaagctggggtatttgggaggggaatgggagctgcatctccatctacacccataagtgcttctcaagccagggctggggcaaggccttcgaatatccagctgtggcctcctcctgctgcaagtgaggagtgggcagcagggagggctgtggcacctgctctgtccccatcccagcctctctgtctctcgggctcactagggtgcgtccaggtggggtgagttgggaatcacgtgctgattgctgagggcctggatgatcatggtgtcagagggaggaaatagtaaaggtggctgtgatctggggagggccagaaactggagaggaatccaaggagaggcggtgcccacccgtgtgcctcctccaggaggcactttccaggttcccaccacctggcctccctgagtttccttgcagatgacacagatgaatagataagcagatgtccctgggccatttgaggagcggggcccagcccctcatcagggcagatgtggtccctgttttcatcctacctccagcgtgttttcttctgcagtccctgagggacacagtccccaggcgccatctctttgaggctttgttctgtgctctgtggccttaccttgccctccctgagccaatttccctttctcaaggtggtcactgcctggtaagtttggagtaagggacggtcagaagcatttcccccacagtcaggttgtttgatgggggatgaaaagagacagcagaagttttgtgtttctgcaaaaacagaggcagtgcaggggacagtgagaggctggggtgtccaggagacctgagtctggcggtaggggcgctggtttctcatccttgaacctaattgcactgtcagtcggcccctcatgcctgagcagatgggaaggttcgtcccctgccctgcagcaagagggccctgtccaggaggcacccacagcaggggcagtgcaggtctgtggtcactcctgctctcacctgcggcgtctcccgtggagggattgtcacttctggttccctgtgggcaggaatggtttcctcgtaggtcactggggttttggccaggaaaagggtatgaaattcatgtgccagtttatcaaaattcctgctttcaatgttgatgtccaataaagatgttcgtaatttcagctctataatcttaataggatttcctctaatactgctgttgtaaagcatattaaataaaacaggaactcaaatttggagccccctctccagaagggtctgtgtggagatggtggctgtggcagcggcagttcccaggtgcagagggtgggcagaggcagcctcaggctaaggggtctcccctactccacgtggagaaaagtccttgtaggttgcaagggcagtggcctgggtggaatccctgctagggacagagcaggaaggcctcgcagcctcaccaagcagcagctctggggtgaagtaagtggaccaggagtaagtggaccaggcaggagcagtagtgactcaacagcaggtcacaggcctaggtgggtgctgaaggtcatgggaggccaggcctcctcgagcaaggtggggggtcccagggtcatgtcaggtgcagatcctgtggcagccatgtctttccatgctgggcctgctgggccccccaggcttcctgatggggtccccagttaggagctgcctgctcagggctgggaggggaggagtgctgagctgcagatagagggcagggcccacagtgggcagggcctgccctggtgtgcaggtgcctctgcaggagaggagggcctggggactgagagcaagggtcagggcctctctttggggaggcctctcactgtaacaggactggtcaggcctgagaggagggcactgggttccctcttgggtcttgtccttttgtcttggggccctttcactccctgcacggtgagtggtgggcacaggacaggggctgatgttgatggagtgatgggagagaactgacaggggctgggaaaagcaaggagggaggaagaaaaaagtgggggcctcatcttctctcagagaaagggtgaatctgattttggggcaactgaagagagaaaagtccttagggaataaacacaacactgcacccagtggagcatttacccgtttccctcttctccagagcttgtgagcctgcaggtcctggatcaacacccagttgggacaggagaccacagggatgcagcacagctgggatttcagcctctgatgtcagctactgggtccactggttccactgagggcgcctagactctacagccaggcggccaggattcaactccctgcctggatctcaccagcactttccctctgtttcctgacctatgaaacagaaaataacatcacttatttattgttgttggatgctgcaaagtgttagtaggtatgaggtgtttgctgctctgccacgtagagagccagcaaagggatcatgaccaactcaacattccattggaggctatatgatcaaacagcaaattgtttatcatgaatgcaggatgtgggcaaactcacgactgctcctgccaacagaaggtttgctgagggcattcactccatggtgctcattggagttatctactgggtcatctagagcctattgtttgaggaatgcagtcttacaagcctactctggacccagcagctgactccttcttccacccctcttcttgctatctcctataccaataaatacgaagggctgtggaagatcagagcccttgttcacgagaagcaagaagccccctgaccccttgttccaaatatactcttttgtctttctctttattcccacgttcgccctttgttcagtccaatacagggttgtggggcccttaacagtgccatattaattggtatcattatttctgttgtttttgtttttgtttttgtttttgtttttgagacagagtctcactctgtcacccaggctgcagttcactggtgtgatctcagctcactgcaacctctgcctcccaggttcaagcacttctcgtacctcagactcccgaatagctgggattacagacaggcaccaccacacccagctaatttttgtattttttgtagagacggggtttcgccaagttgaccagcccagtttcaaactcctgacctcaggtgatctgcctgccttggcatcccaaagtgctgggattacaagaatgagccaccgtgcctggcctattttattatattgtaatatattttattatattagccaccatgcctgtcctattttcttatgttttaatatattttaatatattacatgtgcagtaattagattatcatgggtgaactttatgagtgagtatcttggtgatgactcctcctgaccagcccaggaccagctttcttgtcaccttgaggtcccctcgccccgtcacaccgttatgcattactctgtgtctactattatgtgtgcataatttataccgtaaatgtttactctttaaataga

SEQ ID NO: 314 - DNA, 16199 bp, Homo sapiens
  source 1..16199: mol_type = genomic DNA; note = NT_167247.2:2836873-2853071 MICB [organism=Homo sapiens] [GeneID=4277] [chromosome=6]
cttttccggaccctgcagtggcgcctaaagtctgcgaggaggaagtcgcctctgtgctcgtgagtccagggatctaaggcaagtgctgagggagaaaacatagttgatggggcagagcagagggggctggaggtggggtggagggggagggctttgaacagaagacctgggaggcttggtgggggaggggacccaggcctcggcgctgagaagcaactcccctggagctcaagaccttcttggcctcccctagcccaggggaggactggcttcatgtctccctgaaaccgcttctaaatgccttagaacaaaccttaaatattcattattattattgaactattaaaagtcttttttggaggcgagctgaatgagaccctttgctggagctggcacacggaggaagtcctggagggagggtagacaccgtggagggaagggcttgggacctgtgtcaggagagctgggtccatctccctctctgtctcaaactatgcttatgatctttagcagtgaaaataatctctctaaggtggggacaggaccccagtccctgctgtgcttaataaattatgaggatcaaaataaattatcagtgaatgtgtatgggaagactaagaaattgttaaagttctcgaatacattacattttcatccacagaaaagtgtaggctagggatgataggggaatagttagtaatgacagggatagttgaacttaaaaaaaaaggttgtgaggccaacaaaaaagaaatggacacagttcctgatcctggagggttcatagtctaatgggagaggagggtagaagatggtaggtgatggctgggtgtgtggcactcgcctcgcctgtagtcccagctactcaagaggctgtggtgggaggactgcttgagcccaggcatttgaggctgcagtgagctataatcacgccactgcattccaactgagtgacacagcaagactcctctcttaaaaaaataaaataaaataaatgaaaaaaataagattcaagacagggcacagtcggtaccatcaggaaggttcaaaccatgggctagatcagtagttctaaaacttgactacacatcggaatcacgcagggaactttaaaagatactaaggtttaggtccaacctaggtttactgatttaactggttgtggctgtggcctgggaacatggatattaaaaactctccaggtggttctacgcagtggctaggtttgaagaccactgcctagatgtcccaatgactaagaatgtgcgctggggacaagccaattctcttagtagaggctttccagacagaattcttattattgagaattgagaattcatatgccacacataatttatcgttttaaagtgtacagatcagtggcttctagcataatcacaaggttgtgccaccgtcaccactatctacttgggaagattttcttcctttttttctttttttttttttttgaggcggagccttgctctgttgcccaggctggagtgcagtggcgcaatctcagctcactgcaagctccgcctcccgggttgaccccattctcctgcctcagccttctgagcagctgggactacaggtacccgccaccacgcccagctaagttttttgtatttttagtagagacggggtttcactgtgttagcaggatgctctccatctcctgacctcgtgatctgcccacctcgacctcccaaagtgctgggattacaggcgtgagccaccgtgcccggaccctttttccttttttttttttttaaaggctagtcaagtgaaacagtgggagtgaagatgaaacaaaaacatctataactggttgtgatcaattagttgtaaacaccactgcactcagaccagcctaattgggaagattttgaggatatgctgtggtctgatgggttccaaggcagaggtgacagtaacctggaagagggagactgcttaggcagtggcatcctggtgggatagggtgaggagatcccagagcccacgtttactgcaaccctggggaaatgtcaccagagaaatgggggtggtgccagacaatagattgtgggagctatggtttccatggtagagtagaagcatctaccatgtgtgacattcagcagatggggcgctgtgggtggcttggagcactctggttgtaactgaggcaggcacagtgtttaggaagcctgtgcagtaatccagactgaagggaggggaaagcctagactaagactatggctgtgggattgaaatagcgttgaaggagctgactttgactcccggagatgaaggggaaagaggaaatcagaagggaccaaggatggtgaagttcttaagagaaactgaggaggaagagaggatgatgtggtgggagacgtgtagagagtccttgtagatctgtcacattgaaggggactatggtcccagaggtacagatgtcctaaaacaggctggaaaagggagtctggagagagcttggtgttgtaatgaaccatggggagccgcctcgttggccctgtgattacccaggaactgaatagagagggggccctgggagacctcagacacttagaggatataagggggtgaaaggggggacctggctttgagtcgaagggaggagaaggagattatatagctgaaacgtctaagagaatttgtgatctgagcgtttctactggggcaagtgcttctgaaaggcagaggcggctgagatctggaaacaggtctgcaaatctggtcactggtctcattgcagtaacgctgtgcgcggttgagggagtgtattggcagaaaaaccacgcgttgtctgtcccggaaggaacaagccagtgagagccggcctgatgggaggaccgccgaaaggggcttggtgaagcccgcgctccttgggggtgggaatgcggggatggggtggtcgcgatgcagggagggcgacagggtccaggtcgtgctcataagtttggagctgtactctcagctactcggggctggtccttgattttggctgcgctcgcgcacgctcccccttttctggccgccaggtcccgccttctaaatttccccaggtctccaggccgctagaattttctcttctgaacgtggccccgccctctccactcatgattggccaagttccgggcctcagttttcactggataagcggtcgctgagcggggcgcaggtgactaaatttcgacggggtcttctcaccggtttcattcagttggccactgctgagcagctgagaaggtggcgacgtaggggccatggggctgggccgggtcctgctgtttctggccgtcgccttcccttttgcacccccggcagccgccgctggtgagtggggttcctggcggtccccggcggagcgggagcggcggggcgtttccgggggtccgggtgggttgccgcgagcgctgtgcggtcagggcggggctcaggtgtgctgtctggagtgcagggagctggacgccgcctgttcccgccacacctcagccctgctttcccatctcccgtctcttttttttttttttttttttttctttctgagacggagtctctgtcgcctaggctgtagtgcagtggcgcgatattggctcactgcaagctccgcctcccgggttcacgccattctcctgcctcagcctccctagtagctgggactacaggcgcccgccaccacgcccggctaattttttgtgtttttagtagagatggggtttcaccgtgttagtcaggatggtctcgatctcctgacctcgtgatccgcccgcctcggcctcccaaagtgctgggattacaggcgtgagccaccgcgcccgacctcccgtctcctttcagtcctcctcgggatcgcgcatcacccgcattttctggtctcctcctgcacttgctctcctcgcctctcctccgtctcctctcacttttcggacaaaccagtccttctgaggcccctgggttcccgggctgctcctgtgaatggcattggaaggccgttccagcgcggccgctgaggcagccacttcccccggtgctgggggcggatctcaggtccctgaagtcctgtcctctcccggagccgatgtgttctcagctcctgggccgcagctcctggagttggggccctcctttcttgggacccggaggtggtgcttcttgctactgtgaggactgtggggggtcctgactctcaagctgaggggttggagtctgcaggctccgggcagaggattcttcctgcgacttctgtcatccccagctcattctcccctcgcctccggctccgggggtcctctcctctctcgcatcccacccctactaatgaccaatgatctaaggacaccagattccctctcacctcctccctgcccatcttacggcgccctgggtccttttgctctcccagctccctgctaccccttcctgtgtgctgttctctgatccatttctagagtgtcctctgccttcatcccccgcccccgccactgaaggtccctcctgcctcctttatgggcctttcctgcaagcagccttcactccgtgctgcccctatgcctccccattcccaaatgtccctgactctaactttctggtgctgccttttgtccgggggggtcttccctccatcccactcccctccagacccctaaggagagccctgatgctaatggcagttgggccttaggcagggcgcagggcagcgcagatgccccctcccctccagtgcaggtgcctgctctgggccctgcctcattgtggccccttccccactccttcatcctcagcctcaccctcttgaggaccccaccctccagcccacaggtgctggaccatccctccctggtccctccgcccctctccaccttgggaccttgtgctgctcctatctcttgcccagctgcctggggccctcagcaagttctcatctttcagtgggaaagtgggagtgctggagcatatgacagtgctgagaatctttcccaagccccaccctcccccagagcaccctcccctcctgtcctcaccctaccccaagttctcccacagtcactcctgccccatgctcatgccgccctccagttcttgctctgcccatctcccctccccaacccagacctaaaacaggctgttgggccagctgttccttgaccttccttcttttcttttggttccttgaccccagtgggctctcactccccacaccgcatatctaaaatctgttttgcctgctcttggggtgccactgctccccctccagcattactccttttggcaggtccttcctcaggctgagaatctccccctctaccttggttttctctctctggccagcacccccactccttgctttgtttttaatttttaacttttgtttgggtacgtagtagatatgtatgtatatatttatggggtacatgggatattttgacacaggcctacaatatgtcataatcacatcagggtaaatgggttatctatcacaacaagcatttatcctttctttgtgctacaaacaatcccattatgctctttcagttatttttaaatgtacaataaattattgttggctgtactcaccctgctgtgctatctactagatcttattcattctaactatatttttgtacccattaaccatccgcactcccccactccccactacccttctcagcctctggtaatcgtcattctattgtctctccccatgaggtccattgttttaatttttggctgccacaaataagtgagaacatgcgaagtttgtctctctgggcctggggcttatttcacttcacatgatgacctccagttctttgcaaatgacatggtggctgaatagtactccacatacacgtgtgcaccacattttctttctccattcgtctgttgatggacacttaggtcgcttgcagatcttggctattttgaatagtgctgcaataaacatggaaaagtagatagctctttaatataccgatttcctttcttttgggtatatgcctaacagtgggagtgctggagcatatgacagctctattatatttttagtttttggaagaacctccacattatttcccacagtggttatactagtttacgttcccaccaacagtgtacaagggttctcttttgctacatcctcgccaggattccttattgcctgtcttctggataaaagccagtttatctggggtgggatgatatctcgtaggagttttgatttgccttcatctgatgacgaatgatgttgagcaccttttgatatacctgtttgccatttgtatgtcttcttttgagaaatgactattcagatcttttgctcatttttaagttggattattagatatttttcctatagagttgtttgagatccttatatgttttggttactaatcctttgtcagatgaatagtttgaaaatattttctcccattcttggatggtctcttcactttgtttattgtttcctttgctgtgcagaagctttttaacttgatatgatcccatttatgcatttttactttggttgcctgtgcttgtggggtattacttaaaaaatctttgccagtccaatatcttagagagtttccccaatgttttcttttatagttttcatagtttgaggtcatagatttacatctttaatcctttttgattggatttttatatgtggtgagagatagggtccagtttcattcttctgcataaggatatctagtttccccagcaccatttattgaagagactctcctttgccctgtatgtgttcttggtaactttgttagaaataacttcactgtagatatatggatttgtttctgggttctctattctgtttcattggtccgtgtgtctgtttttatgccactaccgtgctgttttgattactctagctctgtagtataatttgaagtcagataatgtgattcctctagttttgttctttttgttcagggtagctttatctattctgggttttttgtgattccatatacattttaggattgtttttctatttctgtgaagaatgtcattggtgttttgatagcaattgcattgaatttgtagattgctttgggtaggatggatattttaacaaaattgattcttccggctgggcacggtggctcactcctgtaatcccagcactttgggaggccgagtcaggtggatcacttgagatcaggagttcaagaccagcctgatcaacatggagaaaccccgcctctactaaaaatacaaaattagccaggcgtggtggcatatgcctgtaatcccagctactcaggaaagctgaggcaggagaatcgcttgaacccaggaggcagaggttgtggtgagctgagattgcaccattgcactccagcctgggcaacaggagcaaaactccatctcagaaaataaaaataaacattgattcttccagtccatgaacatggaatgccttttccattttttgtgtcctcttcaatgttttgcatcagtgctttatagtttttattggagagatctttcacttcttcagttaagtctattcctaggtattttattttatttgtagctaatgaaaatgggattcgtttcttgatttctttttcagattatttgctgttagcacatagaaatgctattgatttttgcatgttgattttgtatcctgcaactttactgaatttgttcttcagttctaatagttttttggtggagtctttaggttttccaaatatcagaccacatgatgtgcaaacaaggataatttgacttcttcttttccaattttgatgccctttatttccttctcctgtcagattgctctagctaggacttgcagtattgtgttgcataactgtagtgaaagtagtcatccttgtcttgttccagatcttaaagaaaaggctttcagttttcccccattcagtatgttactagctgtgagttgtcatatatggcttttattatattgaggtctgttccttgtatactcagtttttttagagtttttatcatgaagggatgttaaacttatcaaatgctttttcagtatcaattgaaatggtgatatggcttttgtcctttattctgttgatacgatgtattacattgattgatttgtgtatgcatacctggaatacattccacttggtcatgaagaatgatctttttaatatactgttgaatgtggtttgctagtatttcattgatgatatttgcctcaatgttcatcagggatataggcctgtagttttctttttttgatgtgtctttgcctgattttgatatcaggatattcctggctttgtaaaatgagtttggaagtattccctcctcctctgtttttcagaacaatttgaataggactgatatttcttgttctttaaacgtttaattgtggtaaattatacattacataaattttactgttttaaccgcttttaagtgtatactcggtggcattagatacattcacatttttgtgcaacccaaaactctgtacccattaatcggtaactccccattcctccctacctctggcccctggtaaccatcattctactttttgtttctatgaatttgaccactctaggtacctcatttaagtagaatcgtgtaatgtttgtctttttgattctggcttatttcacttataatatttcgaggttcatccaggttgtagtatgggtcagattttcattccttttaatgatgaataatactcattatatgtatgtaccacaccttggttatccattcctcagacaatggacacttgggttacttctaccttttggatattggcaaatatttcatttctcttgggtatatatttatttcttttgagtatttcttttgggtatatatccagaaatagaattgttggatcatacggtatttcattttttaatttttagaggaatcaccatagtgttttccattgcaggcgtgccattttgtatttctagaagcagtatacaggggcttcagtttctctacctccttgccaaacttgctgtttgtgtgtgtgtgtgtgtgtgtgtgtgtgtgtgtgtgtgtgtgataatagccaccctgattggtttgaagtggtatctcattgtggtttggatttgcattttcctaatgagtactgatattgagcatcttttcatgtgtttattgatcatttgtatattttctttgaagaattggccattgaagtcttgcccatttttctcccccacatagcttctcatggctattttgcccatttttgagtgggttgactgttttgttgtttttgtcaaacttttttgcatattctggaaactaatctctctctttttcttttttttttttttttttttttttgagatggagtcttgctctgttgcccaggctggagtgcagtggcacgatctcagctcactgcaagctccacccgctagcttcatgccattctcccacctcagcctccctagtagctgggactacaggcgcccgccaccacacccggctaattttttgtatttttagtagagatagggtttcaccatgttagccaggatggtctcaatctcctgacctggtgatacacccgcctcggcctcccaaagtgctggaattacaggcttgagccaccacgcctggccttctggaagctaatctcttatcagatatatgacttgcaatatttatttcatttcaggggttgattgctttctcactctgattgtgccctttgatgcacagatattttgaatttttcatgagtccagtttgtcagttctttctattctatctgtgctttggcgtcatatccatgaaagcactgtcaaaccctatgtcatgaacattatacccaatgtttttttctaagatatttttatgttttagttcttgagtttagagtttaggtctttgattcattttgagttaatttttgtatatagtacaaattaagggtccaattttatattatttgaacatccagttcccccagcactatttgctgaaaagatggacttactctttgataccctgtcacctgcccaccccagtggacactagctggtccatccaattgctgtcctggggccttgtcatgccactcttccactttgaacccaagcccacatcattgctcccctctgggatactgaccccactataaacttctctagggctacaaccttcctaccccttgtgcctcatgaccaccccctcccttgtccccaccatgcccatgatgagtcttttctcaaggcagctcgccttgcctccatctcaccctcacctgtgcaccacagccacactggacatgggtccctctgagcctgagtcccttcccattcccactgtcccctctggcaagaccttccttccaacactgccttcatgctcctcccttgcccctgcagggcagcctctccccttggcccctattcccttagggggcttgtggccacccagtcctggcacctgacctacaagtttgccatcttcattcccccttcttctgttcatcagccccctcctctatcctcccaccctcacagttttccttgtatatgaaatcttcgttcttgtccttttgcccatgtgcatttcctgcctcctcagggaggtcgggacagcagacctgtgtgttaaacatcaatgtgaagttatttccaggaagaagtttcacctgtgatttcctcttccccagagccccacagtcttcgttacaacctcatggtgctgtcccaggatggatctgtgcagtcagggtttctcgctgagggacatctggatggtcagcccttcctgcgctatgacaggcagaaacgcagggcaaagccccagggacagtgggcagaagatgtcctgggagctgagacctgggacacagagaccgaggacttgacagagaatgggcaagacctcaggaggaccctgactcatatcaaggaccagaaaggaggtgagagtcggcaggggcaagagtaatgggaggccttctccaggaaagttggagacagagagcagggacctgtctcttcccgctggatctggctgggggtggggatgaggaatagggtcagggaggctcagcagggtggtgagccggaactcagcccacacagggaggcatggaggagggccagggaggggtcgccgctgggctgagttcctcacttgggtggaaaggtgatgggttcgggaatggagaagtcactgctgggtgggggcaggcttgcattccctccaggagattagggtctgtgagatccatgaagacagcagcaccaggggctcccggcatttctactacaatggggagctcttcctctcccaaaacctggagactcaagaatcgacagtgccccagtcctccagagctcagaccttggctatgaacgtcacaaatttctggaaggaagatgccatgaagaccaagacacactatcgcgctatgcaggcagactgcctgcagaaactacagcgatatctgaaatccggggtggccatcaggagaacaggtaccgaccctggccaggggctctactgttcccgcaattctgctagagttgcctcgcctcccagctctgtccagggaaaccctccctgtgctatggatgcaggcgtttcctgttggcatattgtgtcctgatttgcctctcctgttagagccattggataaagacagtgggtctgggactgaactgtccagtgttgtaatctgggaaagcagtgggccctctgacagaagcctgagcctggggtgggagttaggcaggagaggaagccctcagggccagggctgccccctctgcctcccggcctgcccatcccggagagttccctcctggccccatgacccaggagtccacccttgacatccccctcctcagcatcaatgtggggatcccagagcctgaggccacagtcccaaggcccatcctcctgctagcctggaggaattaggccccagggtgaggacagacttacagaaggtctgggatctgtgagggattcagccagagtgagaacagtggagaggagcagccctgttccctgcatctcccttagaggggagcagggcttcactggctctgccctttcttctccagtgccccccatggtgaatgtcacctgcagcgaggtctcagagggcaacatcaccgtgacatgcagggcttccagcttctatccccggaatatcacactgacctggcgtcaggatggggtatctttgagccacaacacccagcagtggggggatgtcctgcctgatgggaatggaacctaccagacctgggtggccaccaggattcgccaaggagaggagcagaggttcacctgctacatggaacacagcgggaatcacggcactcaccctgtgccctctggtgagcctggggtgaccctggagagggtcaggccagggtaggaacagcagggacggctgtggctctctgcccagtgtataacaagtccctttttttcagggaaggcgctggtgcttcagagtcaacggacagactttccatatgtttctgctgctatgccatgttttgttattattattattctctgtgtcccttgttgcaagaagaaaacatcagcggcagagggtccaggtgagaaaaggggacagtttctggagatgggaaagctcctttctaggcagtagggtctcctcattgctcctgcccagacaagacgtaggtgacaaggctgctggaacaggggatggaagctggggtatttgggaggggaatgggagctgcatctccatctacacccataagtgcttctcaagccagggctggggcaaggccttcgaatatccagctgtggcctcctcctgctgcaagtgaggagtgggcagcagggagggctgtggcacctgctctgtccccatcccagcctctctgtctctcgggctcactagggtgcgtccaggtggggtgagttgggaatcacgtgctgattgctgagggcctggatgatcatggtgtcagagggaggaaatagtaaaggtggctgtgatctggggagggccagaaactggagaggaatccaaggagaggcggtgcccacccgtgtgcctcctccaggaggcactttccaggttcccaccacctggcctccctgagtttccttgcagatgacacagatgaatagataagcagatgtccctgggccatttgaggagcggggcccagcccctcatcagggcagttgtggtccctgttttcatcctacctccagcgtgttttcttctgcagtccctgagggacacagtccccaggcgccatctctttgaggctttgttctgtgctctgtggccttaccttgccctccctgagccaatttccctttctcaaggtggtcactgcctggtaagtttggagtaagggacggtcagaagcatttcccccacagtcaggttgtttgatgggggatgaaaagagacagcagaagttttgtgtttctgcaaaaacagaggcagtgcaggggacagtgagaggctggggtgtccaggagacctgagtctggcggtaggggcgctggtttctcatccttgaacctaattgcactgtcagtcggcccctcatgcctgagcagatgggaaggttcgtcccctgccctgcagcaagagggccctgtccaggaggcacccacagcaggggcagtgcaggtctgtggtcactcctgctctcacctgcggcgtctcccgtggagggattgtcacttctggttccctgtgggcaggaatggtttcctcgtaggtcactggggttttggccaggaaaagggtatgaaattcatgtgccagtttatcaaaattcctgctttcaatgttgatgtccaataaagatgttcgtaatttcagctctataatcttaataggatttcctctaatactgctgttgtaaagcatattaaataaaacaggaactcaaatttggagccccctctccagaagggtctgtgtggagatggtggctgtggcagcggcagttcccaggtgcagagggtgggcagaggcagcctcaggctaaggggtctcccctactccacgtggagaaaagtccttgtaggttgcaagggcagtggcctgggtggaatccctgctagggacagagcaggaaggcctcgcagcctcaccaagcagcagccctggggtgaagtaagtggaccaggagtaagtggaccaggcaggagcagtagtgactcaacagcaggtcacaggcctaggtgggtgctgaaggtcatgggaggccaggcctcctcgagcaaggtggggggtcccagggtcatgtcaggtgcagatcctgtggcagccatgtctttccatgctgggcctgctgggccccccaggcttcctgatggggtccccagttaggagctgcctgctcagggctgggaggggaggagtgctgagctgcagatagagggcagggcccacagtgggcagggcctgccctggtgtgcaggtgcctctgcaggagaggagggcctggggactgagagcaagggtcagggcctctctttggggaggcctctcactgtaacaggactggtcaggcctgagaggagggcactgggttccctcttgggtcttgtccttttgtcttggggccctttcactccctgcacggtgagtggtgggcacaggacaggggctgatgttgatggagtgatgggagagaactgacaggggctgggaaaagcaaggagggaggaagaaaaaagtgggggcctcatcttctctcagagaaagggtgaatctgattttggggcaactgaagagagaaaagtccttagggaataaacacaacactgcacccagtggagcatttacccgtttccctcttctccagagcttgtgagcctgcaggtcctggatcaacacccagttgggacaggagaccacagggatgcagcacagctgggatttcagcctctgatgtcagctactgggtccactggttccactgagggcgcctagactctacagccaggcggccaggattcaactccctgcctggatctcaccagcactttccctctgtttcctgacctatgaaacagaaaataacatcacttatttattgttgttggatgctgcaaagtgttagtaggtatgaggtgtttgctgctctgccacgtagagagccagcaaagggatcatgaccaactcaacattccattggaggctatatgatcaaacagcaaattgtttatcatgaatgcaggatgtgggcaaactcacgactgctcctgccaacagaaggtttgctgagggcattcactccatggtgctcattggagttatctactgggtcatctagagcctattgtttgaggaatgcagtcttacaagcctactctggacccagcagctgactccttcttccacccctcttcttgctatctcctataccaataaatacgaagggctgtggaagatcagagcccttgttcacgagaagcaagaagccccctgaccccttgttccaaatatactcttttgtctttctctttattcccacgttcgccctttgttcagtccaatacagggttgtggggcccttaacagtgccatattaattggtatcattatttctgttgtttttgtttttgtttttgtttttgtttttgagacagagtctcactctgtcacccaggctgcagttcactggtgtgatctcagctcactgcaacctctgcctcccaggttcaagcacttctcgtacctcagactcccgaatagctgggattacagacaggcaccaccacacccagctaatttttgtattttttgtagagacggggtttcgccaagttgaccagcccagtttcaaactcctgacctcaggtgatctgcctgccttggcatcccaaagtgctgggattacaagaatgagccaccgtgcctggcctattttattatattgtaatatattttattatattagccaccatgcctgtcctattttcttatgttttaatatattttaatatattacatgtgcagtaattagattatcatgggtgaactttatgagtgagtatcttggtgatgactcctcctgaccagcccaggaccagctttcttgtcaccttgaggtcccctcgccccgtcacaccgttatgcattactctgtgtctactattatgtgtgcataatttataccgtaaatgtttactctttaaataga

SEQ ID NO: 315 - DNA, 16197 bp, Homo sapiens
  source 1..16197: mol_type = genomic DNA; note = NT_167248.2:2750806-2767002 MICB [organism=Homo sapiens] [GeneID=4277] [chromosome=6]
cttttccggaccctgcagtggcgcctaaagtctgcgaggaggaagtcctgcgaggacttagtccctgagtccagggatctaaggcaagtgctgagggagaaaacatagttgatggggcagagcagagggggctggaggtggggtggagggggagagctttgaacagaagacctgggaggcttggtgggggaggggacccaggcctcggcgctgagaagcaactcccctggagctcaagaccatcttggcctcccctagcccaggggaggactggcttcatgtctccctgaaaccgcttctaaatgccttagaacaaaccttaaatattcattattattattgaactattaaaagtcttttttggaggcgagctgaatgagaccctttgctggagctggcacacggaggaagtcctggagggagggtagtcaccgtggaaggaagggcttgggacctgtgtcaggagagctgggtccatctccctctctgtctcaaactatgcttatgatctttagcagcgaaaataatctctctaaggtggggacaggaccccagtccctgctgtgcttaataaattatgaggatcaaaataaattatcagtgaatgtgtatgggaagactaagaaattgttaaaattctcgagtacattacattttcatccacagaaaagtgtaggctagggatgataggggaatagttagtaatgacagggttagttgaacttaaaaaaaaaggttgtgaggccaacaaaaaagaaatggacacagttcctgatcctggagggttcatagtctaatgggggaggagggtagaagatggtaggtgatggctgggtgtgtggcactcgcctgtagtcccagctactcaagaggctgtggtgggaggattgcttgagcccagacatttgaggctgcagtgagctataatcacgccactgcattccaactgagtgacacagcaagactcctctcttaaaaaaataaaataaaataaatgaaaaaaaataagattcaagacagggcacagtcggtaccatcaggaaggttcaaaccatgggctagatcagtagttctaaaacttgactacacatcggaatcacgtagggaactttaaaagatactaaggtttaggtccaacctaggtttactgatttaactggttgtggctgtggcctgggaacatggatattaaaaactctccaggtggttctacgcagtggctaggtttgaagaccaccgcctagatgtcccaatgactaagaatgtgcgctggggacaagccaattctcttagtagaaagaggctttccagacagaattcttattattgagaattgagaattcatatgccacacataatttatcgctttaaagtgtacagatcagtggcttctagcataatcacaaggttgtgccaccgtcaccactatctacttgggaagattttcttcctttttttcttttttttttttttttttttgaggcggagccttgctctgttgcccaggctggagtgcagtggcgcaatctcagctcactgcaagctctgcctcccgggttgaccccattctcctgcctcagccttctgagcagctgggactacaggtgcccgccaccacgcccagctaagttttttgtaatttcagtagagacggggtttcactgtgttagcaggatgctctcgatctcctgacctcgtgatctgcccacctcgacctcccaaagtgctgggattacaggcgtgagccaccgtgcccggaccctttttcctttttttttttttttaaaggctagtcaagtgaaacagtgggagtgaagatgaaacaaaaacatctataactggttgtgatcaattagttgtaaacaccactgcactcagaccagcctaattgggaagattttgaggatatgctgtggtctgatgggttccaaggcagaggtgacagtaacctggaagagggagactgcttaggcagtggcatcctggtgggatagggtgaggagatcccagagcccacgtttactgcaaccctggggaaatgtcaccagagaaatggaggtggtgccagacaatagattgtgggagctatggtttccatggtagagtagaagcatccaccatctgtgacattcagcagatggggcgctgtgggtggcttggagcactctggttgtaactgaggcaggcacagtgtttaggaagcctgtgcagtaatccaggctgaagggaggggaacgcctagactaacattgtggctgtgggattgaaatagtgttgaaggagctgactttgactcccggagatgaaggggaaagaggaaatcagaagggaccaaggatggtgaagttcttaagagaaactgaggaggaagagaggatgatgtggtgggagacgtgtagagagtccttgtagatctgtcacattgaaggggactatggtcccagaggtacagatgtcctaaaacaggctggaaaagggagtctggagagagcttggtgttgtaatgaaccatggggagccgcctcgttggccctgtgattacccaggaactgaatagagagggggccctgggagacctcagacacttagaggatataagggggtgaaaggggggacctggctttgagtcgaagggaggagaaggagattatatagctgaaacgtctaagagaatttgtgatctgagcgtttctactggggcaagtgcttctgaaaggcagaggcggctgagatctggaaacaggtctgcaaatctggtcactggtctcattgcagtaacgctgtgcgcggttgagggagtgtattgggagaaaaaccacgcgttgtctgtcccggaaggaacaagccagtgagagccggcctgatgggaggaccggcgaaaggggcttggtgaagcccgcgctccttgggggtgggaatgcggggatggggtggtcgcgatgcagggagggcgacagggtccaggtcgtgctcataaggttggagctgtactctcagctactcggggctggtccttgattttggctgcgctcgcgcacgctccaccttttctggccgccaggtcccgccttctaaatttccccaggtctccaggccgctagaattttctcttctgaacgtggccccgccctctccattcatgattggccctaagttccgggcctcagttttcactggataagcggtcgctgagcggggcgcaggtgactaaatttcgacggggtcttctcaccggtttcattcagttggccactgctgagcagctgagaaggtggcgacgtaggggccatggggctgggccgggtcctgctgtttctggccgtcgccttcccttttgcacccccggcagccgccgctggtgagtggggttcctggcggtccccggcggagcgggagcggcggggcgtttccgggggtccgggtgggttgccgcgagcgctgtgcggtcagggcggggctcaggtgtgctgtctggagtgcagggagctggacgccgcctgttcccgccacacctcagccctgctttcccatctcccgtctctttttttttttttttttttttttttctttctgagacggagtctctgttgcccaggctggagtgcagtggcgcgatcttggctcactgcaagctccgcctcccgggttcacgccattctcctgcctcagcctccctagtagctgggactacaggcgcccgccaccacgcccggctaattttttgtgtttttagtagagatggggtttcaccgtgttagtcaggatggtctcgatctcctgacctcgtgatccgcccgcctcggcctcccaaagtgctgggattacagaggtgagccaccgcgcccgacctcccgtctcctttcagtcctcctcgggatcgcgcatcacccgcattttctggtctcctcctgcacttgctctcctcgcctctcctccgtctcctctcacttttcggacaaaccagtccttctgaggcccctgggttcccgggctgctcctgtgaatggcattggaaggccgttccagcgcggccgctgaggcagccacttcccccggtgctgggggcggatctcagctccctgaagtcctgtcctctcccggagccgatgtgttctcagctcctgggccgcagctcctggagttggggccctcctttcttgggacccggaggtggtgcttcttgctgctgtggggactgtggggggtcctgactctcaagctgaggggttggagtctgcaggctccgggcagaggattcttcctgcgacttctgtcatccccagctcattctcccctcgcctccggctccgggggtcctctcctctctcgcatcccacccctactaatgaccaatgatctaaggacaccagattccctctcacctcctccctgcccatcttacggcgccctgggtcctgttgttctcccagctccctgctaccccttcctgtgtgctgttctctgatccatttctagggtgtcctctgccttcatcccccgcccccgccactgaaggtccctcctgcctcctttatgggcctttcctgcaagcagccttcactccgtgctgcccctatgcctccccattcccaaatgtccctgactctaactttctggtgctgccttttgtccggggggggtcttccctccatcccactcccctccagacccccaaggagagccctgatgctaatggcagttgggccttaggcagggcgcagggcagcgcagatgccccctcccctccagtgcaggtgcctgctctgggccctgcctcattgtggccccttccccactccttcatcctcagcctcaccctcttgaggaccccaccctccagcccacagatgctggaccatccctccctggtccctccgcccctctccaccttgggaccttgtgctgctcctgtctcttgcccagctgcctggggccctcagcaagttctcatctttcagtgggaaagtgggagtgctggagcatatgacagtgctgagaatctttcccaagccccaccctcccccagagcaccctcccctcctgtcctcaccctaccccaagttctcccacagtcactcctgccccatgctcatgccgccctccagttcttgctctgcccatctcccctccccaacccagacctaaaacaggctgttgggccagctgttccttgaccttccttcttttcttttggttccttgaccccagtgggctctcactccccacaccgcatatctaaaatctgttttgcctgctcttggggtgccactgctccccctccagcattactccttttggcaggtccttcctcaggctgagaatctccccctccaccttggttttctctctctggccagcacccccaccccttgctttgtttttaatttttaacttttgtgtgggtacgtagtagatatgtatgtatatatttatggggtacatgggatattttgacacaggcctacaatatgtcataatcacatcagggtaaatgggttatctatcacaacaagcatttatcctttctttgtgctacaaacaatcccattatgctctttcagttatttttaaatgtacaataaattattgttggctgtactcaccctgctgtgctatctactagatcttattcattctaactatatttttgtacccattaaccatccgcactcccccactccccactacccttctcagcctctggtaatcgtcattctattgtctctccccatgaggtccattgttttaatttttggctgccacaaataagtgagaacatgcaaagtttgtctgtctgggcctggggcttatttcacttcacatgatgacctccagttctttgcaaatgacatggtggctgaatagtactccacatacacgtgtgcaccacattttctttctccattcgtctgttgatggacacttaggtcgcttgcagatcttggctattttgaatagtgctgcaataaacatggaaaagtagatagctctttaatataccgatttcctttcttttgggtatatgcctaacagtgggagtgctggagcatatgacagctctgttatatttttagtttttggaagaacctccacattatttcccacagtggttatactagtttacgttcccaccaacagtgtacaagggttctcttttgctacatcctcgccaggattccttattgcctgtcttctggataaaagccagtttatctggggtgggatgatatctcgtaggagttttgatttgccttcatctgatgacgaatgatgttgagcaccttttgatatacctgtttgccatttgtatgtcttcttttgagaaatgactattcagatcttttgctcatttttaagttggattattagatatttttcctatagagttgtttgagatccttatatgttttggttactaatcctttgtcagatgaatagtttgaaaatattttctcccattcttggatggtctcttcactttgtttattgtttcctttgctgtgcagaagctttttaacttgatatgatcccatttatgcatttttactttggttgcctgtgcttgtggggtattacttaaaaaatctttgccagtccaatatcttagagagtttccccaatgttttcttttatagttttcatagtttgaggtcatagatttacatctttaatactttttgattggatttttatatgtggtgagagatatggtccagtttcattcttctgcataaggatatctagtttccccagcaccatttattgaagagactctcctttgccctgtatgtgttcttggtaactttgttagaaataacttcactgtagatatatggatttgtttctgggttctctattctgtttcattggtccgtgtgtctgtttttatgccactaccatgctgttttgattactctagctctgtagtataatttgaagtcagataatgtgattcctctagttttgttctttttgctcagggtagctttatctattctgggttttttgtgattccatatacattttaggattgtttttctatttctgtgaagaatgtcattggtgttttgatagcaattgcattgaatttgtagattgctttgggtaggatggatattttaacaaaattgattcttccggctgggcacggtggctcactcctgtaatcccagcactttgggaggccgagtcaggtggatcacttgagatcaggagttcaagaccagcctgatcaacatggagaaaccccgcctctactaaaaatacaaaattagccaggcgtggtggcatatgcctgtaatcccagctactcaggaaagctgaggcaggagaatcgcttgaacccaggaggcagaggttgtggtgagctgagattgcaccattgcactccagcctgggcaacaggagcaaaactccatctcagaaaataaaaataaacattgattcttccagtccatgaacatggaatgccttttccattttttgtgtcctcttcaatgttttgcatcagtgctttatagtttttattggagagatctttcacttcttcagttaagtctattcctaggtattttatttgatttgtagctaatgaaaatgggattcgtttcttgatttctttttcagattatttgctgttagcacatagaaatgctattgatttttgcatgttgattttgtatcctgcaactttactgaatttgttcttcagttctaatagttttttggtggagtctttaggttttccaaatatcagaccacatgatgtgcaaacaaggataatttgacttcttcttttccaattttgatgccctttatttccttctcctgtcagattgctctagctaggactggcagtattgtgttgcataactgtagtgaaagtagtcatccttgtcttgttccagatcttaaagaaaaggctttcagttttcccccattcagtatgttactagctgtgagttgtcatatatggcttttattatattgaggtctgttccttgtatactcagtttttttagagtttttatcatgaagggatgttaaacttatcaaatgctttttcagtatcaattgaaatggtgatatggcttttgtcctttattctgttgatacgatgtattacattgattgatttgtgtatgcatacctggaatacattccacttggtcatgaagaatgaactttttaatatactgttgaatgtggtttgctagtatttcattgatgatatttgcctcaatgttcatcagggatataggcctgtagttttctttttttgatgtgtctttgcctgattttgatatcaggatattcctggctttgtaaaatgagtttggaagtattccctcctcctctgtttttcagaacaatttgaataggactgatatttcttgttctttaaacgtttaattgtggtaaattatacattacataaattttactgttttaaccacttttaagtgtatactcggtggcattagatacattcacatttttgtgcaacccaaaactctgtacccattaatcggtaactccccattcctccctacctctggcccctggtaaccatcattctactttttgtttctatgaatttgaccactctaggtacctcatttaagtagaatcgtgtaatgtttgtctttttgattctggcttatttcacttataatatttcgaggttcatccaggttgtagtatgggtcagattttcattccttttaatgatgaataatactcattatatgtatgtgccacatcttggttatccattcctcggacaatggacacttgggttacttctaccttttggatattggcaaatatttcatttctcttgggtatatatttatttcttttgagtatttcttttgggtatatatccagaaatagaattgttggatcatacggtatttcattttttaatttttagaggaatcaccatagtgttttccattgcaggcgtgccattttgtatttctagaagcagtatacaggggcttcagtttctctacctccttgccaaacttgctgtttgtgtgtgtgtgtgtgtgtgtgtgtatgataatagccaccctgattggtttgaagtggtatctcgttgtggtttggatttgcattttcctaataagtactgatattgagcatcttttcatgtgtttattgatcatttgtatattttctttgaagaattggccattgaagtcttgcccatttttctcccccacatagcttctcatggctattttgcccatttttgagtgggttgactgttttgttgtttttgtcaaacttttttgcatattctggaaactaatctctctctttttctttttttttttttttttttttttttgagatggagtcttgctctgttgcccaggctggagtgcagtggcacgatctcagctcactgtaagctccgcccgctagcttcatgccattctcccacctcagcctcccgagtagctgggactacaggcgcccgccaccatacccggctaattttttgtatttttagtagagatagggtttcaccatgttagccaggatggtctcaatctcctgacctggtgatacacccgcctcggcctcccaaagtgctggaattacaggcttgagccaccacgcctggccttctggaaactaatctcttatcagatatatgacttgcaatatttatttcatttcaggggttgattgctttctcactctgattgtgccctttgatgcacagatattttgaatttttcatgagtccagtttgtcagttctttctattctatctgtgctttggcgtcatatccatgaaagcactgtcaaaccctatgtcatgaacattatacccaatgtttttttctaagatatttttatgttttagttcttgagtttagagtttaggtctttgattcattttgagttaatttttgtatatagtacaaattaagggtccaattttatattatttgaacatccagttcccccagcactatttgctgaaaagatggacttactctttgagaccctgtcacctgcccaccccagtggacactagctgttccatccaattgctgtcctggggccttgtcatgccactcttccactttggacccaagcccacaccgttgctcccctctgggatactgaccccactataaacttctctagggctacaaccttcctaccccttgtgcctcatgaccaccccctcccttgtccccaccatgcccatgatgagtcttttctcaaggcagctccccttgcctccatctcaccctcacctgtgcaccacagccacactggacatgggtccctctgagcctgagtcccttcccattcccactgtcccctctggcaagaccttccttccaccactgccttcatgctcctcccttgcccctgcagggcagcctctccccttggcccctattcccttagggggcttgtggccacccagtcctggcacctgacctacaagtttgccatcttcattcccccttcttctgttcatcagccccctcctctatcctcccaccctcacagttttccttgtatatgaaatcttcgttcttgtccttttgcccatgtgcatttcctgcctcctcagggaggtcgggacagcagacctgtgtgttaaacatcaatgtgaagttatttccaggaagaagtttcacctgtgatttcctcttccccagagccccacagtcttcgttacaacctcatggtgctgtcccaggatggatctgtgcagtcagggtttctcgctgagggacatctggatggtcagcccttcctgcgctatgacaggcagaaacgcagggcaaagccccagggacagtgggcagaagatgtcctgggagctaagacctgggacacagagaccgaggacttgacagagaatgggcaagacctcaggaggaccctgactcatatcaaggaccagaaaggaggtgagagtcggcaggggcaagagtaatgggaggccttctccaggaaagttggagacagagagcagggacctgtctcttcccgctggatctggctgggggtggggatgaggaatagggtcagggaggctcagcagggtggtgagccggaactcagcccacacagggaggcatggaggagggccagggaggggtcgccgctgggctgagttcctcacttgggtggaaaggtgatgggttcgggaatggagaagtcactgctgggtgggggcaggcttgcattccctccaggagattagggtctgtgagatccatgaagacagcagcaccaggggctcccggcatttctactacgatggggagctcttcctctcccaaaacctggagactcaagaatcgacagtgccccagtcctccagagctcagaccttggctatgaacgtcacaaatttctggaaggaagatgccatgaagaccaagacacactatcgcgctatgcaggcagactgcctgcagaaactacagcgatatctgaaatccggggtggccatcaggagaacaggtaccgaccctggccaggggctctactgttcccgcaattctgctagagttgcctcgcctcccagctctgtccggggaaaccctccctgtgctatggatgcaggcgtttcctgttggcatattgtgtcctgatttgcctctcctgttagagccattggataaagacagtgggtctgggactgaactgtccagtgttgtaatctgggaaagcagtgggccctctgacagaagcctgagcctggggtgggagttaggcaggagaggaagccctcagggccagggctgccccctctgcctcccggcctgcccatcccggagagttccctcctggccccatgacccaggagtccacccttgacatccccctcctcagcatcaatgtggggatcccagagcctgaggccacagtcccaaggcccatcctcctgctagcctggaggaattaggccccagggtgaggacagacttacagaaggtccgggatctgtgagggattcagccagagtgagaacagtggagaggagcagccctgttccctgcatctcccttagaggggagcagggcttcactggctctgccctttcttctccagtgccccccatggtgaatgtcacctgcagcgaggtctcagagggcaacatcaccgtgacatgcagggcttccagcttctatccccggaatatcacactgacctggcgtcaggatggggtatctttgagccacaacacccagcagtggggggatgtcctgcctgatgggaatggaacctaccagacctgggtggccaccaggattcgccaaggagaggagcagaggttcacctgctacatggaacacagcgggaatcacggcactcaccctgtgccctctggtgagcctggggtgaccctggagagggtcaggccagggtaggaacagcagggacggctgtggctctctgcccagtgtataacaagtccctttttttcagggaaggcgctggtgcttcagagtcaacggacagactttccatatgtttctgctgctatgccatgttttgttattattattattctctgtgtcccttgttgcaagaagaaaacatcagcggcagagggtccaggtgagaaaaggggacagtttctggagatgggaaagctcctttctaggcagtagggtctcctcattgctcctgcccagacaagacgtaggtgacaaggctgctggaacaggggatggaagctggggtatttgggaggggaatgggagctgcatctccatctacacccataagtgcttctcaagccagggctggggcaaggccttcgaatatccagctgtggcctcctcctgctgcaagtgaggagtgggcagcagggagggctgtggcacctgctctgtccccatcccagcctctctgtctctcgggctcactagggtgcgtccaggtggggtgagttgggaatcacgtgctgattgctgagggcctggatgatcatggtgtcagagggaggaaatagtaaaggtggctgtgatctggggagggccagaaactggagaggaatccaaggagaggcggtgcccacccgtgtgcctcctccaggaggcactttccaggttcccaccacctggcctccctgagtttccttgcagatgacacagatgaatagataagcagatgtccctgggccatttgaggagcggggcccagcccctcatcagggcagatgtggtccctgttttcatcctacctccagcgtgttttcttctgcagtccctgagggacacagtccccaggcgccatctctttgaggctttgttctgtgctctgtggccttaccttgccctccctgagccaatttccctttctcaaggtggtcactgcctggtaagtttggagtaagggacggtcagaagcatttcccccacagtcaggttgtttgatgggggatgaaaagagacagcagaagttttgtgtttctgcaaaaacagaggcagtgcaggggacagtgagaggctggggtgtccaggagacctgagtctggcggtaggggcgctggtttctcatccttgaacctaattgcactgtcagtcggcccctcatgcctgagcagatgggaaggttcgtcccctgccctgcagcaagagggccctgtccaggaggcacccacagcaggagcagtgcaggtctgtggtcactcctgctctcacctgcggcgtctcccgtggagggattgtcacttctggttccctgtgggcaggaatggtttcctcgtaggtcactggggttttggccaggaaaagggtatgaaattcatgtgccagtttatcaaaattcctgctttcaatgttgatgtccaataaagatgttcgtaatttcagctctataatcttaataggatttcctctaatactgctgttgtaaagcatattaaataaaacaggaactcaaatttggagccccctctccagaagggtctgtgtggagatggtggctgtggcagcggcagttcccaggtgcagagggtgggcagaggcagcctcaggctaaggggtctcccctactccacgtggagaaaagtccttgtaggttgcaagggcagtggcctgggtggaatccctgctagggacagagcaggaaggcctcgcagcctcaccaagcagcagctctggggtgaagtaagtggaccaggagtaagtggaccaggcaggagcagtagtgactcaacagcaggtcacaggcctaggtgggtgctgaaggtcatgggaggccaggcctcctcgagcaaggtggggggtcccagggtcatgtcaggtgcagatcctgtggcagccatgtctttccatgctgggcctgctgggccccccaggcttcctgatggggtccccagttaggagctgcctgctcagggctgggaggggaggagtgctgagctgcagatagagggcagggcccacagtgggcagggcctgccctggtgtgcaggtgcctctgcaggagaggagggcctggggactgagagcaagggtcagggcctctctttggggaggcctctcactgtaacaggactggtcaggcctgagaggagggcactgggttccctcttgggtcttgtccttttgtcttggggccctttcactccctgcacggtgagtggtgggcacaggacaggggctgatgttgatggagtgatgggagagaactgacaggggctgggaaaagcaaggagggaggaagaaaaaagtgggggcctcatcttctctcagagaaagggtgaatctgattttggggcaactgaagagagaaaagtccttagggaataaacacaacactgcacccagtggggcatttacccgtttccctcttctccagagcttgtgagcctgcaggtcctggatcaacacccagttgggacaggagaccacagggatgcagcacagctgggatttcagcctctgatgtcagctactgggtccactggttccactgagggcgcctagactctacagccaggcggccaggattcaactccctgcctggatctcaccagcactttccctctgtttcctgacctatgaaacagaaaataacatcacttatttattgttgttggatgctgcaaagtgttagtaggtatgaggtgtttgctgctctgccacgtagagagccagcaaagggatcatgaccaactcaacattccattggaggctatatgatcaaacagcaaattgtttatcatgaatgcaggatgtgggcaaactcacgactgctcctgccaacagaaggtttgctgagggcattcactccatggtgctcattggagttatctactgggtcatctagagcctattgtttgaggaatgcagtcttacaagcctactctggacccagcagctgactccttcttccacccctcttcttgctatctcctataccaataaatacgaagggctgtggaagatcagagcccttgttcacgagaagcaagaagccccctgaccccttgttccaaatatactcttttgtctttctctttattcccacgttcgccctttgttcagtccaatacagggttgtggggcccttaacagtgccatattaattggtatcattatttctgttgtttttgtttttgtttttgtttttgagacagagtctcactctgtcacccaggctgcagttcactggtgtgatctcagctcactgcaacctctgcctcccaggttcaagcacttctcgtacctcagactcccgaatagctgggattacagacaggcaccaccacacccagctaatttttgtattttttgtagagacgggatttcgccaagttgaccagcccagtttcaaactcctgacctcaggtgatctgcctgccttggcatcccaaagtgctgggattacaagaatgagccaccgtgcctggcctattttattatattgtaatatattttattatattagccaccatgcctgtcctattttcttatgttttaatatattttaatatattacatgtgcagtaattagattatcatgggtgaactttatgagtgagtatcttggtgatgactcctcctgaccagcccaggaccagctttcttgtcaccttgaggtcccctcgccccgtcacaccgttatgcattactctgtgtctactattatgtgtgcataatttataccgtaaatgtttactctttaaataga

SEQ ID NO: 316 - DNA, 16209 bp, Homo sapiens
  source 1..16209: mol_type = genomic DNA; note = NT_167249.2:2794202-2810410 MICB [organism=Homo sapiens] [GeneID=4277] [chromosome=6]
cttttccggaccctgcagtggcgcctaaagtctgcgaggaggaagtcctgcgaggacttagtccctgagtccagggatctaaggcaagtgctgagggagaaaacatagttgatggggcagagcagagggggctggaggtggggtggagggggagagctttgaacagaagacctgggaggcttggtgggggaggggacccaggcctcggcgctgagaagcaactcccctggagctcaagaccatcttggcctcccctagcccaggggaggactggcttcatgtctccctgaaaccgcttctaaatgccttagaacaaaccttaaatattcattattattattgaactattaaaagtcttttttggaggcgagctgaatgagaccctttgctggagctggcacacggaggaagtcctggagggagggtagtcaccgtggaaggaagggcttgggacctgtgtcaggagagctgggtccatctccctctctgtctcaaactatgcttatgatctttagcagcgaaaataatctctctaaggtggggacaggaccccagtccctgctgtgcttaataaattatgaggatcaaaataaattatcagtgaatgtgtatgggaagactaagaaattgttaaaattctcgagtacattacattttcatccacagaaaagtgtaggctagggatgataggggaatagttagtaatgacagggttagttgaacttaaaaaaaaaggttgtgaggccaacaaaaaagaaatggacacagttcctgatcctggagggttcatagtctaatgggggaggagggtagaagatggtaggtgatggctgggtgtgtggcactcgcctgtagtcccagctactcaagaggctgtggtgggaggattgcttgagcccagacatttgaggctgcagtgagctataatcacgccactgcattccaactgagtgacacagcaagactcctctcttaaaaaaataaaataaaataaatgaaaaaaaataagattcaagacagggcacagtcggtaccatcaggaaggttcaaaccatgggctagatcagtagttctaaaacttgactacacatcggaatcacgtagggaactttaaaagatactaaggtttaggtccaacctaggtttactgatttaactggttgtggctgtggcctgggaacatggatattaaaaactctccaggtggttctacgcagtggctaggtttgaagaccaccgcctagatgtcccaatgactaagaatgtgcgctggggacaagccaattctcttagtagaaagaggctttccagacagaattcttattattgagaattgagaattcatatgccacacataatttatcgctttaaagtgtacagatcagtggcttctagcataatcacaaggttgtgccaccgtcaccactatctacttgggaagattttcttcctttttttctttttttttttttttttttgaggcggagccttgctctgttgcccaggctggagtgcagtggcgcaatctcagctcactgcaagctctgcctcccgggttgaccccattctcctgcctcagccttctgagcagctgggactacaggtgcccgccaccacgcccagctaagttttttgtaatttcagtagagacggggtttcactgtgttagcaggatgctctcgatctcctgacctcgtgatctgcccacctcgacctcccaaagtgctgggattacaggcgtgagccaccgtgcccggaccctttttcctttttttttttttttaaaggctagtcaagtgaaacagtgggagtgaagatgaaacaaaaacatctgtaactggttgtgatcaattagttgtaaacaccactgcactcagaccagcctaattgggaagattttgaggatatgctgtggtctgatgggttccaaggcagaggtgacagtaacctggaagagggagactgcttaggcagtggcatcctggtgggatagggtgaggagatcccagagcccacgtttactgcaaccctggggaaatgtcaccagagaaatggaggtggtgccagacaatagattgtgggagctatggtttccatggtagagtagaagcatccaccatctgtgacattcagcagatggggcgctgtgggtggcttggagcactctggttgtaactgaggcaggcacagtgtttaggaagcctgtgcagtaatccaggctgaagggaggggaacgcctagactaacattgtggctgtgggattgaaatagtgttgaaggagctgactttgactcccggagatgaaggggaaagaggaaatcagaagggaccaaggatggtgaagttcttaagagaaactgaggaggaagagaggatgatgtggtgggagacgtgtagagagtccttgtagatctgtcacattgaaggggactatggtcccagaggtacagatgtcctaaaacaggctggaaaagggagtctggagagagcttggtgttgtaatgaaccatggggagccgcctcgttggccctgtgattacccaggaactgaatagagagggggccctgggagacctcagacacttagaggatataagggggtgaaaggggggacctggctttgagtcgaagggaggagaaggagattatatagctgaaacgtctaagagaatttgtgatctgagcgtttctactggggcaagtgcttctgaaaggcagaggcggctgagatctggaaacaggtctgcaaatctggtcactggtctcattgcagtaacgctgtgcgcggttgagggagtgtattgggagaaaaaccacgcgttgtctgtcccggaaggaacaagccagtgagagccggcctgatgggaggaccggcgaaaggggcttggtgaagcccgcgctccttgggggtgggaatgcggggatggggtggtcgcgatgcagggagggcgacagggtccaggtcgtgctcataaggttggagctgtactctcagctactcggggctggtccttgattttggctgcgctcgcgcacgctccaccttttctggccgccaggtcccgccttctaaatttccccaggtctccaggccgctagaattttctcttctgaacgtgaccccgccctctccattcatgattggccctaagttccgggcctcagttttcactggataagcggtcgctgagcggggcgcaggtgactaaatttcgacggggtcttctcaccggtttcattcagttggccactgctgagcagctgagaaggtggcgacgtaggggccatggggctgggccgggtcctgctgtttctggccgtcgccttcccttttgcacccccggcagccgccgctggtgagtggggttcctggcggtccccggcggagcgggagcggcggggcgtttccgggggtccgggtgggttgccgcgagcgctgtgcggtcagggcggggctcaggtgtgctgtctggagtgcagggagctggacgccgcctgttcccgccacacctcagccctgctttcccatctcccgtctcttttttttttttttttttttttttctttctgagacggagtctctgtcgcccaggctggagtgcagtggcgcgatcttggctcactgcaagctccgcctcccgggttcacgccattctcctgcctcagcctccctagtagctgggactacaggcgcccgccaccacgcccggctaattttttgtgtttttagtagagatggggtttcaccgtgttagtcaggatggtctcgatctcctgacctcgtgatccgcccgcctcggcctcccaaagtgctgggattacagaggtgagccaccgcgcccgacctcccgtctcctttcagtcctcctcgggatcgcgcatcacccgcattttctggtctcctcctgcacttgctctcctcgcctctcctccgtctcctctcacttttcggacaaaccagtccttctgaggcccctgggttcccgggctgctcctgtgaatggcattggaaggccgttccagcgcggccgctgaggcagccacttcccccggtgctgggggcggatctcagctccctgaagtcctgtcctctcccggagccgatgtgttctcagctcctgggccgcagctcctggagttggggccctcctttcttgggacccggaggtggtgcttcttgctgctgtggggactgtggggggtcctgactctcaagctgaggggttggagtctgcaggctccgggcagaggattcttcctgcgacttctgtcatccccagctcattctcccctcgcctccggctccgagggtcctctcctctctcgcatcccacccctactaatgaccaatgatctaaggacaccagattccctctcacctcctccctgcccatcttacggcgccctgggtcctgttgttctcccagctccctgctaccccttcctgtgtgctgttctctgatccatttctagggtgtcctctgccttcatcccccgcccccgccactgaaggtccctcctgcctcctttatgggcctttcctgcaagcagccttcactccgtgctgcccctatgcctccccattcccaaatgtccctgactctaactttctggtgctgccttttgtccggggggggtcttccctccatcccactcccctccagacccccaaggagagccctgatgctaatggcagttgggccttaggcagggcgcagggcagcgcagatgccccctcccctccagtgcaggtgcctgctctgggccctgcctcattgtggccccttccccactccttcatcctcagcctcaccctcttgaggaccccaccctccagcccacagatgctggaccatccctccctggtccctccgcccctctccaccttgggaccttgtgctgctcctgtctcttgcccagctgcctggggccctcagcaagttctcatctttcagtgggaaagtgggagtgctggagcatatgacagtgctgagaatctttcccaagccccaccctcccccagagcaccctcccctcctgtcctcaccctaccccaagttctcccacagtcactcctgccccatgctcatgccgccctccagttcttgctctgcccatctcccctccccaacccagacctaaaacaggctgttgggccagctgttccttgaccttccttcttttcttttggttccttgaccccagtgggctctcactccccacaccgcatatctaaaatctgttttgcctgctcttggggtgccactgctccccctccagcattactccttttggcaggtccttcctcaggctgagaatctccccctccaccttggttttctctctctggccagcacccccaccccttgctttgtttttaatttttaacttttgtgtgggtacgtagtagatatgtatgtatatatttatggggtacatgggatattttgacacaggcctacaatatgtcataatcacatcagggtaaatgggttatctatcacaacaagcatttatcctttctttgtgctacaaacaatcccattatgctctttcagttatttttaaatgtacaataaattattgttggctgtactcaccctgctgtgctatctactagatcttattcattctaactatatttttgtacccattaaccatccgcactcccccactccccactacccttctcagcctctggtaatcgtcattctattgtctctccccatgaggtccattgttttaatttttggctgccacaaataagtgagaacatgcaaagtttgtctgtctgggcctggggcttatttcacttcacatgatgacctccagttctttgcaaatgacatggtggctgaatagtactccacatacacgtgtgcaccacattttctttctccattcgtctgttgatggacacttaggtcgcttgcagatcttggctattttgaatagtgctgcaataaacatggaaaagtagatagctctttaatataccgatttcctttcttttgggtatatgcctaacagtgggagtgctggagcatatgacagctctgttatatttttagtttttggaagaacctccacattatttcccacagtggttatactagtttacgttcccaccaacagtgtacaagggttctcttttgctacatcctcgccaggattccttattgcctgtcttctggataaaagccagtttatctggggtgggatgatatctcgtaggagttttgatttgccttcatctgatgacgaatgatgttgagcaccttttgatatacctgtttgccatttgtatgtcttcttttgagaaatgactattcagatcttttgctcatttttaagttggattattagatatttttcctatagagttgtttgagatccttatatgttttggttactaatcctttgtcagatgaatagtttgaaaatattttctcccattcttggatggtctcttcactttgtttattgtttcctttgctgtgcagaagctttttaacttgatatgatcccatttatgcatttttactttggttgcctgtgcttgtggggtattacttaaaaaatctttgccagtccaatatcttagagagtttccccaatgttttcttttatagttttcatagtttgaggtcatagatttacatctttaatactttttgattggatttttatatgtggtgagagatatggtccagtttcattcttctgcataaggatatctagtttccccagcaccatttattgaagagactctcctttgccctgtatgtgttcttggtaactttgttagaaataacttcactgtagatatatggatttgtttctgggttctctattctgtttcattggtccgtgtgtctgtttttatgccactaccatgctgttttgattactctagctctgtagtataatttgaagtcagataatgtgattcctctagttttgttctttttgctcagggtagctttatctattctgggttttttgtgattccatatacattttaggattgtttttctatttctgtgaagaatgtcattggtgttttgatagcaattgcattgaatttgtagattgctttgggtaggatggatattttaacaaaattgattcttccggctgggcacggtggctcactcctgtaatcccagcactttgggaggccgagtcaggtggatcacttgagatcaggagttcaagaccagcctgatcaacatggagaaaccccgcctctactaaaaatacaaaattagccaggcgtggtggcatatgcctgtaatcccagctactcaggaaagctgaggcaggagaatcgcttgaacccaggaggcagaggttgtggtgagctgagattgcaccattgcactccagcctgggcaacaggagcaaaactccatctcagaaaataaaaataaacattgattcttccagtccatgaacatggaatgccttttccattttttgtgtcctcttcaatgttttgcatcagtgctttatagtttttattggagagatctttcacttcttcagttaagtctattcctaggtattttatttgatttgtagctaatgaaaatgggattcgtttcttgatttctttttcagattatttgctgttagcacatagaaatgctattgatttttgcatgttgattttgtatcctgcaactttactgaatttgttcttcagttctaatagttttttggtggagtctttaggttttccaaatatcagaccacatgatgtgcaaacaaggataatttgacttcttcttttccaattttgatgccctttatttccttctcctgtcagattgctctagctaggactggcagtattgtgttgcataactgtagtgaaagtagtcatccttgtcttgttccagatcttaaagaaaaggctttcagttttcccccattcagtatgttactagctgtgagttgtcatatatggcttttattatattgaggtctgttccttgtatactcagtttttttagagtttttatcatgaagggatgttaaacttatcaaatgctttttcagtatcaattgaaatggtgatatggcttttgtcctttattctgttgatacgatgtattacattgattgatttgtgtatgcatacctggaatacattccacttggtcatgaagaatgaactttttaatatactgttgaatgtggtttgctagtatttcattgatgatatttgcctcaatgttcatcagggatataggcctgtagttttctttttttgatgtgtctttgcctgattttgatatcaggatattcctggctttgtaaaatgagtttggaagtattccctcctcctctgtttttcagaacaatttgaataggactgatatttcttgttctttaaacgtttaattgtggtaaattatacattacataaattttactgttttaaccacttttaagtgtatactcggtggcattagatacattcacatttttgtgcaacccaaaactctgtacccattaatcggtaactccccattcctccctacctctggcccctggtaaccatcattctactttttgtttctatgaatttgaccactctaggtacctcatttaagtagaatcgtgtaatgtttgtctttttgattctggcttatttcacttataatatttcgaggttcatccaggttgtagtatgggtcagattttcattccttttaatgatgaataatactcattatatgtatgtgccacatcttggttatccattcctcggacaatggacacttgggttacttctaccttttggatattggcaaatatttcatttctcttgggtatatatttatttcttttgagtatttcttttgggtatatatccagaaatagaattgttggatcatacggtatttcattttttaatttttagaggaatcaccatagtgttttccattgcaggcgtgccattttgtatttctagaagcagtatacaggggcttcagtttctctacctccttgccaaacttgctgtttgtgtgtgtgtgtgtgtgtgtgtgtatgataatagccaccctgattggtttgaagtggtatctcgttgtggtttggatttgcattttcctaataagtactgatattgagcatcttttcatgtgtttattgatcatttgtatattttctttgaagaattggccattgaagtcttgcccatttttctcccccacatagcttctcatggctattttgcccatttttgagtgggttgactgttttgttgtttttgtcaaacttttttgcatattctggaaactaatgtctctctttttctttttttttttttttttttttttttttgagatggagtcttgctctgttgcccaggctggagtgcagtggcacgatctcagctcactgcaagctccgcccgctagcttcatgccattctcccacctcagcctcccgagtagctgggactacaggcgcccgccaccatacccggctaattttttgtatttttagtagagatagggtttcaccatgttagccaggatggtctcaatctcctgacctggtgatacacccgcctcggcctcccaaagtgctggaattacaggcttgagccaccacgcctggccttctggaaactaatctcttatcagatatatgacttgcaatatttatttcatttcaggggttgattgctttctcactctgattgtgccctttgatgcacagatattttgaatttttcatgagtccagtttgtcagttctttctattctatctgtgctttggcgtcatatccatgaaagcactgtcaaaccctatgtcatgaacattatacccaatgtttttttctaagatatttttatgttttagttcttgagtttagagtttaggtctttgattcattttgagttaatttttgtatatagtacaaattaagggtccaattttatattatttgaacatccagttcccccagcactatttgctgaaaagatggacttactctttgagaccctgtcacctgcccaccccagtggacactagctgttccatccaattgctgtcctggggccttgtcatgccactcttccactttggacccaagcccacaccgttgctcccctctgggatactgaccccactataaacttctctagggctacaaccttcctaccccttgtgcctcatgaccaccccctcccttgtccccaccatgcccatgatgagtcttttctcaaggcagctccccttgcctccatctcaccctcacctgtgcaccacagccacactggacatgggtccctctgagcctgagtcccttcccattcccactgtcccctctggcaagaccttccttccaccactgccttcatgctcctcccttgcccctgcagggcagcctctccccttggcccctattcccttagggggcttgtggccacccagtcctggcacctgacctacaagtttgccatcttcattcccccttcttctgttcatcagccccctcctctatcctcccaccctcacagttttccttgtatatgaaatcttcgttcttgtccttttgcccatgtgcatttcctgcctcctcagggaggtcgggacagcagacctgtgtgttaaacatcaatgtgaagttatttccaggaagaagtttcacctgtgatttcctcttccccagagccccacagtcttcgttacaacctcatggtgctgtcccaggatggatctgtgcagtcagggtttctcgctgagggacatctggatggtcagcccttcctgcgctatgacaggcagaaacgcagggcaaagccccagggacagtgggcagaagatgtcctgggagctaagacctgggacacagagaccgaggacttgacagagaatgggcaagacctcaggaggaccctgactcatatcaaggaccagaaaggaggtgagagtcggcaggggcaagagtaatgggaggccttctccaggaaagttggagacagagagcagggacctgtctcttcccgctggatctggctgggggtggggatgaggaatagggtcagggaggctcagcagggtggtgagccggaactcagcccacacagggaggcatggaggagggccagggaggggtcgccgctgggctgagttcctcacttgggtggaaaggtgatgggttcgggaatggagaagtcactgctgggtgggggcaggcttgcattccctccaggagattagggtctgtgagatccatgaagacagcagcaccaggggctcccggcatttctactacgatggggagctcttcctctcccaaaacctggagactcaagaatcgacagtgccccagtcctccagagctcagaccttggctatgaacgtcacaaatttctggaaggaagatgccatgaagaccaagacacactatcgcgctatgcaggcagactgcctgcagaaactacagcgatatctgaaatccggggtggccatcaggagaacaggtaccgaccctggccaggggctctactgttcccgcaattctgctagagttgcctcgcctcccagctctgtccggggaaaccctccctgtgctatggatgcaggcgtttcctgttggcatattgtgtcctgatttgcctctcctgttagagccattggataaagacagtgggtctgggactgaactgtccagtgttgtaatctgggaaagcagtgggccctctgacagaagcctgagcctggggtgggagttaggcaggagaggaagccctcagggccagggctgccccctctgcctcccggcctgcccatcccggagagttccctcctggccccatgacccaggagtccacccttgacatccccctcctcagcatcaatgtggggatcccagagcctgaggccacagtcccaaggcccatcctcctgctagcctggaggaattaggccccagggtgaggacagacttacagaaggtccgggatctgtgagggattcagccagagtgagaacagtggagaggagcagccctgttccctgcatctcccttagaggggagcagggcttcactggctctgccctttcttctccagtgccccccatggtgaatgtcacctgcagcgaggtctcagagggcaacatcaccgtgacatgcagggcttccagcttctatccccggaatatcacactgacctggcgtcaggatggggtatctttgagccacaacacccagcagtggggggatgtcctgcctgatgggaatggaacctaccagacctgggtggccaccaggattcgccaaggagaggagcagaggttcacctgctacatggaacacagcgggaatcacggcactcaccctgtgccctctggtgagcctggggtgaccctggagagggtcaggccagggtaggaacagcagggacggctgtggctctctgcccagtgtataacaagtccctttttttcagggaaggcgctggtgcttcagagtcaacggacagactttccatatgtttctgctgctatgccatgttttgttattattattattctctgtgtcccttgttgcaagaagaaaacatcagcggcagagggtccaggtgagaaaaggggacagtttctggagatgggaaagctcctttctaggcagtagggtctcctcattgctcctgcccagacaagacgtaggtgacaaggctgctggaacaggggatggaagctggggtatttgggaggggaatgggagctgcatctccatctacacccataagtgcttctcaagccagggctggggcaaggccttcgaatatccagctgtggcctcctcctgctgcaagtgaggagtgggcagcagggagggctgtggcacctgctctgtccccatcccagcctctctgtctctcgggctcactagggtgcgtccaggtggggtgagttgggaatcacgtgctgattgctgagggcctggatgatcatggtgtcagagggaggaaatagtaaaggtggctgtgatctggggagggccagaaactggagaggaatccaaggagaggcggtgcccacccgtgtgcctcctccaggaggcactttccaggttcccaccacctggcctccctgagtttccttgcagatgacacagatgaatagataagcagatgtccctgggccatttgaggagcggggcccagcccctcatcagggcagatgtggtccctgttttcatcctacctccagcgtgttttcttctgcagtccctgagggacacagtccccaggcgccatctctttgaggctttgttctgtgctctgtggccttaccttgccctccctgagccaatttccctttctcaaggtggtcactgcctggtaagtttggagtaagggacggtcagaagcatttcccccacagtcaggttgtttgatgggggatgaaaagagacagcagaagttttgtgtttctgcaaaaacagaggcagtgcaggggacagtgagaggctggggtgtccaggagacctgagtctggcggtaggggcgctggtttctcatccttgaacctaattgcactgtcagtcggcccctcatgcctgagcagatgggaaggttcgtcccctgccctgcagcaagagggccctgtccaggaggcacccacagcaggggcagtgcaggtctgtggtcactcctgctctcacctgcggcgtctcccgtggagggattgtcacttctggttccctgtgggcaggaatggtttcctcgtaggtcactggggttttggccaggaaaagggtatgaaattcatgtgccagtttatcaaaattcctgctttcaatgttgatgtccaataaagatgttcgtaatttcagctctataatcttaataggatttcctctaatactgctgttgtaaagcatattaaataaaacaggaactcaaatttggagccccctctccagaagggtctgtgtggagatggtggctgtggcagcggcggttcccaggtgcagagggtgggcagaggcagcctcaggctaaggggtctcccctactccacgtggagaaaagtccttgtaggttgcaagggcagtggcctgggtggaatccctgctagggacagagcaggaaggcctcgcagcctcaccaagcagcagctctggggtgaagtaagtggaccaggagtaagtggaccaggcaggagcagtagtgactcaacagcaggtcacaggcctaggtgggtgctgaaggtcatgggaggccaggcctcctcgagcaaggtggggggtcccagggtcatgtcaggtgcagatcctgtggcagccatgtctttccatgctgggcctgctgggccccccaggcttcctgatggggtccccagttaggagctgcctgctcagggctgggaggggaggagtgctgagctgcagatagagggcagggcccacagtgggcagggcctgccctggtgtgcaggtgcctctgcaggagaggagggcctggggactgagagcaagggtcagggcctctctttggggaggcctctcactgtaacaggactggtcaggcctgagaggagggcactgggttccctcttgggtcttgtccttttgtcttggggccctttcactccctgcacggtgagtggtgggcacaggacaggggctgatgttgatggagtgatgggagagaactgacaggggctgggaaaagcaaggagggaggaagaaaaaagtgggggcctcatcttctctcagagaaagggtgaatctgattttggggcaactgaagagagaaaagtccttagggaataaacacaacactgcacccagtggggcatttacccgtttccctcttctccagagcttgtgagcctgcaggtcctggatcaacacccagttgggacaggagaccacagggatgcagcacagctgggatttcagcctctgatgtcagctactgggtccactggttccactgagggcgcctagactctacagccaggcggccaggattcaactccctgcctggatctcaccagcactttccctctgtttcctgacctatgaaacagaaaataacatcacttatttattgttgttggatgctgcaaagtgttagtaggtatgaggtgtttgctgctctgccacgtagagagccagcaaagggatcatgaccaactcaacattccattggaggctatatgatcaaacagcaaattgtttatcatgaatgcaggatgtgggcaaactcacgactgctcctgccaacagaaggtttgctgagggcattcactccatggtgctcattggagttatctactgggtcatctagagcctattgtttgaggaatgcagtcttacaagcctactctggacccagcagctgactccttcttccacccctcttcttgctatctcctataccaataaatacgaagggctgtggaagatcagagcccttgttcacgagaagcaagaagccccctgaccccttgttccaaatatactcttttgtctttctctttattcccacgttcgccctttgttcagtccaatacagggttgtggggcccttaacagtgccatattaattggtatcattatttctgttgtttttgtttttgtttttgtttttgtttttgtttttgagacagagtctcactctgtcacccaggctgcagttcactggtgtgatctcagctcactgcaacctctgcctcccaggttcaagcacttctcgtacctcagactcccgaatagctgggattacagacaggcaccaccacacccagctaatttttgtattttttgtagagacggggtttcgccaagttgaccagcccagtttcaaactcctgacctcaggtgatctgcctgccttggcatcccaaagtgctgggattacaagaatgagccaccgtgcctggcctattttattatattgtaatatattttattatattagccaccatgcctgtcctattttcttatgttttaatatattttaatatattacatgtgcagtaattagattatcatgggtgaactttatgagtgagtatcttggtgatgactcctcctgaccagcccaggaccagctttcttgtcaccttgaggtcccctcgccccgtcacaccgttatgcattactctgtgtctactattatgtgtgcataatttataccgtaaatgtttactctttaaataga

SEQ ID NO: 317 - DNA, 288075 bp, Homo sapiens
  source 1..288075: mol_type = genomic DNA; note = NC_000011.10:35944062-36232136 LDLRAD3 [organism=Homo sapiens] [GeneID=143458] [chromosome=11]
agcaacgacgccgggcagcgggagcggcggccgcgccatgtggctgctggggccgctgtgcctgctgctgagcagcgccgcgggtgagtcggggggcggccggcgaacttcccgcggggcgcggggcgcggggcgcggggcgcagcggccgggtgcgatcgcgtcctctcccgggcgcgggccgctctccgggcgtgggtgagcgcggagggcggaccccggcgccgggctggcccggaccctgccgaggggccgccgcggggtgcgagccgtcctattgtgtgggcgtgcgcgccgggtcgtgttgtgctgtgtgcgcgggcggggctctgtgtgcagtccgggtctggggagcccggcggctgccccgattgggcgtagctcgagtgtggctgtgtgtgtgttgtgtgtgttgaggaacggaggcggggaaaggaaaggagaggagaggagagaactcttccctggtctcatcttcccagacgcctggtcgcgcgcggctgcgttagcctcctctgggcctcttcccgagtctctggcgtgcactccgtgcctcagtttccccacctgcaccgcggagggagtagcaaagctgcttcctttcattcctctctgggactgtttggtttgggtaaagtgagttgaagcaaggccggatctgggaattcatttttccccactgatcctgggaaccgaagctttatttaagacgtctgaccaccctacttgccccgcgatgggcgccctgaccggcgaggggccctgggagaggacacggggcttcatccggcggccctttgaacctggcatcaccaccgcgtgtgcatcccggggcctggaccgcagcaagcctctttcccttccagacagcgtgctgttcccaggaacttttctgctgatgtgggcatgatccgaattccagcctgggagcccttcctcctctgcccctgcccgccgcccacagctgtcagctgtccctcctggactgggcccgcccttggccccttgacgtttatttctgggcatctgatgcctagaatgtgggtgacagggcccagtgaactttcttcagcagaatcttgcctgcctggtgtttgtgccatccacatgtccaatagctgccctattttgccaagtgcttctagcagcttggctgtcgaggtgtctttggtggcctgtgggtttgctaagttgaggctcacttcattcttagctgtgccttggagttatgaatgcgttaaagggatatctcctctcttccttgatgtccctggtcctgggcatcctcacagcccactgggcagcctttcctgctctcagacccatgacatcatctccactcctctgataccccatttagatgcttatgggtttgctgggcttccagggagggactagacctcctggtgactgctgtggatttttaaccaggtctgggtgagagtgcccttaaattagtccacctggggagagagttctcacaggacattgggcagccaggagcaggtgtgaattgtttggaggctgttagagcaggtcgattttcagggcgtctacagatatgaagacctgtttggattcacaaattcaatctgtgtagctgtggtgtgtcccctcatagcacctgagaaggacagtatggaagctggctcttgtgtgtgtcctgggagagccactgtagccaaatggaaacttatttattgcatctcccagttggtactgggttgctttagttgagtctccatctctgtaaaaatagttgtaaagttaattttgtccctctctggtcagcagtggctatttaatgtgtgtgtgtacatctgagatagggctaaaataaataaaatggtcatagcaaggagcagacggatagggggaggaatagtccaactgtccctggtgggttttccattatctgtgggctttgaattacctttagagttgctgccttagaaacatctaggcaggttggagtgtgtgcatctttcatgttacattaagcatcatctttttagcatagatttcactttgacccaagtgttgccagaaacagggctggtcctttttcctaatgtcaactagatgctcctgggctcccagcccataagaaaagcctgtttggttcagtttgggtttcatagccagaccagagaccctacccctccatcccatggcctatgcttggatcctcttctgggaagttgataaaacaagagagattgtaaaagccaagactttggatctctgtctccatctgatagtctgtgaaagaatcccagggtcaaggttgaaccgtagttagagtcctgagtctttgtggggctggaaagccactgacattccaagagcagtttggaggccttttttattcaggaaccttctcagacaccttgcatatttttttcttcctttgtttttatttgtgttagggaagtgaagcattgattttcaccgttactattttttaatgtatcctgcgagagagactaagcccaagtcatgtcatctgatgtccagttttcctgcatgtgggtggactcagtgggtttaagtgcgtatggcttgagacatttctaaaggcagccatgctggatgatggtccatcttctcacctcctccaggactgacctttgcctagacttcctgacattctgtatcagtgaaaaggcttgattttcccaggagtgagtgtactcccaggagtgagtattgaccttttctcctggaaagatctgcttaacggtgtgaggggtgggttttattgtttttaacttgctgagtagctgtgcacatctcagcacagctcagctcgggaagatgaggcctaaaagaggccttgtacaccagagtacaaataaacacaccttgttgcttttcatcttcaaagagatgtgactaaggctccctactggggtgtgagatgttttttcctgacagccgacttaggccatttactctgggataagtgggggagggagagagatgggagtaggagagggtggggtggtaaattctgggccttgaagagtggtttagacacctttcagccagtctgcaggataagttgaaagtggacttgtattgtcacctttgtaaagcagtttagagaatttggagtttaggaacacttataatcaagtaatttcatgttaaagaattggccttaagccggagtaatggctcacgcctgtaatcccagcactttgggaggccaagatgtgtggatcgcttgaggtcaggagtttgagaccagcctggccaacatggtgaaaccgtcgtctctactaaaaatacaaaaattagccaggtgtggtgacgtgcgcctgtaatcccagctactccggaggccaaggtgggagaatcacttgaacctgggaagcggaggttgcaataagccaagatcgcgccgctgcactccagagcaagactgcctcaattaaaaaaaaaaaaaagaaaaaagaattggcctttacaaccttgcctgtttctgtgggcaagggaaagagagggaacccactatcagtgaagcatctcctgtgtgtgagatgctttgctcattactttaagcacatgatcccattgaaacttgccaaggatatcatgtggcaggaaatcattgtatggttcaggagagattgataatacccagggtaccacagtaaaggctgaagcctagattctaacttaagcttctctttgccccctacctgggcttttcccactctgtttccaggcttcctgcaccatgcttccatgcctttcctccacagtgctcttgcgaattgacacagtgagattgtttacatgaatgctccccctccccaaatctgttcactttgtggtcactgcccaggatctattcagcagagacatcagctttctttgcaggatactttggtgttcatggtaaatacataaaatacatctcaatccttatgtgaagatgaaactttttcagactaactctggtccttttgctgtgtgtgtgggtgagtgacaaacactaggcggggagatgataccagccagggttcgatttcttgacccgaattgtagttacatgggggttcgttttcattctttgagctctaaattcgtattcccctcttaaaatgtgtttattgtattttagaattaaaaaaataaggtactttccaccatggagatgccttggagtgatggaactgtttttagctatgggattgccccagggatggatctatttttggttgttgggttttcttgtttgttcttttcccctctttctgtcttcaaaatatttaggaaatgcttggaccattctaaccatgcagttttgttgttgttttgccagtgcctctacctgacaaccagggagatttttaagttggctgatcgtgtgtgtgtgtgtgtgtgtgtgtgtgtgtgtgcacatgcacacatgtgcatatgtatgtaactgccttcttctattgttgtgaaaaaatctactcacttggatgctaaggagtaccttgaagatgtttgctgggagagcagccaggtacttttgatatgccgtatttgctcgtcacatcattggcttgatgtttaatacatcttaatatagtacgtggacttttatgacagagtaactgcttggtcgggggagagcaaaagtttacttgagataggattcttagggcttttggaggtggttgcagggatggggttagtctcgggcagggtttctcagctttggtaccaacgacaccttggcctggatagttctttgttgtgggggttgtcctgtgcattgcgggatggtcacagcagcatcactagttcttgatgcctgtattggcttactcttcacccacagcggtgacagccacaaatgcctcccgacattgccacgttgcccctagttgagaacccctggtctagcatgagcaagtgtccttgccatgcatcttgagcatcattactgtgcatcattactgtgcatcattactgtgcatcattactgtgcatcctgagtgtgtcttctggatgcagggggtcaagatgccatcctcctcccaagggcctttgggctttggctttatgttttgtagccacacagttccatgggaaaacccattcttaaccaggaatgccgtcagcactgaccctttccctctcgctttcctcttgtgtcagagtgaaaacttctggaattttctatatgtggtttccttgggagagacatatgcagagaaagcaggtgataggcaggtgacagctgacaccaaaagccacctggttccctgaatgttaaacctgggaggttcagcagccctgagggagggctataggagcacaagctgccagattgccttggaagtcttgtgttgaaatcctaaccctggaagttccccttcctccacttcacagagtaggtattgttcttctgggctcccctttccctccccataattccttctcccttgccatcaaaaggccttacaacttgattcgttctgcaggtgcttgggaaaatcatctctactagcggcaagctgtgtgtgtgtgtttttagaagttttcatcgtacacttttttctctaaagtctctttgttgctctgtgtcactttataacacttcagttcctttaagacacttttccttccagctgtcgttttgctttgctctgttccaaaccttccttaagaattgtgcttccacctctcttcagactagccacataacttatctgcagctgtcttcttttgggcatgaattcacaggatgcaaggtggcacccagaggaggacgatggcttcctggggagaaatgcacattgtttcagttcaggtccatttatctgaaaccatgccctcttggaaaagccttctgtagtgaggagctttagcttcctgagtgtgcaaatgtcattttctttgtctttggatagttagcaatttcttaatattttatttggttgttcgtcattgtgccatcatctctgccacacccaggcactgtgtctatttccaggggtaggcgaagccatgtaaaacttgttctttgcccttgaagacccaaatgacccactgatggaaatgggattgttgaccttcttcgttatctgggaagggtagaggctctctgccagtgtaatctcggaggcatttctagacaggagttgtactgatggatcttggaccttgatgggaacacagagccgtgaagatgtcacagtgcccaggcaaacatgggtactgcgtcttcagggatatttaatcaatgtgtcattcttgaacaggtttcagaggtgatgacacatgtcctagtttgcttctttagctttcaagataaaatactggtatacgtgtattggtgctctgtgacttttctagctctaggcttctgaggtttgagctagaaatgtcttctgtggcttttggacaatagccttctttaccttatggtcatacacagtatatatgtgtatgtgtgtatgtgtatgtgtatgtctgtgtataccctggttatatatatatactgtatatgtaaaacctttcttaccttctaaatcctgctagattgaaagctccttgagggactgggatcatatattaagtgtctgtgatactttttcttttgtggtgtctagaagagtgagagtggctcccattcattgaaggtttactctgtctggcagggtggcaagcactgtacgtgtcttattttgttataaacttcttgaattacaaacactgcaaaaataatacacgggggccaggagcagtgactcatgcctgtaatcccagcactttggggggccgaggtgggcggatcacgaagtcagaagatcgagaccatcctggctaacatggtgaaaccccgtctcttctaaaaatgcaaaacgttagccgggagtggtggcacgcacctgtaatcccagctacttgggaggctgaggcaggagaatcacttgaacctgggaagtggaggttgcagtgagccgagatcgtgccactgactccagcctgggtgacatagtgagactctgtctcaaaaaataaaaaattaaaaaaaaatacacagactgagtacgtgcttatgatacaaaattcatacaaattagaagtaatggcaataataaaacattaaaatcctccttcatcttcctttcccatttctctcccctcccttaagtaactactgtgaattgtctggtatatatcaatttagctttaacatggatttataattatatacaggtacacacacacagagacataatttaatgagctcctgcttgtctctatttgtagttttttggctggctttttaactcaagtactatatttcatcaattttattttgagccatgtgaatgcgtcacatctgtctcctgttgtttagacatttcagttagtcccaagcaatttggcagtttccctcaccttcccttgctttgctcggctcttgaacagacaccccttttgttgctatctcagaagcacagctgatacaccttcagttatttgtgttttcctcttttaattctcttaaagggctggctcttgctttgcaagaaaatatggaattatggtaatttcttgcagtgagagatatttgcttcactattatcaaattcatgctgtttccctgcctctttgtgtatacacaaatgtgtttaatttttcatttcaatgccacattttaacatcatcttttgaaggacattctaaatagcaggtcacttcaacctgtgtagtaccagccatgcacataactggagggaagtgacgaaataggaacagctgtgaccaagtttacccaggcactgccagtgaccaataaatcacagcttccgcccaccctgtgcttttagaagatgcagttggccattaggtacatcctgatgtcagagatgttacaacatcaaataaaagtgtcttcttggccatctttctttcggctcttatatacctacccatgcttttaaaaacagctttctggtgtgtgtacatactataatttatttaatgctttccctgctggtggatcttatttcattttcagagtagtttattcaggtgggtagtatgctttaccgttttatagatgaggaaactaaaaggttcagtaactttcctaaaccttcgaccagtaagagatagtttcagaattggcacgtgggtctgcgtgacttagacttggtctcctaaccactggccctgctgctttggtatagaatagaaatccaagtctgtatgtgttgggagaagaattgcaccgtctaccttgtgctggagaattccagcattgcatagggatgtcaatattgacttcatgcttatcgtgttggatagaatgatttgttagagagccattggagtggggggcatctcaagttgattctactcaaatggcctgtctttggcagatagaaactgctgttctcctatgtggagaacgtatcagtataggtgttgaaattggcttttgcaaagactgaatttattaaacaaaaataagaataaacaagttatttcagcaccatgacacttgcctttgaatatattaatgatagagataattcttcccccctttatgggaatattttgttggaataccaaccaaaagcaatttcttttcagcacttccctcaaatagtgctgggtgccaaatagaagggcccactgttcaaaaagtctggaaatatattttctagacaaagatacagtactgatgataatgcctcgtatcaaaagagaaattaaagtatttttagaattactttctgaccctgagcttaagcttatatggtccatgtatgagagaacatttcctgaactagagattgatgttctttattgtggaagctgaaattttaatatgttgctccagaaagaaactagaaataattggccccatcttgttgcttcaaactaaggggctcttgtgcgaaagtaggcagtgatgtcttgtgagaaagtaatgccacaggcctgtaaagtgttagctacaggcagagcagagtgaaccccaggattttaaacttactcccaaggcctttccagagacctgagaaccggactctccttttgttgagtcattgtgatatcaagagacaggtgataaattgggtgaattcgctgttgcccaaatccaactgtgatttttgacagacaaatagcgcagtgtgcagacgatgttgtctctgtcctggcgagcggccacggggagggagggcaggccctttagcttactctggaacaggccttgggcatccgggtgctgcaaggatgtggaatttatgaataacttgatttagaagacttgcatacccaaggtgccagtgttccaggtggcagtgggacacttatgtgtttgttggcataaagaaatgaaagcataaagggtgtttaattttattgcattaaaaatcccttctcattattataagaccgagtgagtttggcttagcgaatgtcagaagtgtgtcctctttgatggcattactggaacattttccttcagctttagccttgaatcagagcagtgttctccaggcgtcgttaaactaattggacatggctgaaaaatgagccctagtcacacttgtagttccacagtccgttgaaaaaagcctcttgattgatttggaaagttctaaatttaacttgtttttttattataaaaataaaattgggggaatttggggaggggaagagtgattagcaacatagggtatttcatcagagttcaagctgtaaagaatggttaatgctaagagaaaccagaacagaactaaataaggtgtttcaaaaacagattgataaaaacattggcataagcttgattaaaaagtatgatactagcaagtgagcccagctggcaggaacctggggaagcaggattggaatgagttgatgcttactactgtaaaagagataaagttggaaagaatgacttttacattaagaatatttggtattaatgaaagatagaactaatcttgtaaatgttacagtgtaacaataaacatcggtggatcctatgaagggcagtggtgacataataaaggtttagcatacccagagttcatttgtgttattcaagtaaatgataatgatgacaatacaagaaaagctaacaggtgtcaaaaatataatagggttcagtttttgaataataagcataccagaacagtcagagatggtacaaaatatgaatgtatatatattcagcggaaggaacactgcccagaattgaagggcaacgtcaacatcttttaaaagtacccataaaatgtgacttggcaacaatcctgaacagaaaaaagaattcttctcttttcctgtgtgactaaagctccatgaggtgggatggagtctattgtgtttttgatgtctatcttatttgttgttatactccagaacctgattcagtgcttggcatagtatcaggcacacagtaggatttcctgtaagttaccctacaagaaggaatgaaggggatcactaaagacatgactatgactttgaaaaagagacggaattgggagagtcagactaagccatggtgaatgaaatttacctggccaagctaactttgccttttggtgaaaattgcttctccttcgctggagtttagaacagtctcattgatcttcaaagacttggaaagatctttacaggatatcccttggcttaaaaagacaaagaaaaagaggcctttgagagggcaatgtattatagcaattttaaatcaggtgataaattagattcattatgagactagcatgtgacatatcaaaagggtttctgacaggctaatgaaaactgctatgcatcttaattccatttgaagggagtttacatagtttactgaacaagtaggagaggtcaccaagaggaaataaattaaagcaggtctgttttataaaataacagtattaggccgggtgcactggcttacaccttgggaggccgaggcgggcagataacttgaggccaggacttcgagaccagcctggccaacatggcgaaacatcatctctactaaaaatataaaaattagccgggcatggtggcacatgcctgtaatcccagctactcgggaggccgaggcacgagaatcgcttgaacctgggaggtggaggttgtaatgagctgagattgcaccactgcactccagcctgggcaacagaatgagactctctctcaaaacaaaacaaaacaaaaaaacagtattaaacacatgaaatagtaaggaacaattggttatcttctggtctagtttaaaaggaaataaaactttgctggtcaaaccacgcaaatgattccaggaaggaagcacatcagtaaatataacattaaaggtaagtggaaggtgatatgaatacatcaactaaagactaaatgtaaagcaaaatgttactcttattaaaagaaatcacctatctgctcactttcggacacgtagtaaaattcaagagatataaatagagtgaaaagttaaggaaataaaatccattatgtaaggactacttttatggtatcatataagtaatttcatagcattaagcattaaaatagataaacagggttactgcaaatgacaaaagattcattaaaaaacaaatatctgatcatcccacataaaaagacatgaagaattaggaacataatgaaaggatgttgaaggttcttcaagtataaaattagctggtgcttgccaaattttggaaggttaaaatatttagagaatacatagttctaatgttttaagtaaagtctgtgggaatggggaagtgctcatcaggtgctgaggactgggtggtgtgtgcagtgggaatggtgggtgggactgaccagttccttggggagcccccaggggcctttcctacacacctgctccctggatctacagaagtgctcactcatggaagctatggggataaaatccttcctgctaatgagatgagaaggttgattaactttgagttgggcttagtgagtctgacaccagtggctgcccaaggggagtctgctggtgggaatttacaagagcagcttcgggcctctcatatggatggaaagaggatgtaaaggttactgaggagaaggtgtatttttgttatatattattaagctttcatgttatttaaattattcgataacagagctgggtatggtggctcatgcctgtaattccagctactccggaggctgagacaggaggatcgcttgaggccaggagtggagaccagcctgtgcaacatagcaagacccccatctctaaaaataaaattcaaaataattattagaaaacattttcctggttgaatatagtgtattttctcttttaagattttacaatatggattgtgtagagctttgctactcttagtgtggttgacagaccaacagcatcagcatcacctgaatcagaatctgcattttaacaagatccccaagtgatacatgtgcatattaaagtttgagaggcattgatgtggtgattaagaatacaggctttagagtgagtcagtctgggttcagattccagttccttgccttgaccttggctaggtttcttaaactttttaaatccatcacatcttcgtctgttaataggtataataatggtccttaccatgtagaaatattttaaataagataatgcatgcaaaacacttaactttatttttatttattttatttattttttttgagacggagtcttgctctgtttcccaggctgggtgcagtggtgcaatctcggctcactgcaagctctgcctcccgggttcacaccattctcctgcctcagcctcctgagtagctgggactacaggcgcccgccactacgcccggctaattttttgtattttcagtagagatggggtttcaccacgttagccaggatgatctcgatctcctgacctcgtgatccgcctgtctcggcctcccaaagtgctgggattacccaaagtgctgggattacaggcgtgagacactgcacctggccacactttatttataattgctcactaaatgttattgattagtaataggtttattataaaaacttggacaaaaggtagaaacacataacatacagtctaccacctaaagatttttaacacattggtttatttatttatattgattttagatagttttgatcatacgtggaatataatttcatgtcctgcttttttcacttctgaatatagcatagacgttttcccatgttacactaatctacgagtacaagaagtctcccatcacagaatgctgggtgtattctttgatgttggctgtaaaaatcatctgacccacccaagccagcaacatgctgcctcacagcttatatccttgtctatatgtaggagatgacattacctggcccctctgcttttacatgatggtcatgagaatccagttggaatcgtgtaggatgtaaaaacagctagtaaaaagtaaaatgagctgggtgcggtggctcatgcctgttatcccagcactttgggaggctgaggcaggtggatcacctgagctcaggagtttgggctgggcagcctgggcaacatggcgaaacctcgtcactactaaaaatacaaaaattagccgggcacagtggtgtgcatctatagtctcaggtaggaggctgagacagaagaatcgcttgaacccaggagacggaggttgcatggagctgagatcgtgccattgcgctccagcctgggtgacagagtgagaccttatctcaaaaaaaaaaaaaaaaaaaagaaaagaaaagaaaaaaatacaatgccgtacacatctgtgttattttaagtgggtgattctaatatgtaggaaatccctaaaaacagaaattacccgttgactccacaattccacttctagcactttaactcagtgaaatagtttgcaatgtgtacaaaagtttggcaatgaggatacctgtgtttgtggcagtatcatttatagtggtgaaacactggagactaacaaaatgctcactagtaggggagagttatcgtgccagtatactaaaatactatgcagacattaagaaggatgtcactgacctgtgttctccagtaaggtggccactagccacctggggctactgaaatttaaattagttaagtttaaatacaatgtaaaaattcagtttctcagtcacacccagcctatttcagatgctcaatagtcccatgtggctgatgggattggatagcacagacacagagcatttctgtcattgaggaaagttctaatggacagtgttactgtagaataattcttccacggaaagaaaattcttacgaaacagatgattcaaatttgtagtgtgtatgtgtgtgaggtacaaattgccccatggtgcttggtgcccagcacttcatttctttattttcttctgttcagtccaatctggccgtagtagtccccactcactaaaagctagagatctgatgtcagtcacctcgaagaattgacctttggtgtaggtcaattcttgagggccctccttttcctgtaggctctctcaggactcctgggtgcctggtctgatcattggtgttactattgcattttgttccaaagcctgttgttgcccagccttggatcttcttttcttccaatttcttcagtccaccttttcccatcaattaactaccccctacattttacagcagtgatattcaagggttggggaagaggaagccactcttcctctccctcattgagatcgatgggagagtgttacctagggggtggaaaaaagactgaaaaccatactacatgagtacaaggtgacaaccaccccagaccttgattcacgtgtgcagacgtgcgctgctctcgtctagattgcagaccctcctggaaactttgcaagaaggctctgtggtcactggaccctccatcccctgcccctcccagcagcattgggcctccaggctcccaggccttgccacacgggtgaactgatacaaatcaagatggtgtcggtaccatagtgatccctgtttcttgctggcttttttagcacatgattctggtcagcctgatggagaaggaacgccgtctcccagctcgcaacttttcccacagctcagcgcagccgtatggattgtgtgctcttgtttgctgtctggtctcactattaattaaggatatgactgtgtttgcagacagtttatcagagaaagcttcctgttcaccctctgaaacctggctagtgaatctcctattctagaaaagtgtcctcccatcttcaactcccaatcagagaattaatctctgacttcttaatggctgcctgtaacttgtatttgttcgtgtagaacttaacacacagtattgcagtttatttatgcttgttctctatacttgaatgtttattaagcctagatgattataagattaacttgggtgctttaaaatatatttttaattactttaaattattgaatcttccgaatagcgtaaaagatctgagaacagtataacaaacagtagtgtacctatcatatagatttatcagatttttaatatatgtcattataattcaggctttcctcttaaaagaaaaatgtggctaggtgtggtggctcatacctataatcttagcactttgggaggctgaggctggtggatcacttgaggccaggagttcgcgaccagcctggctcacatggtgaaaccccatctctactaaaaatatacagaaaaaaaattagccgggcatggtagggtacacctgtggtccctgtagctacttgggaggctgaggcatgagaattgcttgaacccagaaggctgaggttgctgtgagctaagatctcaccattctactccagctttggtgacagagtgagactccatcccccgccaaaaaaagaaaaatgtattacagatagagtcaaagactttgcctcatcccattactctctcttggcccagaggtcatcactatccccaaattggcatatatcctttctgtccctgtttttagtcttttgctactgatgtgcacttacatcccttgcataggattttaaagtgtgcttaggtggctatcaaatggcctacgcttctgcagctggcttttttcatttacctttataattttgagttccatcccatttataattttgagttctatccacattgccacatacagatacagtttattttagctgcggtagaatatcctattatatgaatatactacactttgctcattcatctcttaaaaggatatttagattattactatgactagccacactgcagtgaaaatttttgtgcataatagcaggactttctctataataatatccttgaagtagaattgctgatcaaaggatttgcacgttttcaacctgagtagatattgccaacttctctataaaatggtcctgcccatttatcctctcattagtggtttatgagagcatctgtttctccacttttcttccaacatttggaatttagagtttttaatttgtttctccaaggtgcaaggtggtgacttgctgtgttttgttttgttttgtttgtttatttttgagacagagtctcgctctgtcgcccaggctggagtgcagtggcgcgatctcggctcactgcaaccccccgcctgttgggttcaagcagttctctgcctcagccaccttagtagctgggattataggcttgtgttcccacatctggctaatttttgtatttttagtagagacggagtctcaccatgttggccaggctggtcttgaactcctgacctcatgatccgcccgcctcgcctcccaaagtgctgggattacaggcgtgagccaccgtgcccggcctgctttggttttaatttgcctgcccctgatgactggtcaggggagtggtgggctgtggccaggcctgttccctcatctcccgctgaggtggataatggatggggaaccccaaggccattcatgacaggcagttaagaggcggttgttctactgttggcatggcatgaacgtccaggccccagctctggaccgtaggactgggtgataaggtctcattctgctggagatcagaatgtttcccaattgtgtggattctggtgcccccgtggctcagcgtatagaaggcagtgagcgtcagccatgtgctcctcctccctggagggtgtctcattctgtgatgctgggaccattcatccagggtgcactgctgcaagaagataagcaaagcagtggtgagcccttttctaggctccgcttccactggaggtgtgggagagtgatggttcagaaggcaggctcttgaaccaaacagtctgaggtcagatcctggctgcgtgaccttacttaggccagttacagagctgctctgcctcagtgtgttctttacctgtaaaaggaggataaggttaatagcagcctcacagcattcttggggagagtagacaagatcatgaatgcaggttgcttagcccatgctggcatttcaggagcactcaccacatgcttaccaatccatgccgagactagggttgagggctgggagtgtcatttatctcaaacccccagtgcctagcttgttgaataaatgaatgagtttctacttagtgacttctcagttgtgctttggtttgtacagcaggctatgtaaagcttttgcattttactctaacaacaatgagaatattaaaatttttttaaaatttaaaatttttgtgtgtacagagtaggtgcatatttacggggtacatgagatgttttgatacaggcatgcagtgtttcataatcacatcatggagaatggggtatccattccctcaagcatttatcctttgtgttacaaacgatccaattatactcttttagttattttaaaatgtacaatgaggatattttaagccagggatgactgtgatcctgtttgtggtcttaaaaccgagatgaggactcttgatcctcctgaaaatttcagtcctgaaatttctggtcactaatcatgaactagaaattagactttggtgactcctcattttcacattttcacttaaaaaatttattatttgcattttttccccctccttgaaatgttcttccctctgtcttcttggtctttttgaaatacatttaaatagcctttttccttttttgttgattctaaaatcctcacgtttttggagtttgaacttgagcttgtctccaagttctaggggtattctctttcatgacctaggacatagtgcagggtcagtgctaagtgagattctggaagcagagtcttcagaattccaggtatattttagttttgctgctggttcaaacggctcatctcagtctcgttttgcctctacagaaagtacctttttcttcctgaattttgggtggaagagggtatacccaccctctggggccgtcatcaggactaagtggctgatgatcattttccatatgttggttccacactgacttcaaaagggtatgaacagcttgcgtctgggaggctcattaagtttcctgggctctctggaccacctccagtttaatgagttcatacagtggactaaagagcctcaaagattatgaaatagaaatgccctttctctaagcatatttaggggaggacacactgactgttccctttcctgtttaaatatgttatatttgtttgcgagatggaagaggaaagtagaatgaaaagaaattaaaatctctgtagacttgagctatttgcatacataggacaccatgaaaaggacatttagtggattcagaactcaacgtgggtggggaacgaaacagagggtaaaaagactggctttgcaaaataaataacagtgtcacttggaagtggtgatctgagtgaagatatggaaataatgtggtaaagactaaaccagaagtagatataccagaagaagacataatcaaaacaacacagagatcagaactacagagatgtagatgttaatgggagaacaaagtagagttatatggtgacagtcagtcacaactgtggagggaggaaggccaggccacaaggacgatggatttaaatgccattttattaaaattttaattactgtccacttgcattgcctgagattttgggatgaacatatttgtgtctgtgcatgtatgaaaccaaccaacggtcccatagatagtttttttgggtaaacatagaaattgacccttctggtcttaaagcttgaaacttacatttttttaatatgtgttccttccttaggaaatgatcttcaggcctcttaaaaaaaatatcaaagaactgaaactcaccagatcaccacattctgacagttagatgtcagaacccctcattcattacaattgtttccttgcctctcccagttctgtgtgtgtgtgtgtttttttttttttaacacgttgttacatttcttccctaaaacctctagttttagttattcagggagactgatttaagactgagtctcctcggctttgccacccgattaaagccttcttccttggcaataatcatcatctcagccattggctttctttgcggaaaacagcaggatgtagacccaacttgtggtatttctgtaacatatatacccacatgtaaacactactgttcttcgtcctgggaagaaattcaacattggccataagaagtctccactctgtatgtgcttaccatctatttttaaatgacctgtttggtattattgtcactggctttttaaaacaattgcttattgttcgcttacttgtaaatcaatatagtaggtatggttggatatgcagaactttcccctgaccttaagtaatgaagaatttatgaaaagagggaaaacgtgcacgtgggtctctgagtaaggtgttgtatagtaatgtggtgagtggcacaagagtgatatagacctaatgttgctggagttagaggaggtccccatttcttccggccatgatgaataaacaaggattgggaaggcagtccttgatgtgatggaattccaggatggcgtgggctgggtcccagaggagagaaactatgcagtgtatttgggaagccataagtattacaagtttgctggagtcttgagcaatggaagataaaactagaaagagggcattgtctactaggaacactcctactactaaccatgttcccaattatttggtgcttactgtgtcccaggctctggggaaagtgctttacccactggatttttttgaatcccctcaagatccctatgaggtcaagactgtcatgatcgtgatttgacccagtaggagactgagtttcagagaaattgaacaacttgctgggacttgggtgagagcgaggttgtgtgagtcctgggcttttccagccccacagtcttgctttggtagatggggtagtgatgaggccacagagacccagcttagaacttggggtttgggctttgggacataggcactgggaaggctttcccttgctcagggctctgtttggaaagcctggagttagcctctactttggaggctgtcgtctgtctgagtgtaaccagggcctggtctaggctgtcagatgcaggctagagggaagaaggcccagatttggacaccattgagggaatggtttcacttgaatggtgagagtagaagctgggtttgtaaattagggttgagcctgggtgtggtggctcatgcctgtaatcctagcacttggggaggctgaggtgggaggatcacttgagccctggcgttcaagaccagcttgggcaacatggtgaaaccctgtctatacaaaaaatacaaaaattaggttggacatgctggtgcacacctgtagtgcctgctactcagaagcttgaggtaggaagataacttgaacccaggaagtttgaggctgcagtgagctgtgattatgccaccacacttcagcctgggcaacagagcaagactgtctccaaaaaaaaaaaaaatagtgttgagaagagttgagctggggcggaagtggaggcagccaactgaaactgattagtataataaacacaattcccaggcttggatattatggaccagtaaagtaatgaaaaaaaagaaaaaaacaaaagcttgggctcttgatgttgagtcacccgcttttatttgatcagatgagaataatgaaaaccaaatcactctctaattatccaatcattattttctaaaataaattatgttttaatacaaaaatgttgtaatggctcatcagaatgaaggatggtcctgtaagtggaataagtttaattctaagaagagcttgctgcaattgtgccttcattttctacttttgttgctaacctgtgaaccctttttcacggaccagggtgttcttgtaacacacatttgggaactgctggtagagactattctgttcagaggcttgactggaagagaggaggctccaaggctgtggctgggggccatgggagggtgtaggtaatttgttttcaggtatgtgggtatttagggtttcaggaagagttttctaaagcaggaagtcctcactatgtgccgagaaactggggaggcctttgtgaagataggaatgggtaaaaaattctggagagaggagggaggaaaccaaagagagatgggggaataagatttatttagcatctgccaggcgtatgttaggagagaggtctgtctcatttaatgctcttaaatagtctttggggtcagagacacactattttttttaaagaatagtgtgagggtttattcaatttaaaaaattcgctttttaaaatcaggaaaagaagaaaatccaacagtaaaaaaagccattaatcattaacaggttgcattcattaagatgacacaaacaatttatcaaatacctttatgaccaacattattttatagcagatcctgactgttattaacttttggatctgtgaatctgggccctactgccaaggcatgttactactgacctactgaattctcttacccttttatcacgtaaaatgttctctaacgtaaatttttcattctttgttagtgacggtatgacaaagaagagtactctacctgtaatttgtctttcgacaagataaaatgctttatttaaaaatgcaggctgggcgcagtggctgacacctgtagtcccagcactttgggaggccgaggtgggtggatcagaggtcaggagtttgagaccagcctggccaatatggtgaaaccccatctctactaaaaatataaaagttagccagacgtggtggtatgcacctgtagtcccagctcctcgggagactgaggcagaagaatctcttgaacccgggaggcggaggttgcagtgagctgagatcgcaccactgcactccagcctgggtgacagagtgagactccgtcccaaaaaacaaaaagcaaaaatgcagtattcttttcctttaaaaatgtgtacataaaaaggatttggataaagtatgatgaaataataggaaacaaggccaaattctgataaaataaagggaaattggtgaggcttggaacatcaaaccagtcagaacgtggccacaagagggacagggcaagtagatggagaacagccatgtcaagttttccttgaaccttctccatccagcgtttttgttctgcaattaaacaaccagctcagagatgtccaagttatatacagtcttacttttacccacctcatgtaatggtgaagccatttatttagtaaatacaatatcagaaagggtatatatattaggagacccacttccacaaaggggttgggaactctttttcagaaatagcatcatataacctgggaagtactgtggaaatccaggcacattttcttgtaaactgttacttgaattcaaaaccaaattctattcctttctatgtacagcgaatccctgggatccttggtagggcaacctcctaatccataaggccaagcaagggctgtttcctgttttcttcctttagttcagaggctcatgctgtcctgaggtaaagcttgaagaccttgcactctttcctcctaccaggcatttggtgttttctgatcccgtgtggtcccaaagacccgagggtcaccatgatggaagtctccctgcagggactgggcctgctgggcttcccttagttccctttccagtgcagctgtcttggacttttccaaattcagctgctgctagagctcttctgctttccccagggagggccagggccaatttctgaccagagctgctgcagaaggtctctctcctggatcagggtggatcatgtgcttgagcagactgtaaaagtcttctgagagctcctgaggaatgtctgggaagttactctcatggttatggtgccttgcagcactgttgatgggtaatgtccttactccttcagccattgcagtgattaatcccaaggcaaataggtctgctttgggaaggtactaataatcctcttgcaaaatctcatttgctaggcagcaactatctgctttttccactttgagtttgcttattgatgtcacatggcctaggtcaccaattttatatatcacatgggcagagagaaactaatcagcttcattttcaacttctgtgactccagaggagtcactttgcatcttgtgacaaaggaaggttttacaaggtttcatgtccgggtgcaccatgccagagttgtggctgtatttaagttcaagggaaatctgtagaaggatgtccttgagttttggctcttggaagtgattagtagacttagtgttttcagatatagcagcctgcaagctcctgccattgcagtatccattctgaatgatcatatggttatcttctgcctgtaaggggtagtaatgtaccaggtggggtgatgtccaaacactgtatgagcataaacttcacgcaaagccaaattctcaggtgaaatcctgaaaaagttttcatatagtgctttattgcataaacacttctatccaggcttttaatgcacttgtagactgtaccaaattcaccaaccccaattttttctacctccgagcattcttttttatagtaggaagccatgttggtttctcatagaacacatgtctcagcaggcagcccttgttcttccttgccttcctctggaccagcttcctcaagatcatctcgaattttcctcttgacactggattgaaggaataattttctataggactttggggtgaagggattagtattgaccagagccagtgaggtcatctcatccttgggaggagtggatgtgagcatcaaatgcttagagcctctggaaggaggctttgctgttggagaaataacgtctggctcagcgggcttttgggagtagaggggctggcaccatgtggctgcttgttcctgttgcctggttggcctggtgtctcaggatatttgagaaggtgtgacactggagtcctcaaaatctgatctggatcttctttttctttttcccgaggtgtgttgagttcatgcacgttactgagaggagtcctgggcaatgtaagcattgcctctgaattctgcacttcactcttctctgggatctggctctgggcctccctgcttccctgtgctttcttttgccctacattctgagtctcttcttccaaacaggaaaagcttaatttctcagttttaatgttttaatttaatttatgtttaatgcctcagttttttgttaatatttctgtcatccatctcagccaaagagctttacaacataggcaagatctattgcaagagaacaccgtgattctgcagaaagaggagaaaattatttaacctggcaggtttcacaactctagcctgcctttccctctaccagctaacatctagctgtttcagatggttaaattcctcacgtgtggcctcatcatttggtaactggcagatgggactctgtcgtctacagatctgtttacgaacagccctttcctaagtgcatatggtgtgcgtaccaagtccccggctcagagtcacgattttatacacaggttccagccgtggaatccacatgcctcagactggggggcacttccccctcaggacaccgaagctcagagagaggaaagaaatccctaatattccagatgcagccaggatttcaacccaggcctctgtcttctcggtcgaggtccttctcacttcatgtccatggaggcttctctgctcacgctggtgtgaaccccaaggggcttcccctgaaaactcataatagaatctttgaacagctgcccaagaacagatttcagattttcagccattttcctcttttaatggaagctctgactggctagttggttaatgggtcccaggttctcccaagccacttaacttcctaattttcaagcattatccatggagaaaatccactctgcagaagcttatgacttaatgagctcagtcaaagtcaatctgaagttgcaggcagcagctttgatcattgtgataggcgttttggtttccaccgagcagagaatgggaaaaagctttgcccatgatttattaatcacttccttggctgagctttcttgcctggctctcctgggaagcaccagtgttgaggttgctcagggttcagcctcagcatgggctttaggtgtccataggccccgtgttgccttgtttctggaaggctttgctgagctggaatgcagccagatgttggaaccagaggtgcacaccttgagtaaactcctctctgctttcaagcagcccttgaggccccttattggcagaaccagctcctccagggaggaggcatgtggggcccacgtgcatgcgtggagtttttttcagagacccactgataaaatatttacttcagtgacatggtaccaagtcctgctttgtttattttaaaagtcttaatacagcattagccatgaggataccggcttatttgcttttggtttcttgcttgtggtttttgtttttatgaggagcaaagaagctaggcctgatcttctgggaaagtagcctgctgtatgttagccacacactggaagaggaaaactgttctgtgtggagtgcttactgtgtgctccgggtactgtccttagtgcttttaggtcattatttaatcctctcacaatcattcaagtaggtgtcacaggttaaattgtgtcccctgaaaaggtacactgaagccctaaaacctggtacttgtgaatgcaaaccaatttgcaaatggggtcttgacatatgtaattcgttaagacacagttctgttggactggagtgggccctaattcccatgactggtgtctttgtaataagagggggtacacagacactcacagagggaagatggccttgtgaagacagaggcagacactggagcatgtaggtgcagggcaaggaatgccaaggattgccagcaacctccagaagccaggcaaggaaggattctgccctggagttttcagaggaagcatggccctgccgacaccttgaacttctagcctctagaattgtgaaagaacatatttttgttgttttaagccactcagttcgtggcaattaattacagcagcccttggaattagtatagttagaactacttagaagaatattaaccccattttatagatgagtacatcaaggctgagaggtgttaagcatcttgccccaggtcactcagttcataagtggagacagacaaatcaggtcttgcataatgccgctgccaagtccatgcattcattttcatgatggagccagcaaggtggtaactttctaatgctgggtatctaggacatcttaatgagcagtttagtctcaaagggagattgcccagttgcagtttagatctgcttctaatcctggatttggccagaagattccttgattgactctgggggaacctttacctttatagagaggatacaggcctggtattttctgtccaggggatctaagcatggggtggagtatgccatctctccctggtgctcagccaggcctgtgggtcatcaaggacccagcccattctgcagagagtttagacagcttgcccaaagtctatctgtagttggaagaagcatgactggaagggagataatgaaagggtgccatttcttcctgatctctctaattctgcctgtacccttacccccatctgaactcccacccctgcctacactacccttccatctgggagagagaatagtaggcaggggtcatgttttggaaaggatattatttcaagggcgttgggaccccagtgaaagattttattgaggggagtgacatgacctgttggacactgtggtgggctgatttgcatccccaaaactcatatgttgagccctaaccctcagtacctcagaaggtgactgtatttggagatagggcctttaaagagataattaagttacctgttaggctgttaggataggctgtagcccagtttgacctatgtccttgtaagaggaggagttttagatacacagagaaacaccaggcatgcacatacacagaggaaggaccatgtgcagacacagtgagaaggtggtcatctgcaagccaaggagaattcttgagaagccaaacctgctgactccttgaacttggacttccagcctccagaactatgtctgtcattcaagcccctcggtcagtggcattttgtgatggcagtcccagggtacgaatatagaaccaaaaagatgaattgagcctcagggcggagaatggataggggagcaatattgtgggtattcagaacagccgggaactcacaggaaagaggaaggtggtgtggaccagggagatctacagaggtgggaggaagaggacagattacagaactgtgtaggagccttaaaactgattattgggatggggaaggagtggggaaagaatccaggaagatcccagtattctatctgaatggatggtggctccattcactggtttatgggaacactgaaggagctgccggtgtgggggaggagtcccagttgtcagtaagatgttctctggcaactggtttttgtatctggagctcagacaagagatctgggcagggatggggatttggaaagtactggcatctagatgaccactcagctgtgggtaccaatgaggaggaggagacgaaaacttgttaagcacaaaactctgtgaaaccccagagtttcacagaaaccagatcttaagggaaggcaccaccgtaggagaataagaaggggaatcaccagaccactgtgctgagaaactgagggaaagactgtttcaggatgacagttcaagacacgggccaggatttaggagttatcagcatggagatgttagggcgattcatcagtgagaatcttaaagggggaagagcagaggaccagagaaaccacaacagcttaaacttttttttttttaatcgtttgttttcaaattggtaatagatataatggtataaaattggaaagagaatttctcatccctgctgcttcactgcacagtttactggttacccattctccagcccagaggaaaccagccctcagattcttgtgtgctacttcagaggtagctgtttacgtgcaagaatgtatgtaggtaggtatgtctgagcagatagatagtctgaatttaatttctttgcagaaactgtagcataccatgcatcctattctacaaattatatgtatttattgatttgaattttattgtttgaaaaagaaatgcaatcgtatggttcaacatttaaaaggtataaaagaggtcaggcgcggtggctcacgcctgtaatcctaccactttgggagacccaggtggatggacttcctgagctcaggagtttgggaccagcctggggaacacagtgaaaccccgtctctactgaaaatacaaaaaaattagccaggcatggtggtgtgtgcctttaatcccagctacttgggaggctgagacaggagaatcacttgaacccgggaggcagaggttgcagtgagcctagattgcaccattgcactccagcctgggcaacagagcgagactccatctcaaaaaaaaaaaaaaaaaaaaagggagcacataatgaaagctgtccttttgacctgaccccagctgccctggtctcctccctggaggcacctcagttttgttttgttttgttttgttttgttttttttgattattgttgtcgttgtttacttactaaatatatttcagagatctctctttcagaatggaaagattccttattctgtgtgtatggttcatggtattctgttatatatgcactataaattatttcactctaagctcctattggtagacaggttgattcacatctttgctgtgacaaacaatgttacattggatagccttatgcatatgtcattctaaatacctgtagaaatggaattgttgagttgaagagtcaagggtgtttgtaggtgttttgtttgtttgttttgttttttttgaggtgtagtcttactctgtctcccaggcgggagtgcagtggtgtgtggcgtgatctctgctcactgcaacctcagcctcctgggttcaagctattcttctgccttagcctcccgaatagctgggactacaggtgcacgccaccacgcctggctaatttttgtatttttttttttagtagaagtgaggtttcgccatgttgcccaggctggtctccaactcctgaccttaggtgatatgcccacctcagcttcccagaatgctgggattacaggcgtgagtcaccgtgcccaatcacatttgtagttttgatagttactgccttgatgtcctctagagaggctgcaccagtatactccccaccagcactaaatgagggtgccatttttcccattgcttttcaatcaagtgtgttatcacacattttgatcctagtcagtgtctcattgtgtttctcactcttataatgaggaaacatctttccataagtgtaagaaccatgtgtagtttcatttctataaactgtttatagcctttgcttttttttccctattgagtaattaatctttttcttattgatttgtaggaactacttacatattacagaaattagccctctgtgatacaagttgcagatatattttctctcttaatcagatttattagtcttttctttcatagtttttggactttcacttaggaaggccttcctcactccaaaattacacattaaaagcatgttttctcttttgatgtatttttctatttaaatctttcctctacctggaatttatggttatatcatgtgagagtgagggatccagctttatttttttttttcaggggctacccagttgttcggatcatttgttgaacattcattcttgctcactgacttgacctctcttctgttgctgctgtgtaacaatattatcacaaactccatgttttaacacagcacacacttacttactatgtcacagtttctgcgggccaggagcctggatacagcttagctgggctctctgaaagcctgaaatcaaagtgtcagctgaagctgcagtcttatctgagactcgactggggaaggattcaattcttagctcaggttattagcaaaattcatttccttgcagacagccagattaaaggcctcattttcttgctggctgttgactggaggccagtctcagtttcttgtcatgtgggtcctccatacagtctcttgtttcatcaaatcagcaagaaagagaaggactccagcatgatgggagctgcaatacacacatctggtcaccttccatttatggattagaaggaagttgcaagtcctgtccacattcaggggaagaggatcacacaagggcatgatgccaagaggtgaagaccatggtggggccttaagagtccacctgccatcctaggtttattttactttaaatttctatgggtatatacctgcttctgtgaccccaccaacttttaaggagtgaagccagctgcaagaagtaaatgcaatggggctgagctcatctttcctgattccctggttaggtgtggagcctaactctgtccagttgtggacttcatttcgtaagaccctttggcagctcttcactggctgaacttgatacatatgctgcctgctgacttcatgtccataatccatgtctccaggctgtgataacctaggaactgcttgggtataggacaagcttactacctgtttccatacatttggccccgaaattctgtattttattagggattatgttcatattgttaaatactacttttctggccacaccactgcttcttggtgaaatcaagtgtgtcattgcaacttgaagatgttgtcctagtagtaatagcaaacagcagtaatagcaaagctgtggagtgtttgagttgctgatggattagtgccaatctctctccctgaagaacaagagcatgcagaacaggcatctggaagaaggatggaaattctggcagctgtgttctctgcattttcgttttccccacatttccttaagtcaattttgttacctacagttcctggccaaaataatgcttccatttcctttcccaaaagtcattatagattgattgacctgtagggggtagagaactcagactctaattaaaagatgatgggttaaaggaagttaaaaaccaaaacgaaataacaaacagtataggcactggagtgcaactggtgtaatctttggtactgagctttgtaggacagagaggtataggatgatgccgtgattcatgagagaaggttggagaatggaaccttcaaatgggctgagccagagagctgcccaggaacaggagggagcactggggattttttttttttttttttagaagaagggtgtgaagccaaaaagagttgtcagttgtgtttggatgtgctgatggtggtagagacttctgagaacaggtgagtagagcattgtgtgcccaggctcaggagaatgttcatatagaagataccctgggcaggttggggaatcagttgaagagagggaccctttttgatatcaggtaagaggagttgggctggtgaggggtggaggggtctcattttcctaggagtgtagggtgctgaaaggaaggatagggcctagttcctgaagcagaaatgtgatgatctcagagttggggaccacatggatggggtggggtgatgttggcaggaaacctgcctggtaattctttaaacttgttgtgaatgaatggcgtcatggtagaatttgaacttggaagtgtacacagttagatccttatgtcccttcataattaagacaggcatagttgtagggattagttctgtgagtccagctcttcctgagatgcagaggggtcatatcttggtgggaaaggagggtaggaggcaatatgggactttatggatgttggagctggaaagtttctccccaaaacaggtgatgagagttggctaggtggcctccgaaggagatcgtgtacaggagaggtatggaggcccaggggcaatggatgagggatgctttctggaaacacagacatagacacagtcaggaaggggatgctagtatttcctgtgtaccctcatttcctcccctcctgtgacagtgcatgaatttgacttcattcatcatgaaacttactatgttccaggcatcgtgttagtcacttgggggtactgagttgaataacacaaagtctcttctctaggagcttagtctggtgggggtggggaaggacactatgaggtgtctgagacgatgttggaatgaataagtcttccattttcaaaagagtctattttagttgaattttattatatcgcaaggtggacggtgatttaaggtgtgtgtttgtgtgtgtgtgcgtgtgtgtacacacatgtccatgcatgcatgtgtctgtgtttagctgtgttgctttggctttttatttatcttggagttctagaaatatgcatgcttacaacatatttacaaatgtggttttttgggtgttactgatttattgaaattcaagctcgaattcaataactcaccttattagaatgaaaactgcattgctcaggcatgtgttatgcctattgagtggctttcagagcctgctggaggtaggtaattcagggtggcatggtgctagctccatgctatcagggacccagctccccctcttacttggtattcctgtgctaagtacctcatggcccaagatgactgcttgaataccagccatgtcatctgaattccagttggaggaaggcagaaggcaccaagaaggatgggctccgtcttcttaaggatccttcctggaagtcacacactgaacttctgcttacatcccattggccaaaacgcagccacattttgttgcaaagaagactggagaatgtgcttaagtaaaatcaggagtctttttagtaattagaaaaggaaaacatataatggggccgggaggagtgtatgaaggggttcattatgaagggaagaggaccaaattccagaattttacttctgaaaacttcacagggctattttacagaaaatatgatcattctcccaagcagctttactagaggaataagaggtatcctgggagagtacaggtagggagaggcccaatgagacgcccgtcttaggtcctttcaagctgctataacaaaaaaccttagactgggtaatttatagacaatagaaattgatcactcacaattctctaggctgggaagtccaagatcaagtcaccagcagattccgtgtctggtgagggcgctctgcttcataggtggtcctcacatggtgggaggggaaaaaggccctttcaggcctctttcataaaggtgctaatcccattcatgacctaaccacctcctgaaggccccatctcttaacactattacattgggaattagatttaaacataagaattttggaggtacacagacgctcagaccatagcagtgccttcagatggtgggcttagggaaaacagatggtggtttcaaacctgagcccctacatcagtggtcaccgtggcagactccaggatgtggatatggatttataatagggctgcagcttcctgtgtgggttccatgggatatgctccagagtgaggcacagtggggatcttcttactgattgacaatggcttgtgattctcccaagtgatgcaaggtaagccagcttatttaaaataaccaggatgtctaattcacatttttaggaggaagggaagtaacactgaaggctgtttcccattgcatcaaaggcaaaatccaaactgtagtcgtttgtgaatggaatccctgcctgtctccagcctcacactcactcgaggtgtgcctgcctgcagtgctgcactgctcccttcagccttcgtgcagggtcatccagggcagggcagcttcatccattctgtttgtgacattgtgtaacacgacccagtacggccatcagttaaatgtgtttgctgtcgtggtagctcttcttgatgtactaaactccttgattcaagatgggctgttcctcacacatctttgggaccccagctttgctttgcttgggacatgtgattctgacccagtaccccagacctgaaggcccctctatgtgtcagtcctgaaaggattcgctgttttcttagcctcatggtctctcctaagcaggaggcattgctttacctagagcagattattgagctggaaaagacagttaataggtaaattgatcaccagctgagtccaggatagtcagctcaatgaaacattaaaattttaaacacctgcattcagagttgtttctctaacattccaagtgcttcaggtcaggggaggaaagaggagttattttagcttaaattatgcttatcctctgaggggcacagctattactatatggtttccctgaacttgggctcattttggattttgctgaatggtttacacatttttcccttattagtgaataccagaatctcagatttgcaaaggattctttaataaggctgttcgttctcagccatttgctttcatatttgagttgtttttctttccacacattgaataatgctccactccggatctgaggtgtctgcctagagtgttgctttcataaacatggtgaggaaagacaagaagaagcagacccaatctgtggaaactagcctggttgataattcaggtggtgggcaccaggaaacaggcatgtggtttttcctttgggtaccctccagccgagtagggcccgggctcctagatgggacagtgctgcattagagtttggtcacaggcttgactaggtggaagagctttctgagagttgtgtgcaaaaaaacacttagctgccgttccatatttgcttgcttgatccccttggctgctttgggactcatccaacctatgacctctctgaacttggaaaatgaagttgcagttttggccacaggatatttattgatggtggaagggtgtggaagtctctgagttgcagttgtgttgtagtatgatagagttttccttcctgaggttgaccatggcttagtccttgctatacagggtagtgtgaggattggatttctcaggttagcggagctttagacgagcgttgagactgtctgtctcagagcctctgatccatttgttttaggttgttggagtttatttgcctcttctgaagacattgggagaagccaagttaaaatcgagttaggttagttcctaggtaccatacttgaaagagaatttataagatatactgagccttgttgctccgtgttgagagatgtggtggttgatgtacctgggacaaggttgttgagccagtggcattctcctggggagggctctcctggtctcccgatttcagccaggctcacaactattctactggatatatcctcttccctttaattggccaattgtttatcaatgcggagcatcatcaagaatgttagagaaggcctgatgtctctttgctagaaatatctaaaccggctgtttaagtgttcttgtctttaaaataacaatgtgatggaaattatttaaaaatgaagccttttaattgagccttaatctccagagaagtatttttatgagatttataatgtgtttagtagctctctaatgagttcatcagtttgcataatgctgattatccaggcaattcaaagtaatttacagctatatcttcattactatgtggtagatattatccccattttattgctggggaaattgaggcttcatatagtgaaataaatgacccatggacagtcaaaccacagaaaagaattactgtgctggcattttccccttccttgataccattggctttattgggatgggcgttatacggcttattggctcctgttagggaaccgatccactggtagattagttagttggtttgagttactccttttgaaaatgaggtttctgtttctgtttatatatataaaatggaaattctagttcatttagctcccctactgtgaaggttaatgagtgtatgtgaactttgttaaagtttgggagaatgacactatgagaaatattattttattaatgagaaacttggattctgctcctgggccttgtgaaagtattttctggttttccaaatgcgaacaggtgctgataaatccttttctactcactccctgcccaacccagctgaagacttcttttataatattctccccgctagccagatgttttgaaatagcaaaattattaaataataatttgtattgttaaaacatgaatgaaatacagatatagctatgagagtttctacttagaggtcgttcttgttgccttgcagatgtgttttgatttcagccaagaacaaagatatttgatatgtcaattgcccagtgtttaggaaaaaggataattttggttactgcttttgaactagtggtgggaaccttggaaatcccccacagtctggggaccccagtttagaagctattattggggaccctcgggccactgctgaccccaggggaggcaagacttcctcgtttggattttggttttcagattggttgggggaaatctcacatacgggaagaagaagaaaaacaaatataagtaagtttccctttggggccatggtccacttacagctgtgacttggacctttcacttctatttcctaaatgctcacgtcattaggccatacttttgggaaacgtgagggcagtgggcagcgggcgggggttgggggtgggggggctgagtcagagggagggagggttttgtggtgacaaccagaactctgcaggcagagtaacttgggactataactttgctgtctgtttctcagctatgtgaccttggccatgtcacttaaccttcctggtctcagtgtcttcatttgcaaaatggaggcaataacgacctcagtgggtggctgtggggattaagtgggttaaggtttgtgaaaaacaaacaagaacaatgggggtgtccttggctgttagtattaagaacagaaaaataactcatgaatatctcagattctgatagctggtgcacacgctgatgaaaagatttgttttcagatcctcagatttttttaggagtacacttctttaatgttcatttagatggtcctgatgctgtgaccttctctttctctttagaaaaggaagtcgatttcagtagggccttctccttgcctgcagtttgccaaagtcgcattggcaggatagacttggaaatgcaagggtgcttggcatctcccatcaagttggcatttccctggctttagctttcgacaggaaccagctgtagccctgctcagcacaggctgagaacacactgtgggggtgagcgtttgggtgcttgaggcatgcttttgttgcatgttagaaaagctgtattttctgcttttggttcttccactgaaaactaaaggacgattccttcttacttggccgtgtagcctgggagtcggagctctttgggccttccatcaccagtgttgtttcctcggctgttctgggttgcagcagttagtcctacgttcagggccaagttgtgtgcctgcactcaggaacaggcactatattattaaatagttttctggagtgggtgtaacaaagtagcaagaccgagtggcttaaacaacagaaatttattgtctcacagttctggaggccagaagttctacatcaaagtgtctgcagggtttgttccatttgcaggtggtgagggagaatctgttccgtgcctttccctagctccccgtggctttctggcactctttgtcgttccttgggcagcattcccttggtctctgccttcgtcgtgacattatgttctctgtgtgtctccacatcactctctctctgtacaggtctgtctctgtgtacaaatatcccctctttatgaggacgccagtcatgttggattaggacccaccttaatgaccccattttaactcgatcacttctgtaaagatcctgtctccaaatatggccacattctgagttaactggaggttaggactccggcatactgtttttgggggacacatttcaacccataactaatatgtgctaatttgcacaaagtagcctactcatgaagccatggacttactgtgcatgcccagaaggtgtgccttttaaaaatccactcaagggcatgtctgggtagctgccacttgccccacagtctgtcatcccccttcctctcttcccatgcatgttgttgtgcagcttgaagacagctcagctctctctaaggtggccttttcttctgaattcattatacccatgtgcattccattcctttcccaaggccactgcttgtgacatttcttgtgtctgtgtttaggcctgtttgctgctttttttttttttttttttttttgagacggagtcttgctctgtcgtccaagctgcagtgcggtgtcgcaatctcaactcattacaacctctgcttcccagattcaagtgattctcctgcctcagcctcccgagttgctgggactacaggtgtgcaccaccatgcctggctaatttttgtattttcagtagaggcagggttttaccatgttggccaggctggtcttgaactcctgacctcaagtgatctacccgccttggcctcccaaggtgttgggattacaggcgtgagccaccgctcctggccagttgctgcttttgaactaatcctgggaacttgcttgattattaaatatatttgagccttatttccttacctccgtcatacacacattgaagataaggatcatatatcaaccctatattgggtgtatagattaaataaaagataccatcaaaattaattttacctgttcctttttacctgtttgtaatgtggctactagaaacattttaattacatatgtggcttgcattatatttctggtcactgctctctccccgtatccatataacaaaccgcatggacctgtttgggctatgaggctagattgaaggtttggaaggaggttggcatgcagtgctctcactggctggcttaccgttcagatggcaacacctagacccctgtaggggggtgtgtggcggtcaaggtatgtgcactcagaacttgtgaatctgaccttatttggaaaaagggtaattaagttaaggatttttatttatttatttatttgttttttagacagagtcttgctctgtcacccaggctggagtgtagtggtgcgatctcagctcactgcaacctctgcctcctaggttcaagtgattctcctgcctcggcctcctgagtagctgggattacaggtgcacgccaggctaattcttttgtatttttagtagacacggggtttcaccacgttggccaggctggcctcgaactcctgacctcaagtgatccgcctgcctcggcctcccaaagtgctgggattacaggcgtgagccactgtgcctggccaagttaagatcttgagaagaggtcatgctggattatctaaagccaatgacaaatgtccttataagaagaaaaagtttgctaatgatgaaggattttttctgcttgttgagaaatctgatgtcttcttggtgctcattaagtacttgttgaaatagattgctccatttttgggaaaacagcatgacatactgatttacctagagattttgggttcccagcaaacattttagaaagggccctcacactactaattgcaaaataaacatcttcagcctcatgtgcagctgacttatttggccagtgtttatgtttatggggaagagaaggaacatttgttgaccgcccacaatgcattaggcattttttttttcataattacttctgttaatcctcatgctaggcctgtgaagtggtttattgccctggtttatagagaagggatctgggtctcagagaggtcaactgatttgtccaaggacagacagatggagagctgggagtcccacagtctaagccactttcagcagcaagtgacttttcagcaaggaaatctttacatcaaagctaatgtgtgaaacaggtcatctgtaccgctttggttagatgggagtcgggtggggtgagctctttggttctgtgtcccttcaccaagattctcaccaagcaggctctggggctgcagagcacatttaaacttcattgttctttttgtttgtttgtttgtgagatggagtttcgctcttgttgcccaggctggagtgcaatgatgtgatcttggctcaccgcagcctccgccttccggggtcaagcgattctcctgcctcagcctcccgagtagctgggattacaggcatgcatcaccacgcctggctaatttgtatttttagtagagacggggtttctccatgttggtcaggctggtctcaaactcctgacctcaggtgatctgcccgccttggcctcccaaagcactgggattacaggcgtgagccaccgcatcctgcctgttctttttttttttttttttttccctgagacagggtcccactatgtgcagtggcatgaacatagctcactgcagcctcgaactcctgggctcaagcgattctcccacctcagcctcccaagtagcagggaactactcgtgcatgccatcatgccaggctcactttttatttacagtttttgtagagatgagctcttcctttgttgcccaggctgatctcgaactcctggcttcacgcaattcactcacctttgttccctgaagtgctgggattatgggcatcagccaacatgtcagatccattattgttcttgacttggtgcttcctgtacccttccactgtctggttctgtggattccctattgcatgtctctcttggagttagtaaatctctagcattttgagcttttccttttagacaagttaggaaatggagtagactcggggagaggatatttttgcagattccgtaaggtggtcttgctgagatggtgggactctctggccattgggatggtaggctgaaactctgccctggagccttttagtacctgggctctagtcagtctcttggtccctgagggaggcaaatgtgggagatactttggtgaattatatggtttggctgtgtccccacctaaatctcatcttgaattgtagctcccataatccctacgtgttgtgggagggatctggtgggaggtaactgaatcacgggggcaggtttttccaatgccattctcgtgatagtgaataataagtctcacaagatctgatggttttataaagagcagttcccctacacaggctctcttgcctgccaccatgtaagatgtgcctttgctcctccttcaccttccgccatgactgtgaggcctccccagccatgtggaactgtgagtccattaagcctttttttttttttaaataaattacccagtctcgggtatgtctttattagcaccgtgagaacagactaatacagtggagttcaatttatggtgtgtggaaggtgcaaaatctaggctgggttgtgcccaaggagagggcaggagacagtaccctgaggccagtctggacagatgagtatttgacgagagacttatgttgatgactttttgtgagaatgctgccgttgttcatgagagacattcatatcccaagcatttgttggatccaggaagatccagatccatctaggttaggggccacaaaaataagacaaaaatctctgcataaagggccattgggattgcaactggacagtggctgattatctctaggaagaggctgaattctgaaaacattttgtatatgcaatgccccggattggttaaaggagagataatttatttcgttttatttttgtgtctctttgatatagaagaaaagaaatgtgaacagaacttgtacaatatatggtaaattctctctaccagaatattgttgatgttcaggctccaagaattaatgtggttttatcttggaatttaacctgttatttattgtgatatgcttatgtaaggacatgtgttagataatgtgttagtcagggtaggagaggtctgtgctgtggtaacaaacttcctggaaagtttaacacatagaagcctatttttcacacaaaagcccctgcagattggatggcagtagtgggcgagggctctacctgtcttggtcactttctcctggctgattgagactccaccgtctgcaacattgccacagcaggagaagagattgcaggacctgttgttgccagctcctctgttcaccctaaaagtgatacatgtcccctttctgcacattccattgacccaaactagtcacgtggccctgcctaacctgggaaatgggaggactgtcagatgagtatcactctctgccacagatgatgcagagcacaccttttggtaattagttcattgaatctgagtaaaagctcaggcatgagtagtgttgggcccatttactagagaaaatgaagacttgagctcttcaaagtcaagggctgtatctctagatctctcacaccgggctgtctgcctcacacttttctcagcactcagcaaaggttagttgagttgaatgaatgaggcatttaaaatctgtttgagtattcgtctcattcacggggctgcttcacttagaattttgctaatgtagttgtctgcctaaagagaatattcatgcctcctgtggtggaggtgggtcaagtaccagctatgacacatttgtatatcttgttatgacacatttgtatatcttgctggcaagaaactactgaagtctgcatatttttagggatcatctttttaaagaataatttcaacttttgttttagatacaggggatacctgtgcaggtttgtaacatgagggtattgcaagatgctagggtttggggcatgattgatcccatcacccaggtagtgagcttagtacccaatacttagtttttcagcccttgccctgctcccttcctcctctgtctagcagtctccagtgtctgttgttgccatgtttatgtccatgaatacccaatatttagctctcacttataaatgagaacatacggtatttggttttctgttcctgcatgaattcacttaggataatggccaccagctgcatccatgttgctgcagaggacaagattttgttatttttatggctgtgtatgtagtagtccatggtgtatatgtaccatattttctttatcccatccattgttgatgggcacctagtttgattccatgtctttgctattgtgaatggtgctacgttgaacatacgagtgcatgtgtctttttggtggaatgatctattttcttttatatatatacctggtaatgagattgctgggtcagtcaaatggtaattttgttttaagctctttgagaaatctccaaactgcttttcacagtggctgaactagtttacattcccatcaactgtgtataagcgttccgtttgctccacagcctcaccagcatctgttgttttttgactttttaataatagtcattctgacgggtatgagatagtatctcattatggttttgatttgcatttctctaatgacatttttaaaaatatgtttcttggccacttgtatgccttcttttttgttcgtttgttttttgagacatggtctcactctgtcacccaggctggagtgcagtggcatggtcacaactcactgcagtctcaatctcgtcgggtcaagccatcctcccatcttagcctcccaattagctgggactacaggcatgcgccactatgcctgctaatttttaaattattttttgtagagatggggtctcactatgttgcccaggctggtcttgaactcctgggctcaagtgattctcccacctcaacctcccaaagtgctgagattacaggcatgagccagtgtgcctggctgtatgtcttcttttgagaagtggctgttcgtgtcttttgcccactttttaatgaggttatttgatttttgcttttcgaattaagttccttatggattctggatattagacatttgtgggatgcatagtttgtgaatattttctctcattctataggttgtttactctgttgatagtttcttttgctatgtagaagctccttagttaaattaggtcccacttgtcaattttttttttgtttttgagttggagtcttgctctatcacccaggctggagtgcagtggtgcgatcttggcccattgcaacctccacttcctgggttcaagcgattctcctgccccagcctcccaagtagctggctctacaggcacatgccaccatgccctactaattttttgtatttttagtagagttggggtttcactgtgtttgtcaggatgatctcggtctcctgacctcttgatctgctcacctcggcctcccaaagtgctgggattacaggcgtgagtcaccatgcctggccaggtcccacttgtcaatttttgtttttgttgcagttgcttttgaggacttagctataaattctttgccaagactgatgtccagaatagtatttcctacgttttcttctgggagtcttatagtttgtggtcttatatttaaatctctatcttgagttaatttttgtatatagtgaaagatgggtgttcaatttcattcttctgcttatagctagccagatatcccagcaccgtttactgaataggaagtcctttccccattgtttatttttgtcgactttgtaaaagatcagatggctgtaggtgtgcaggtttatttctgggttctctcttctgttccattggtttatgtgtctgtctttgtaccattaccatgctgttttggttcgtgtagccctatagtatagtttgaagtccagtaatgtgatgcctgcacctttgttctttttgcttaggattgctctggctctttgggctcttttttggttccatatgaattttagaattacttttctctaattctgtgggaaatgacattggtagtttgataggattagcattgaatctgtagattgctttcggcagtatggccattttaacaatgttgattattctaatccatgagcatggaaggttttgtttgtttgtttgtgtctatgatatctttcagcagtgttttgtaattctccttatagagatctttcacctgcttagttatatgtattcctaaccaaggaatatatcttggttaggtatgtattttatttgttaattttttgtggctattataaatgggattgtgttcttgatttgactctcagctagaatgttattggtgggtagaaatgctactgatttttgtacattgattttgtatcccaaaactttactgaagttgtttatcagttctgggagccttttgttggagtctttagggttctctaggtatagaatcatattgtcagtgaagagagatggcttgacatcttcttttcctatttggatgcccttcctttctttctcttgcctgattgctctgctaagacttccagggatcatctgaaaacctcataggaaaaccactctacagacacaatggcaatatttggtgcctcttagctagtagtttgggcttggggtttacttagagttatacagcctaggggcctgattcctccatttgttctctatgtgattttgacattatgttgagtctcagtttttccatcacctataaaggcatggggggtggtttgaaaatgcccagctctcagggttgccgtaaggattttatttatagtaatgttagttccctaaggctgttgtaacaaattcttaccaactgggtggtttaaaacagtggacactttactctctcacagttgtggagagagaagtttgaatcaaggtgtttgtagggctggttccatctggaggctctgagggagaatctactccatgcttctctcttagattctggtggtcaccaggaatctgtggcattccttggctggcagctgcataacttcaatctctgcctccatcttttttttttgagatggaatctcgctctgtcacccaggctggagttcagtggcgtgatctcagctaactgccacctctgtctcctgggttcaagtgattctcctgcctcagcttcctgagtagctaggattacaggtgcatgccagctaatttttgtattttttttttttagtagagatggggttttgccatgttgcccaggctggtctcgaactcctggcctcaaatgatctgcctgcctcggcctcccaaagtgctgggattacaggtgtaagccaccgtgcctggcctctgcctccatcttcacatggtattcttccctgtctgtgtccaaatttccctcttgttataaggataccactcattgcattagaactcaccttgatccagtgtgacctcttcttaaactttatatatgcaaagactctttttccaattgaggtcacattcagaggtattggaggttaggctttgaacatatctttttgggagactcagtgctaacctcagtaacatggcaaagtcctaacacagtatccacacataggtggccttcagtaaataatagtttccattgttctgctgttgtagagtgtttggcagtgcctatatggaactttctaactgaattctgcggtcttttcagaccttggaggctatcgtatcaataaaaccagagcattttctgttgtttggtaatgcacagcttctgtttgcagcatgatgctcttctaggttgcgtataagagcccccatgcatctcaattacagaatatgttaggcatttggattttgtctaacttagcctagtactgttgtgggttccttcgggcacttttgtcttgcttaacaatgcaaactagaaactgcacacaaatggttacccaaaatgagtcctgttattattgcttcttttacccctggggccccaaactgcagaaggcttattcactgcaagactctaaatgtcttacctccatatattacattccgtattatgccggaacatggtgaaattaattgcggccagccagggaagacagaaaaaaacctataatggtttatcatattttttaggctttgtgagggccataaatttaaggcatataggaattgtatttattccttagatttcacaaatttgtcatgttccttttctccaatggcgacagcttcttccaacaactgggtctctgttgctgaagtagaaaatagaaaagggagtgggcacggggatgttcctagtgtcacagatctctgcagagctctccctcgtaagcttctttggttacatggctgttaatagctaaattattaatgcaggtttgctggtggagggagctgcttttgaccattgcctctcttcttacatcagcttttcgatagctacaattgtaggagtcacattgcatgcagagcagttcataaattgaatggttgtttgtgtgtgtgtgtgtgtgtgtgtgtgtgtgtgtgtgtagcaggggaggctcagagttttggcctctggctgtatggctgtatgcttgtgagtatcctttgtctgaaacctgatgatgcaggaatttacatcttggaatgggagttggtttaaacaaggaaatttattcatcactgaattctcctgagagttcagcagctcctgtgagcatggaagtgcccccgtctcaatctttttggacaatgaagatgcatattccaaaggttagatttctctgaaatgactggtttttcaagatagtaggaaagcagtattggccacagagatccaggtggctgcatgaacaagaatgcaaccttgattttatggtctttatttcgttttccaaagtcaaggtccatgagttgattaaaaatatcacaaagtgatttaactattcctcagtaatcttgtagcctattgccatcaaactttgttgacagtgacttatggaaacacattggtatgtccacacacaaatttgtgtgctggtggttcatagcagcattcataatagcctgaaagtggcaacaacccacatgttccccagtggatgaatggataaataaaatgtagtgtatctatacaatgggatattattcagccatacaaaggaacaaagttctgatacatgctacagtatgattgaaccttggaaatattatgctaaatgaaaagaagccagttacaaaagaccacatattgtatcattcaatttataggaaatgtccagaataggcaaatacatggagatagaaagtagataggtggttgcctagggctgagtgggggtttgggaggaaatagggcatggctgctaatgggcatggggtttccttttggggtgatgaaatgttctaaaattgattgtggtgatggttgcacaactctgcatataccaaaagccatagcattgtatactttcaatgggtaaattgtatagtgtgtgagttttatctcttagtcatgctgttaaagatcacatttacattgcaaacaagaacatttatataaaggtgaatcaaaacatacccttcatatctgatatattctaatttattccagtcttttccatttttttctttaaaagtgtctggacatgagccatgatactgaatccataatccacacttttatggattcctttccattttacagatttaaaaaatggcgtcccagtgcttaagaagtgagtacagggttacacaatttataaatgactgagttgagacttcagactgggtctttcttctgactcccatttcactgtgctagctaagaggttgggtagtgtttaaaaacaagttaaaagattgagcaaatttgggggtaaacaaaaaagtaccagcaaggaatagcctccttataaataccttcacctatagtgtgaattgcttagggaagctcagggcacagagaagggctggctgcacatttttgcattgagcatagtgtctgacaccctgtgcattgccctggctgagcgaggaggctccatttgtttatttttcaagcatagatgctattttctcaggactgtagagtaaaaacattagaaatttctagctgcctgccacttagggcttgctggcttctagcccttctgctgaaagtcaaatttaagataggggatcatagaaaatgaagaaaagacatacaagtcattagggagaaaagaggagctggtgttctcttgcagctctggaatcagtatcagataattgtgccctgactgcgcagtcctggccagagatacaaaaaaaaaaaaaaaaagaatttttactggagtaaatgaggagtagggagtgaggtaccagaaaagtcttgggttagcccagatgagtggtatatttttaatagggagaggattcatgagctgattcagacgtgtggccccttccagtgtctgtgagaggccatttcataagcaggtctgttttttttccaccaagttttgcttaagatttggaaagaacactctacctccttagttaattatgtgcataaatatttgcttctccaggaaggacgttttcccacgttattttaaaggactcacatagatttaaaggttttcttttctcccacccctaaggaattcagtgttggtaaatggtgcccatctcaggaacagagaagcttctgattagttaggagtccagctgtggatataggagcagagatgggaggaagaacagtcctgtacttcagcagggttccgggagcctaccatacctcagagataccatgggttcagttccagaccaccacaataaagtgagtcacatgaactttttggtttcctagtatatataaaagtgatcaggaggctgaggcaggagaatggcatgaacccaggaggcagagcttgcagtgagccgagatagtgccactgcactccagcctgggggacagagagagactttgtctcaaaaaaaaaaaaaaaaaaaaaaaaaaaaagtgatgtttacactatattgtagtctattaagtgtacaatagcattatatctaaaaaaaagtatataccttaattaaaaatactttattgctagaaagtgctaatgaacatctagccttcagtcagttttaatgttttttgttggtataggatcttgcctcagtgttgatggttgctgactgatcagtgtagtggttgctgaaggttggggtggctgtggcattttcttaaaataagattacaatgaagtttaccacatcaatggactcttcctttcatgaaagacttctctgtagcacgcaatgcctgttttatagcactttatgcgcagaacaacttctttcaaaattggagtcagtcttctcaaaccctgccactgctttgccagctgtttatggaatattctaaatccttgtcatttcaacagtgttcatagcatctccatcaggactagattccatctcaagaagccactttgtttgctcatctgtaagaagcagctcctcatccattaaatttgttcctgagattgcatcaattcagtcacatctttaggctccacttctaattctagttcttttgctctttccactacatctgcagttactcccctgactgaagtcttgaacacctaaaagtcatttgtgagggttggaatcagtttcctccaaactcctgttgatgttgatattttgacctcccacgaatcacagatgttcttaatgtcatctgaaatggtgaatcctttccagaaggttttgaatttacttggcccatatccatcaaaggaatcagtatcaatggcagatatagccttaaaaatgtatttcctaaataagacttgaaagttggaatgactctttgatccctgggctgcagaatggatgttgtgttagcaggcattaaaaatcattaatcttcttgaatgtctccaacagagcttgtgggtaaccagatgcattgctactgagcagtaatattttgaaaggaatcttttcctgagcagtaggtctcaacagtgtgcttaaaatattcagtaaaccatgctataaacagatgcactgtcatccaggctttgttgttccatttacagagtgcaggcaggttagagttagcataatttttaaaggctccaggattttcagaaaagtaaatgagtattcacttcagcttgaagtcaccagctgcattagctcttaacaagacagttagcctgtcctgtgaaatttgaagccaggcattgacttattctgtctagatatgaaagtcctggatggcatcttcttccaaaagaaggctgttccatctacattgaaaatctgtttttagtgtagccactgttatcagtgatcttagctatctagatcttttggataacttgctgcagcttctacatcagtatttgctgcttcatcttgtatttttatattacagagatggctgccttccacaaacctcatgaaccaatctctgctagctttaaactttccttctgcagctttctcacctcgttagcattctagaattgaagagttagagccttgccctggattaggctgtggcttaagggaatgctatggctggtttgatttttctctccagaccgctaaaacttcctccatatcagcaataaggctgttttgctttcttatcatttgtgtgttcattggagtaacacttttaatttcctttaagaacttttcctttgcattcataatttggctaagtgtttggcccaagaggcctggctttcttcctgtcttggctttcgacatgccttcctcactaagcttaaccatttctagcttttgatttaaagtgagagatgtacaacgctttcttcctcttgaacacttagaggccatggtaggattattaactggcctaattccattattgttgcgtctcaaggaatagggaggcccgaggagaggtaaagaaattggggaacggcctgatggtggggtagtaagagctcatgtatttattgatgaagttgttgtcttatatgggtgtggtttgaggtgccccaaaatgtttgcaatgataacatcaaagatcactgatcacaggtcaccagaacagatataataataataaaaaagtttgagatattatgagaattcccaaaatgtgatacaaacacatgaagtggcacacgaggttggaaaaatagtgctggtagacttactgcgttcaggattgccatagaccttcagtttgtgaaaaatataatacttatgaagctcaataaagtgaagcacagcaaaatgagatttgcctgcacagtttctatatcgagtggaggtctgttctttagatcaataattgatgttctcacctgattgagagggccaggagcaaggaccatgatgaagggaatcaaagccacaaatataaatcataatgagtaaaacaataacagttaactgtttttggttaaatgtgccagcccctgtgcacagtgtgggttgtctcatccaaattcttccaacatctcagtacagtaggtacgatattgccaaactttggcagacctggttcaagtctggactcctccatgcagctttgggaatgggttaaccatgtacctttgggaatatagtgtctgcctttctaagccttagtttctcatgtcaaacaaggacagtgatgtccttgcctcatggaatgatggatggctgaaaataaagtaatacacatacagcacttggcatacaaaatgggccataaaatgatggctatttttatgattaggtggaaacttttgtttcttttttttagttgtcaaatgatcctttattgaaatgttttcctttgtgcttcttaactagctggggattctacctgcaccactgttgatgtcatgaagtggcagccatcagcattgcagctcacagactgggcagttcccaggatctctttagtggtttcagagagttctctggctaaagatcagtgccacatctgtgaagcaatgttgacaatctcatcaaaagtgatatttccattgtgtttaatgtttttctgtttctttccatctctttgtggttccttgagggctttgcagaaacccttctggcagtggcagatggtaccacctcactctgggtctgttctgaatggtcagtttcactataatccttagacccttccagtcaccggttgccttggcagtgtcatcaccaaccttttttgcagacatacccagagggccaatcttgggggccagcacagacatggcatcaactttatccaaggtacacctcaggtatacgactttgatcttgttggggttgaacttcagtggtgtgctggaggcagctggtgtcagatgaacctggattcaggatgacccaataaagttgcaccttggcctcctccaagccgaaagccaaaagtggagactattcttattcctattttacagatcaggaaagtgaggcttaactagattatgaattcaagggtcacagctgcaaagtggtggggctgggactggagttcaggtctgtcggactctggcctcctgtcttttcgctgtcatctgataattggctgaagatgtcgggtttctagaagaggctgtggcgagggcactgggcctttgctgccttttcagattggacggtcttctctagaagggagttgactcagccaggtggcagccagggacagggtcagggcgttcactggaggagggtgcttgcaccacctgttaacatgggactcccccaggtgttgtctttcatttcctttttctctaaccctgggattactgaggctgaggaggtgtttaccacctcctttttaaagggggaactctgagctgatttttggtagtgcaaatttcctagtcatatgctttcaatatgtgtttgttttttgttcttgttgtctgtcagagattatcatctgttgtggcagagaaaggcatttttcctcctccctcttctctgatgcttgcaaacgctcctagtggccaatgaacattggatgcacccatgaagtagaatccacacatttaattctagattgattctctgaggccttccctgccaggctcctttcagccaagcatattcaccctttgtcaggcttgtgtgctcagctatgtgaaatgctcagagcctgttgggcaggctgatctaaacaaacaaacaaacaatcaaacaacaaaacaaaaaacagtcctagaatgaacctctggagaggagtatcctggattcacttggaaaatatcctctgtggttccagggaggtcaaagatgtgagcccaggggtctgtggtttatgaaggttgcagatctctaattagggtcttggtctgatggctccaggaatcctctggattcggagtagtaatagtaatagcactttaaagtaggctcattactagagcggttattgcttttgttcgaaatggcccatctaagtcaggccctattaaatagagcaatttaactgacacttagcgtctttagggagataaattatcctttggcctggtcacctccactttgaaatttgatcattggtatgagtcctgggagagtcgttcaggcagatgcatttgttcatgtaagcccacatttcagtcattcgttcaggacacatttaatgagggccaactctatacctgacactgtgtaaagccctggatgtgtgataacaatgaagaggacatgggctctgcttttaaggagctcacagcttttattcagtcacgaaacatcgattgggcacctactgtgtgcaaaaagccctgtgcttggtattgcacgggagacaggttagtggcagaatgtgtgtgttcatggggcctttatgatctgtgtagagaacagacttacaatcagttaactgggtgcagcctagaaccgaatgtatgttataaaagaggtgcaggaaagtgctgcgaccctgaggatgcagaggttccttcagttggttggactggagtagcctcatggtagtggtggcattactgatccttgaagaatgtcctctctgttgagagtcagccagattacccggagaaacggcgtttaaagcaggactgctccaggggcctggctgcagccacaagcctctccagaaccgagcctgcccctcctcatctctcctgctgcctgcagattcactccttcttggtgttcttggcttctcattggaggcggctgcgttctcatcctacccactactttctccaggcttcatgtccacgacctgcccaatcccaagtctccctcacgctcttccattcagctcctttggctaacccaaagtgcactaattctgaagacccaaagggaggggtgtatcacctctttgtcttttctggagctccacgtgtgtcactggcctcctggaaatctcctgttggatcaaaggccccctgtggtgctgtcagccatggcagggtcctccccaagggatgatggtgacctactcatgagggccccaggcctagtaatatccaggcagggtgatccttgcatcctgtggatgcaacattattgctcagagaaggtctctgcctgtgcccatggagacatttacaaggatgctcattgcaggtctgtctgcagtggtaaacattggaaatggcctcattatccatctcaggggactgggtaaataaattacggtactactatgaagtggaatgctatccagcaacgaaaatgaataggctagatcctcacacatcgatgcagataaatctctaaggagactttagagtaggtaaaaggaaggatctatatggtataatgccacttgagtttattttaaaagcacacaaaactctgtgtatgtgtgtatgtacatattatatagcatatatttttgtatatatgtgtaatatatgtatacatgctatatactatatagtgtaatatatgtatatataatatataacatatataatataaatacacaccatgtatagtgttttatgtctgtacacacatacacacacagttgaaatgtatgtggtaaaagtagaaaatgagttgtaaagcagatacacactgggattgtggttaaaatgggaaaggaacaaagagaaaggaagatgggtgagagggtcttttcaaccatccatctcagtaatattttattacttaaaaaagataggaaatgatggcagaatactaaaatttatgaatttggggtctggttccatgagcatttattatgttaactatatttctttatatgtgtgaaatatttaatgctgttaaacggtatgtctagagaatgggaggttgtttggggtgtctggaacttagtttgttgggaggaaatatcctggatgatgaaagtaggaaggcaggtggaaccttggtcatgcaggccatgagtcttcaagctggggcgcgtgacatggagatggtgacatgacccatcctcggtgtgggaagggctggagagggaaggagcttgggggccaggaggctggataggaggctgctgtagtggttccagcagagtgggttgagagccagaggtgggcgggtaggggatgcttcagagggtccccagggaagcagagacacgtgggaaggatgggaaatgtgtggttagattctgcaggagtccctagcactgagtccttcacactcaaggagtgttggctgttgaagtggtagaactggtttacccataccttgagggttgtgtgttctctctattcagtggtactttctttcgcaggaaagtgcctggaaaaatagatgacagccagaaagagagcttggagaaaaaaatgactccaaggagaaggtggtcatttcctagagtctggcttgtcagttgtaagtctgtattctgtttttgtttttattatacttttaagttttagggtacatgtgcacaacgtgcaggttagttacatatgtatacatgtgccatgttggtgtgccgcacccattaactcgtcatttaacattaggtatatctcctaatgctatccctccccgctcccccaagtctgtgttcttgatatgtaaaatatctattatatttccaaagtacaaactaggatgacacttattacagaaagattctgtagaggaattctttattgagctccatgtatgtttacctgagtagtttctttataaaaaaatcttttaatctaataatttgggtgaaatggttgcttcagaatcaaagctcaacctactttgacttactgtttggcagtttgtttctgtggtggtctttaacctcccctacaatcgtaaaaaataaaaaagggcttttgttgctgtttttattgttctttgttttagaaaatacagttggaaagaagaaaataaaaatcaccagtaatcctatcattcagaaaatgttggcatagtattctttcagttatattgtatacgtgtgtgtgtgtgtgtgtgtgtgtgtgtgtgtgtgcacataatttgtaacgttctttttaaattttatatacagcggacatttttctattcattaaaagcatttctaacttggttttcactcagacttttttaccccaactcttttggttagtatagttttaaaattattagctttattttttgtcgtttatgttgttgaaaacaataggcttttaggttacttgagacccagtgagcagctctgttctaatattaattaacatttacaaaacacaaagggccccttttgctggggctcctcgtctaggggggttgctttcgcatttcttctaaaccagttttaattgctgtattgaattgaatccagtagatgttccataagttatttaactactccctgcttttgggctttgtgttgtttccaggtttttgttgttacaaacatcactgtgaatgacaggtttgtagctattactagcatacacttaacagtcattcctgttgatcagaaaaatccccagaaattccacatccctttgttcctccagagttgaatggcttgcagcagagacagctgcctggcactggccccgtaggtcaggagcctggagctcactgctttgtgcatgtgttgtcactccttcctgtgtcgtcctcatcatcccttcaacgactagagtcagagctggtgttgcatgattctgttcctgtgactgtcctgcctggagaggagcacgtgcgatcatctcaaaggccccattgataccctcagctaacatcatctcccggtgctttttctaactctggcttatcttaccagccacccagggtcacactaggtcttcatcaggcccgtcctggactggggagggtccactggaacctcacttggctttaggacagtgagtgtcatcgaactggacaaggtcagaggaagtcagaaatgttattcctgataaatagcttgcaaaaatgattttagcctggcttgcttcactggagaagggcccctttggcacacctaccacattgcttcccactttccagtagaaaagaattagagatggactgcctaaataataaggtggcatttatgccatagaagctcacaggcatcctacaaatggaatatgtaagaacagctatttcccgtacaacagtgcccattttatcccttagctttctggcatatagagtaaccttgcatgtgttattacgttatcatcacattttgttagggaaaaccgtacacatttccaattaagacaaagaatgtgcaatttcctgaagtcaggattgaggtcataactttgagtgctcaagaattccaagtttaattaagccaccaaatgctgttgataaagagaaaatgccctatcaatatcagaggtgatgagagggtgatctggctgtgacaggtcactcttctaatggccaagcctgatcttacctggcctggctggtgcaggaagtatctcctattagagtgagtgtgtgtcacatctggaagctgccaggttctgttctaatacccttttctgtttcagtagagactacacacagattttgccactgtgaatggggtgtgttgcttttcttccatattaactgtattttctcagcctttcctgttgaagcctgagtcctttcagtcaggaggcctgtgagcttccaagctgagtggacttggagggaaagtgagagaatgttgatagggtcttacagcaaaaatgagccctgtgacatcctgtctcttggaagggttggaatgcttttgtccctgttctaaagagtcactctccagggacggagcatcatgttagttcagcttagattacatgatctccctttggctagaaagggtagaacctctgcctatggtcctactacattatagccactgagaaagtgataattcaaataaagtagaaggagaatggatgttgtattagtccgttttcacattgctataaagaaccacctgagcctgggtaatttatgaagaaaagaggtttagttgactcacagttccataggtttaacagaaagcatggctgggaggcctcaggaagcttacaatcatggtggaaggcgaaggggaagcaagcaccttattcacatggtggcaggagggagagagagagagtgaagggggaagtgccacacacttttaaaccatcagatctcatgagaactcactgtcacaaaaacagcaaaggggaaatctgccccatgatccagtcacttcccaccaggcctctcctccaatatgacatgagacttgggtgggggcacacatccaaaccaaattattgcacccgtgacccctcccaaatatcatgtccttttcacattgcaaaatacaattatctcttctcaacagtcccctagtcttatttcagcattaactcagaagttcacagttcaaagtcttatctgagacaaagtaaatcccttctgcctatgagcctgtaaaatcaaaatcaagttaattacttccaagatacaatggggatacaggtatagggtgaatgcttttgtttcaagtgggggaaattggctgaaaaaatggggctgtagtccccacacaagtctgaaacccagcagggcagtcattaaatcttaaagctccaaaatgatcccctttgactccatgtctcacatccagggcacaccgatgcaaaaggtgggctctcaaggccttgggcatctctgcttctgtgagtctgcagggtacagcccccatggcagctttcacaggctggcattgagtgcctgtggcttttccaggtgcatagtgcaagcaatcagtggatctacattctggggtctgaataatggtgacccccttctcacagctctactaggcagtgccccagtggttactgcgtataggggctccaaccccacatttcccgtctacattgccctagtagaggttctgcatgagggctctgcccctgcagcagacttctgcctggacatccaggagtttccatacatcctctgaaatctagagagaggttcccaaacctcaactcttgccttctgtgcacccacaggtccaacaccatgtgaaagttggcaaggcttgaggcttgcaccctctgacaccacagcttgagctgtaccttggccccttttagctggagctggagtggctaggacacagggcaccatgtcccaaggctgcagagagcaactgggtcctgggccctgctcacaaaaccatttttccctcctggcctgtgatgggaggggctgctgtgaagttctctgaaatgccctggagacatttctcctgttgtcttggctattgacattcagctccattttacttatgcaaacttctgcagcagggttgaatttctttccagaaaatagggttttcttttctaccacatggccgggctgcacattttccaaacttttatgctctgcttcccttttaaatataagttccaatttcagataatctctttgttcatgcatatgagcatacacttttagaaacagccaggtcatgaatgctttgctgcttagaaatttcttctgtgagataccctaaatcatctctgtcaagttcaaagttccacagatctctagggcaggggcagaatgccaccagtctctttgctaaagcatagcaagagtgacctttactcccgttcccgataagttcctcatctccatctgagaccacctcagcccggacttcattgtccatgtcacgatcagcattttggtcaagaacattcaacaagtctctaggaagttccaaactttcccacatcttcctgccttcttctgagctctccaaactattccaacctctgcccattacccagttcgaaagtcactttcacatgttctggtatctttacagcagtgccccactcctggtacccattttctgtattagttcattttcacactcctataaagaactgccttagactgggtaatttctgaagaaaaaagggctaatttactctcaattctgcaagcttaacaagaagcatgactaggaggcctcaggcaacttaaaatcatggcagaaggtgaagggaaagcaaggaccttcttcacatggtggcaggagagagagagcgcgaagggggaagtgccacacatgtttaaagcatcagatctcatgagaacttgctatcacgagagcagcaagggggaaatccatccccatgattcagtcacctcctactaggcccctcctccaattcgacatgagatttggacagagacacaaatccaaaccatatctaagatgttgagcaacttaaacaaaaactgcgcccttgcccactatagatgcccagtcgttcctcatcccacaggaaatatgggctcagagacctcaatggtgggtagcatcattgagtgttttcctctagccccagcagtttgattctgtttaatccttcttttctccctaaattatgtgggcgccatagttaccagagttacaattaattcacagattaggggaaaagccatgactttaggaagcatatggatgaattaaaatgttggcttttctactcattagctggatgctcttgacttttcccagccttggtttccttaagggtgcagtcaaggggatgagatgcctcccagagttgttctgagaattaaatggaacaggtttagtgaaagcgctgagctgtgtgccaggcatatacgaagtaggagttactgaatggatgtgtgatggtggttcaccctccccgaatcccagactgggcaccttgggctcgctgcctctccatagctgctgcagttcctagtgtttaagagtgtgggttttagagtcatacagacctgggttccatgactgtctgattatgtttccttgggcaagtttttgaactctctgagccttagttttctcctctgtaaacttagcactggttccttcctccatcacatggtggtggtgaacaatcccatgacaatgcaggatgtagatatttagctcagtgcctggtgcataaatagtgctccactgttatcacacagggtgaaattgccttatgggctcaagcccgtggattcagaccttacttctggctgcatctgccttgctccagatgtcgactattccccttcctgcaggggaagtcgcacttttagcccaagagggaggaaatggctgctccattgccaccatcctgctcaaggttcagccctactggtcccatatttgtgccttgacctgggttactctgtccccagccccacacagtgggcctcagtgactctctcagtctgtgggggagaaagttaacaattctgattccaagagctttggaaaaatcccacctcctccagcagtcattatttatttatactttaatcttcatggattactctgagttgctcatagctttccagaaagctccgagtaagtggaagtcgtacatgcacccgaagtaattaatgcactttctactagtgagagaaggtgtaattcgcaggaatgtgtgtcaagacccaccctgctaaatttataccctgtaatttgcaatgtttgttggcactgaattggcaggttggtgagtctagcctacctgctttgcaattatatctactggccggtattgtaggattgagtaactggagagactcatcacttaagtaaattagaacctgcttctgggacccatctgagatcaccctctggtagggaggctggttaatcatgtttcctttgtgcatactggagagaatctgataaaggtgagggagggaagaggcgaaggcagtcctgaggcttgcctgagtgtggaaggaccggcggcttgggaaggcatttcttcagcagtcctcctcagccagcactctggaaaaggaaaacacaaaactgttagaacagaaatggtcttatggtccattttatgagctgcatcagccctaataatcagctctgggggagactcgtgttagtttttaaaactagaagtcactttgcagcctctgcagaccagtgattttagtacagtcctcgtaaattttctttctgaggggaaactggcaggagaatccgacaggctgcaatgtaagcttgtagttcaggtgctgggaagcgggtgtgagatggttggatttttccatggctatgtttttgtggccagataaaagaattgagtgaagatgaaataaagtttaggcagacccaacccttgtagaaatcccagacactcagtttactccacgtgacctctggtggactgttcagcctacctgagtggcctcttctcctttgtggaagggagcaaatgagtcttttgattaaagttgttataaatattagatgcttgtaaaggctccggcacatggagaatacccaataaatggtagttatcattagggccatttttatgtgaggagggcatattatttgtcatttgtaaagaacacttggggacgcaaaccaggcagaatgggtaaacaaattgggtaaaatcctatattttttcaaaaagccatttgaatgtgcacctgaggcctgaaaatgtggattagatacagattgtgctttgatgagagtgcagttgtacctcaaggaaagcctcctccatcccaactccagggttcatggaagacggtagcattcctatttggtgttgggacctcttcaaggcttgagaaaatataaggaggaatttagaatctggggagagggatcctttctcccaggagtttgttggggtcaagaaatgtaactttaaatgctcctattgcaagattgggtttgtcgatacacaggcaattctttgggtgttccagtcctatggggtgagaaagaatgaatatatatattttttatctgtctctgtatgtgcctgtgtcaattcctagtaaatatttatgggctggcaagttgcaactgggaaaggcccatgtttaactggctaaatattaataagcatattcaagagaactgaggtctttgttttgtcttcttaagaaatgaatccgctcttattcactgtgtattcacaggaaactgtgctgttcagggaagaagtactgccttgttttccttgtaggctttccagcttggatttcgatttccactgaggccttatttttaaaaacatgtttttacagcagcattacaactgtggagattatagcagtctcctacagctttggttatgaaaataatatatatcgtctttttattccctttaattgaccattctcttaccttcctttgtctccacatggagacacggctagatatctccctcctttgtatttttttctctcttctccaacactctgagatcaaggcccaagtaagtacacaccttcacttttatcctggtttcctggtatccagtgaaatggatttcatactgctgaaatgtccatcctttccccaactcatatctgtggctacttctacctttctcttcctggaactttcctgaagagttaatttccttatcttggcagtgcttcccaggaaactcccttttttgctctgagacagaccttttaatagtattaaatcaaatgcttccaaaccatagtttagaccccctgctctgggagcagtcatcataggcagggctttgacgaactccctttgcaggatctggttgtctatcctggtcacctggatttacaaaaggctaagaatagcattggagaagacagtcctgtattatttttcacttacatacctgaaaaattagtttctatccgaatagaaatggatttccacccagccagaggtttatgctgaaagatgtaaagtggaattgggaagataaaattagactctttaggaaagaatgggtttcccacctccactataatcactgtcatgcacccttataagtggattgggtgttgctgaaatgcaaatgccattcgttctgttgctgatttgcttaccgaaagttgcagaaattcaatccatgcagaaaattctatgagtcacttcatttcctgcaacattttttttccattattcatattatggaaaagagcacatcaaaaaggcaggtctgcaaataacacagttttcaaaaagattgttttatttttcttacgaagaagttttccagaaatctgtaaccagtatcaggaattctccagctttgtatacatagccactcatgatcggattctactccttgcttttatcttgcttgttgtctttggggttttgaagatttgaaggaaactggtcagaattattgacaaagtgctcaggcctcaaaaaatactatcagaataagggactgaagagtataacctactttattgtgtttgtgtctggagtatctgagtgttaaaatttgaagcccagggtagctctctgtattgcttgttacattttaggattgcttgccccttgctccaatggtgcaggcagaagaaatgcaaacaaagtacagcattagccttagcaaaacatataactaggacagtggatctgctgccaaaaataccatctgctgttttccaaagccagagatggatgacttgagttgtctctgccttcagcaaatagtcaagagactaaatagatttatttactttaagtttgcccagcccttcataatatttcttattagaagaagaatatattttggaattagtgaagatagacccaactctttgattcccaaatggatgcctaaaaatttccaatagcttccaaattggattttcttattacttttctttcccatctctttctacatagggctgccaggttaacctacctgaagcattactcatctcatgtcactcccttgctcaaaaacggatgatgttggcttctccttgtgtataaagttaagtccaagttctatagtctggcacttaaagcttttcccacccttatatcctcctctccatgaccatttgctttcatgcctccatttagctcagcgtttcatttggaatagaggtctgcatcatacccaacctgcaaagcagcctgggtggaaattattccatgcagcattccatgatgcttcccctggaataaatttccccctccttagaaattcttttttttttgaaatggagtttcgctcttgttgcctaggctggagtgtgatggtgcgatcttggctcactgcaacctctgcttccgagattcaagcaattctcctgcctcagcctcctgagtagctgggattgcaggcatgcaccaccaagcctggctgattttgtatttttagtagaggtggggtttctccatgttggtcaggctggtctcgaactcctaacctcaggtgatctgcctgccttggcctcccaaagtgctgcaattacaggcgtgagccaccgcacccagcccctcttagtaattcttacattccatttcttactttcttctgtggcatttatgacttccaacttttataattataaaataattttaattttatagctctttaggtgcacacttcttctctcctgctcaatagtaggtttttgatgtgctcaagtcttgtattccctgcaaccttgagtatagtaggtgtctaatgctttctttttgggtaaatgaatgaatcagttagttgaatgagtgcttactacaaaacagagcatgcgataggcagcgggtatctattaaatataaatatcttgttccatggccccaatcagtgaaaaatgtcattgttgaggaggtcactggctaggaattttagaagtgagaacacagtggtcattgctgtagtctagatttgggtggtccttcaacacttcagatgtataattaatttgggatttgtgtatcaaaagttctgctacctcaataatactgatattataacctttgaaagggtggagagagaaccataagcaattgtaacttatgtattcttcatcaacaggtctattctgctattttggggacatagcagaggtcagttggaaagagatttagcgagccagttagagcctgatttgcatgctagttctcattacctggcttgtcatcttgaacctcaatttcctcatctggaaaatgggtataagtagctacccgatgcagtgtggattaaatgacaaacagaaagcaccagtgcaggctctaacacatagtgggtgctccacgaatgcaggcatcacgtctaagggaagtctgagtggcggcctgtcaccagcatcatgactgtttgacttcatagtctaactgcatgactgtggggaagaaggcaggtacggtcatagaagtttgctattttcttcgaaagtgatttcttactattgattttaatcagtttagattgttgttcttctatattctaaagtctctaggggttaggaattctgattaatatattctatagtagtctccccttatcttcggggggtacatttcaagacccccagtggatgcctgaaaccgaatatagtaccaaattgctgtcaactgaaacctatttctgtccatgtgttccacctacaaatttaatgcctttccatcctaactaagcacttatcacacactctggctataacttttgcagtttgaggtgtgacagcaaaactagcacaaattctttttccttcttcacaatttcacagatagaaaattttttctcactgtacatcttagcaacctcagcataagttttttttcctttccttactaagtcgagaactttcaccttttcacttaaaggaagcactttacagcttctctttggcatacctgaattaccagcatcactcttcttgtgctttggggccattattaaataaaattggttactgaaacacaaacattgcaagacagaggcagttgatctgataactgagaccgttcttaagtgactaataggcagatagtgtagacagtgtgtgtatgctggacaaagggaagattcatatcctgggcaggacagagcaggacgacacgagatttcatcacaccgctcagaattggaccacaattcagaacttatgaatggtttatttttggaattttccattaatattttcagaagtccattgactgagggtaactgaaactgcaaaaaacgaaactgcagaaaagggaggactattgtatttcaagatgtgaacttctgggaattttaaaactggaaaaaagctggatggaaaagttgaaaagaaaaaagtcagatgtttgggagcagaggttggaaatttatgcagtttcaattctatttccattatacttctaaagttaccgttaattttgaaatataaaaaatgtccattttgtataaatcagcttgcccaaaggtattatatttggtatatttagagatagaaatgctgttccttatttgtacaggcaacctgagaaatattttgttttccaaatatcgctgagtgttcttatctcttgtcctttgagcagtactgaggataatgcctgattcataagggcagttgggtaataatacatttttttctgaaattgtgtgcttattagcagggcttcttagcctctcagcagtttgctgatgcaaagggactttgaaggaatgatgtctgtttcttcttcttctttttttttactttaagttccgagatacatgtgcagaatgtgcaggtttgttacataggtatacatgtgccatggtggtttgctgcacctgtctacccattgtctaggttttaagccctgcatacattaggtatttgtcctgatgctctccctccccttgccccccacccccctacaggcccctgtgtgtgatattcccttccctgtgtccatgtgttctcattgttcaactcccacttatgagtgagaacatgtggtgtttggttttctgttcctgtgttagtttgccgagagtgatggcttccagcttgatccatgtccctgcaaaggacatgaactcattcttttttatggctgcatagtattccatggtatatatgtgccatattttctttaggagtgatgtctatttctttggatggtgttttacaaagtctgtttccttttcttctcaggagtttgcaaacccccaggggagtgtgcctgagtttttttccttctctctagctggggtgattgacagtggctgttacagatgccttgaaatctttctgcctcccatccaccagttttgctgctgccccatagataagtgttgtccgctaggatcaggaagacattggtggagagctaaggtaaggcaggctttgcaggcacacccccttttttttcctcaaaaagatactttgtaaaaaagtcttcagttggttctttcttttgaaacctttcctcctgtggtttttggttgtgtgtcctgttgctgaactgtgggcctgtgattcttgggcctggcaagtgtgtgctgaggtgttccttccacgcctccctgttcttggaggctgagctttgagcagacctttgcgtgtttacacaagtttgggatttttactggggttggagaggtgtctggagatggagttgctctgggcagaagtttgaacagaagctgttttgtgggaacacaagaagctgatctgagaaagagagacagacagatagacagagagaggggtgcatgaccggcatggagctgtgtactaaatacaaaggaatggtattaccagcctaggctttaatgaaaatgctgtgtaacaccattatgggaaatgataacttctgttgtgcccaaggaatggaagcggctggaagggtgcagtatgggatgtgcatggtacctgcagtgatggtaacgcctggagtgctcttaaagtcacaactccccttggctgggtggcccatcacacctgctccctcctttcccgcctgccatggggaggtggcagaaactttgctggcgaggtgaaatcagccttcctctcccagggttcagactccttcctgaacatctatctgggcagtggtgatgacagggcagtgcctttttgaaagaattattacggcagaaaagaggaagaaagccaggttcagacatctcccttggctgcaggcagaaatcagcattcagttgtctaatctgtagactcatcaaacataaattattctggatggcttttctctctgtatagcttgctataaactttatgatttatttttattttattttttgccaaagacaaataaaaaatgtttaaacaaaagaaggggggagcccccagacgaaccatgtggaaaagttcagtgaagaaccccctaggattcctgataaccaagaataatcccagaagagtttggaaagtgagttggattgtaactggagctggaattggcttccagggcagtcccctactccctgttcagattcattttggaactgaagcgacagcagccatgtagacttttctgcatgcatcccagagtctggctgttaagccgagcttcagtagatgccaccgcagagccttgcgccaggtctgagaagtttgcatgcttggggtttatcagggtgtggctcgtgccattttgggcattgcagaaaaggagtggggctgttttgagtattcagagaaaatgagtgaatcaattaaaaataaatccgggacatgccattccccccccccgccccctgcccccattgcctgtccccgtccccaccccttgtcattgcattgtgaactcttggacttgatagtgaggttgctggttgctcaggctgtagaaggaagaaaggagaggaatggtgtctataagccagctgtgctgttcaaaaacatgttttttactttttatttaagtaaactttttatagaaacttaacgcacataccgaagagcgcgcagatgttaactggggagctctatgaatttccatgaagtaaacacacctggggaaccagggcttagctcaagaagtacagcattgccaaccccagagccccggtggtgcccccactccatcctccccctgccccccgccactgttctgacttccaacatcacagattcctttcttctgtttttgaactggcaagaatgtctggctccttttactccacgttaaaaagatctagtttccacctcatcttccaggaggtgggttgtaggataaccctccacccacttgggttgcaaggacaactccaaaaccttggcgacccgacctcccacaagccttgggctccagactccagcactcttgttccaggcgcccttgaatgagctcgtctgttttccagcagaaatcgtggcctgatgccacctggaagacccagtagcatggaaataggagtccagagcaggctgtaagtgtgagctcacagggagggcaagtgagatttggagagacctgccacattccccgcagaggacgaatgacgtttacatcccttaatcagagtcagaggcatcccacccaggcaactgaggtgtgggcctcttgtggggagtggggctggccagaagggaggggagaagtgtggctgtggaaggtggctcataagagcttttatagaatacacttgtgttctaaaagggaataaaaggaaacatagcccttgggtcattttctatgctaactcattaataagcagtcacccacaggtttctccaagtgattccttgttcagtttttctttttagtttgagccaacatttgggactattagtttctgactgtatcaagtactcttatcccaaacttacttctcttgtgctttaaggaatgcttcatgaaaatattttgtaatttggtgagtaagatgactgtttccttttgggttttgtttcttaatgttaaaggaacaaatctttctctgtgtgtatgtatttttacaatgagcagcgctatgccacctctcccctaaatcatcttggccgctttcgtaagttctccaggcatatttactatggtgacactttaagcaattggttctgaagaaaagatgccaatagaaaatatacccacattctaaaaggacctctcagttccttccctgcagagtgtgtgttctaagattgtgcagatataaatgtaaataccagtacactatacatctacatctctagcgatgaacaaacatgggattctgctatacatattgttttccaacttgctctttcccttctgactctattgtggctattcttccgtgtcagtacgttctaactcctgaattctttttaaaggctgatgtggtactatggctatattgcatcataggaggggacctcagaaagtttgtggaaagacataattaaaagataaaaatataaactttactcctcaacataagcttcatcaagttcaaggcactttggtaagcgatgataccaaccatttagtccatccctaaagaactgagggttctgggaatttaaccatgtcaatgtgttttttacattattaactgaagaaaaacatttgcctttgaaagatttttaggattagggaacaaaatcagaagccaagactgtaaggaggctgcctcatggcttcccattgaaattctcaaaaaattgccctgttggatgagttgaattgagcaggagcattactaggatagaggaagactctctggtgaagctttctggggcatttttctgccaaagctttggctaactttctcaaaacctctcataataagcagacattattgttctttggccttccagaaagctaacaagcaaaatagctctcaagtatcccaaaaaactgttgccatgacctttactcttgactggtcaactttcgctgtgactggactactttcacctcttggtagccattgctttgattgtgctttttcttcatgattgtactgattaagccatattttatcatctttttttttttttttttgagtctcgctctgttctccaggctggagtgcattggcgtgatcttggctcactgcaacctccacctcccagattcaagcaattcgagtgcctcagcctcccgagtagctgggattacagtcgtgcacccccatgccccatgactgtatttttagtagagacggggtttcaccatgttggccaggctggtctccaactcccgacctcaagtgatccacccgcttggcctcccacagtgctggaattataggcatgagccactacatctggcccatgtttcatttaatacagttcttcaaagatatgcttcaggatcttggtcccgcttgtttaaaatttccattgaaagctctgttctactgtgtagctgttctgggtgcaccagttttggcattcatcaggtagaaacttcagtttttcagtcagaattgtgtaagctgaaccagttgagatgtctgtgggttattatttctgttgtttatcatggatcctgtttaattagggcacaaacgagattaattttttcctcaaaagttgatgtggatggtctgcggctgcaggcttcatcttcaacactgtcttgccccgtcttaaaatgagttaggtgtttgtaaactgctgattttggcagggggcattgttcccataaactttttgtaaagcatcagtgatttcatcatcccttcacccaagcttcatcataaatttgatgtttgttcttgcttcagttttagcagaattcatgttgctccaataggggcttttttcaaactgatgtcttatccttcttagttcctcaagctcgatcctgttcagacatgttataacaagttagtatgagtttatttgggtacagaaaaattttaaaatccatgcataattttttcataatatgcattttcacaaactttgaagatccctttcatttacctatctcctcttatagacacttgagttctttaaagttttggacttttacaagtgatgctataaataaaaaaaacccagccttttatgtgtttctccctgcatttatatatttctaaggctagattcctagaaatacaatcagtgggtccaaaggtaagctcattataaattgtgccaggtgctgtcaaatggccctagagagatggtaccaatttatactcccaccagtagggtctgagggtgccagtttcctcaccctgccaaccctcaagagtactcatcttttcaacttttgccagtcgcattgttctaaacaatggcatttcacgtgcatttgtttacctgctagtgaggctgtgcatcttttcatttattagccatgtttattttttgtgccatgcttgttcgttttctttattcatttttttcttggtttgtttgcagttctcttaaggagttccaattagggacatagaggattgttttaaaacacacatttagaaaaaaaaatctcgatgggcatttctggctataaaactctataaaagaccaagtacttcttctttctggcattgaaggctttggttttctgctttgtttttatttaattaggtgaaatttttcctcctggctggagagtccggctgtctgtaaatgcattatcatttgtgcagcacggggtagattgtgatctgagctggaaagtgagccatgccaggcaggggttggagcctgttggagctgattatcgcgggtgttcagtgcaaagctgaatctcttgccccgtgtctcttaaaaaccatggtctctcatgttgttagcataaaggcacttgattgacaaaaggagagacagggagagtctctggagatgtgctggcactctggttcattatgtttctttattctgctggcatttcctatgtcagtcttgcttcgtgtggagccattattcctctcttcacatccaggtcatgtggagagctgccaccttccatataggtagataacctggcctcattgttcataggacaccagagcttccaggaatggggtggccaagggcctgggtcccagcacttcagtggccgttgataacagaggcaagctttcgactgaacccctttaggctccttcattcctgccagctcacccttacctctccagtagtaaagggcttgtgcctttgcctgctctgggtgagagtcccagagcacagtagcccatcacactgtgttgcagctgtcactattccctggatacagaaagaaacaaaggccaaagttagggtgctaatggtttgggattcaccatggggagaaggtgaatcaacctctctgtggatggaggactggaggcgtgactgagaggcggtctgccacccagtgcagagcagaaacagagggctgactcagagaggcgttgtcacctgctggatgcacttgggcctggctctcttcccctttaacatgtgtctgaccttgattccctgtgagctggctctgtgggcatgggtcatcacagaatgctgggtttgtctatgggcagctgtgtcagatgatgctgacagcacatgttatcacatgcaaagtccttgtgccccggagttctggaggcaagcttttacctgccaaagttgcagtatgaaggactggactacatttgaatttttactttgagccatgaagaattactggtttacactcaagctaatctggaggtaaaggttgcctcacagaaaatcctagggtccatagccttctcaggaaagaaaataataatatgaataaaaaataatatgaataaaaacatgaatttttggttcctatgcccgctcctaccttttaaaataagcaagttattatctgagcgtgaagagacatgttttagttctgtaatcttaaaatgcatgcaaatagggactgtccacaagatggaggaataatcctaatttgaaggaataatccacaaaatgtttatagtattttagcacagggaagcaactgtccatttttccctccttctttttctctctccatttcgatagacactctgttgtgggctctgggctacattagaacacattccctcctgtagtttaaaagttgttcatgagttgtcgggggaagaaaggcacccaacagaaatttgtggagcattatggtaaatgaagagatagaggtttgcataagttatgttgagaggtctgagtgggggcttgtacattgtcttgggggactagggagaaaacccctggagaggtgggctggccaggatacccagggcacctctgctgacccagggaccttgagttttacccgctgtggaatggggatttgaaacagcatgtgacgtggtcagatttgttctacagctgtgtgaaggatgcttttagaagccaagactggagccaggaaagccagtaaggaagccattagtgccaaagaggtaagagaagcatttggactagggttgtgagtgacagggatgggacatattaatgaaagcatcagttggttgatggcggtgggggtgagggagagggatggttggtggttctaccagctgagatggcgcatgatgcaggaggagcagctttagaagaaaaccccaacattctgttttggacatgctgagcttgtgccagggatggaagtatctttggcaatacggggtggaaatgtgaagccaagggtggatggaggatgtcgttgaagggaagagaactgaattggcggtgttggtttggaagttatcaccgtgaaggtccaactaatagtggacaaaatgacttaactagggaagatatcgcttgtttaagcagttgggagcaaaactctgaaggctgttaaaggagggaaaggagcttccgagatgactgagaaggaatgatcagagagccaggtgtgtgttaacgggaggcagaggaagagaagaatatggtgtgagggtggccaagggaatggagtttcagaaggagggaatgatctagctgatccaaagcagcagaattgtgcctaaggaagagatggaaaattaacgtttgaattcaatgattgggaggccccctggtgactttgtgaagacagattcaggagagagtgatggtggtgggaaccggacagatggcaagggattgaagaatatgcagactgtagggtttaaaccttgttttcttttagagggggtctggctctgtctcccaggctggagtgcagtggcgtgatcttggctcactgcaacctctgcctgccgggctcaagtgatcctcccacctcagcctcctgagtagctgtgacttacaggcacatgccactatgcctggctaatttttaattctttctttttttggtagaaatgacgtctcactatataccccaggctgatcttgaacttctaggctcaagtaatcctcctacctgagccctgcaagtgctgagattacaggcgtgagccactgtgcctggcctcaaacgtatttaaaggttaatcatggtctcagcgttcaccaggcctttgacttcttccagtgtcttgatattgagctgcccctgttagcagggagcaatggagtcacctgaagaactggacccacactgtggcgcacgttatttcaatttactgaaaaatcgtttcctaataaacagttcccttctgttctttcatctcgcctggtatgattctattgtattcagttcagggtggatccttttacacttcagatcacccttcctctaattattaatcatgtaactacattagaatgctttgtcttatgaaatgacgtgttatgtacctacattacatctagtctttatatcatagtaattctttaatcgtgaattataacacctttaagaaatgagccctagttaatcttatggccactatttgcatgctgtcataaaatgtgtgaaaaattcagaagcttctactgaattttagtatttttttttttctttaagaggttttcttgtgtgagtgatacacagtgagaattctaatgtttccaggtctgtgactactttgctccaataccaagatggacagaacagccctttgattacccagggagactgtcaagtttgcatctggtcaatctctgttttatatataaggaaactgaggcacagggtgggtaagtaattccctgagcttggaaagtaatggtaatagaattcagtgtatgggctccagggctgactcaaatgagaagggctctataatccatctttaatttttaaacttgcttcgttttctggaaggtcataagctaccttttcataggctaccctttgcaatctggaaaccccaaacaggttcgtctacacagtttcagccctttaaaacagatttaccaaacctgatagtctcttgcaaaggtaaattgcttgctcaggaggtctgaaagctgcgatcattcagacatgcatactaaagtggggactccagcagtaaacactgcttaactctggcactttctagatgtacaaacatcatttgctcaagaagtcagctaattcctcatgatggagggcctgtcgtcgtgctcaggagggagtgtgcctgtgtgagcagattgtagaagcgggatggaccagtttaatggattaagctacttaagaaaatttaaaaagactcactggttaatatgcacaccctctttgcttgacggaaacaggctggcgtttttgatctccctggcggggttgctttcccaatcagaagtgataagccaaataatcatttatttgctgagacatgatggaagattatggataattgaagtgaaccagagagaccctttaatccatagggaacgggaggtaggtgtgattcccgtccctttggagattattttctcctgttgcagggggccatggggactagccgtctcctagctgagtagagaaggtcagagttgtaaagtgcagaggccagaattgggtctcatctgggagctggagacttggattctctggctagctccagcactgccttttgatgagctggttgctctctgggttttagtctctctctattaaacaagaggaactatcttcagtacctgcctttcaaggatattttcagtccctcagaggaggagctctatgtcaatcccacttattatttttaaatgctgaagactctatctaggacaggcagatgatgtgtgtttgcctgctatggggacgattacgagtccacagaaacaaagaatgagtgggggaatttgattgtcgtctgttactgccttactttatgcatggggaaactgaggctcagggaagtgaagcaactcccccaaagcccagtggtgagtcccatatgcctttctcatttgacctgctttacagctttatagttgtttggaagggttcgttcatgtgtatagtttggctgctattaaagagatctaggaatgatttaaggagggctaattatttcttaggaataattgagctgaggccatcatgtatgagaagacacacagccagggtctgcactgggaggtctttaactgtgtccttaaaacctggtgtctggccccacaatctgcttttctggatctaagtgaccaccacgttccagctaaccagcccagattccagcaggcttcccatctgaccaggctacacccactctagagaggcaggaagagaaaagggacccagccttctctgactcagagagtccgtaagaatgtatggagggaaggaaggagtaacatatactagtaccatttattaaaccccaagtatataccacctgctctcttatatatactttatccttctgtctcttgtatgtccacattttacctatatatatgttttatatctatatctatagctatatccatatctatatctatagccatatctttgtcattatttgtatctatcatccctctatccctcagcaatgctgccagggatgtggggtttcctcagttttacaaatggaaaattgaagctcagagagggtagctcacttgtctgaagttgccacagctagttatggttataagagaattaggcattagaacccaagtctggctcactcctgagctcatgctctttttaacagactgtcttcccagaagggaggacaagggattgggcttcactgtctggtttccttgccttcccccatcctgcaccctcaaaccacttcttctgtgctggccaccctggtttttgactgtgctctgtgcctttggcccttccttagttgcaaaagccagggggccctaccaagtcacagccttggctatcctcaactgagcccatctgagccttgctcagccttctgcagccccatgttgaggggcgaggaggcagatggtgtggactattctaaggaagacagctttactgtggctttcctcaccctgacttcttagggagttagtactcaaaaaatatctgacctactggctaggccttgctatttctgtttttggaatgtcatggcttagtaagtttggtgggtaaatctatcttaggagataacatttattttttcctccacaatcagcttctgccctgcaactgttgctgcctttcagaatatgaaaagagctcataatagatggaatctcccagaagaaggtctttgcatttgctctttcttttccagtatgaatgcttgcccccttttatctcgcattcctttgtagttggtggggtttttgaagcgagaatatagtggtaaatgcttccatatgtctttcatagggttttttttcctaaaatattagtgtaatttttgttccttataataaaattttagcaatgaaacatttttttaaagggtagcgaaaagttaccaagaatagcacaaatcccgctgtgtgcctgcacccagttccactgaattctaatattttgccatgctggcttcagatttttttttttttttttgagatggagtctcgctctctctcccagtctggagtgcagtggtgtgatctcagctcactgcaagcaccgcctccagggttcacgccattctcctgcctcagcctcccgagtagctgggactataggcgcccgccaccactcccggctaattttttgtattttttagtagagacggggtttcaccctgttagccaggatgggcttgatctcctgaccttgtgatctgcccgcctcggcctcccaaagtgctgggattacaggtgtgagccaccgcgcccggcccagatttttttttaagacaaatcttgcagttgaagttcattatgtacgatcccagttgccagaggtacccatgatcctgaatttgattttttttttttttttttttttgagatggagtttcgctcttgttgcccaggctggagtgcagtggcatgatcttggctcactgcaacctctgcctcccaggttctagcgattctcctgccctatcctcctgagtagctggggttataggcatgcaccaccaagcccagctaatttttgtatttttcatagagacggggtttcaccatgttggtcaggctggtctcaaactcccgaccttagatgatctgcccgccttggcctcccaaagtgctgggattacagatgtgagccaccacacccggccctgaatttgatatttacctctcctgtacatttaaaaaatctgtatgtacccattaaaatagtattttttaaacaggatgtaggtgatattctgcagttcgctcttttcacttagcagtaagtttctcagatttacctatgttgagtgatgtaaaccctagttcatttaattgaagctctgagtagccttttcattgtgtgaatgtaccctgttttctcatccattctccttttgatgaacatttagtttgtcttacagttttgtattatagtagtgtctcactgaatgttctcttgctgtcgccctgtgcacatatacatgtttgtccctaggcctagggtatctattaggattggctgggtcaaagtgtcagaggcatttaaaccagagtgattccatcttaataggggctggataaaatgaggctgagacctactgggccacattcccgggaggttaggcattctaagtcacaggatgagataggaggtcagtagaacatacaggtcataaagacctgctgatacaacagatttcagtaaagaagccagctaaaacccaccaaaagcgagatggcgaggaacatgacctctggtcgtcctcattgctcattatatgctaattacgatgcattagcatgctaaaagacactcccacaagtgccataacagtttccaaatgccatagcaacatcaggaagttaccctatatggtctaaaatggggaggagtcctcacttccaggaattgcccacccctttcctagaaaacttatgaataatccaccctgtgtttagcatgtaatcaagaaataaccataaaaatgagcaaccagcagccattggggctgctttgcctatggagtaggcattcttttattcttttgctttcttaataaacttgctctcacgttactctggattcgccttgaattctttcttacatgagatccaagaaccctctcttggagtttgggtcgggacccttttccagtaacaaaagtgtgtgagcttcactaggagttgccaaattgctcttcagatgtgccgtgtatgagttcctgttcctccccatcttcttgccacttaagaatgtcaggcttcaaatttttgcaagttgggtgtaaaagagagccctcttgttccattaatcattctttgattacaagtgagattgagtatatattaagtggctatttgagtttcctcatcggtgaaagtacctgttcatgggctttgtccatttttctactgggctgcttgtattttcttatatcattttgtcagaaaattctagatattgatacttcgtgggttatacatgtggcagataatctttttctagtttgtggcttctctttcaactttgtttatatctattgatgattaggagtcttacattttaatgcagttgtatttatcagtcttctcctttgtggcctctcctttgagtcttatttaagaatttcttccttaccctgagctcatagagatacattttggggcctatatgaagatcattttgcttttctggccttattgcttagttggctttggtattttccttatttgccctgcctggaggcatctgcatggagcagaagagagactatcgaatggttcccagtggctgtggaaattgctgcagttgttcttgggcacaaggggctgggctgaacttgaggttgtagcaaaatccttctttttgggcagtggctgttcctgagaggtgctgaagtgcagagtcgattggctctctcataagccctggcttatcacaagccagataaaattggtcgtaaagttgtctcctccttcagtttagtggcatgcctagctcacttcctcctgctgctgctgattgagctgaaaagacagaaggcataggaggatggctcctgctctgggttctctcccaggtctgaccggcagccagcccttggcaaggacatgggtgtgagtgaaaagcaagcgcttgcaaaagttcttccagaagctcttgacttcagtgcctttactcctgggagcccagaagtgttcttcaccccaatctcatttatccattgcatattgcgtggcagattataaatggggtcaactcctgtttagataaattcacagaatttaagaatgtcagaactggaaaggttcttaaggttcaacaggttctgttgcctgttcatgcagtcaataggcatttgtggagagtcttccaggcacctggcacttgctagttgctgaggatgcagcagcaagaagacatggtgttgggagcagccagtcaacaacggggctcatttcagagtggtggatgtgatgggatagggaggatatgccttgggattggccacttctgtcattttcttattttacataagcctgtagttgtctagtgcagggagtcggttggcaaatgggctaaagtcagccatcacctgcttgtagacactcttctgaaccaggtatggcttttacatatttaaatggttgggaaaaaaatcagacatttataatatattttgataatgggaagcactaactttgaacctcaattaagtgaaatgttaattacccttcccaaaaagaattccattttttttcttagtagacctatattacagaaaattgttcccaatgattatgaaaatattttgaatttaatcaataaaaaatttgtagaatattcttttctctcctcttatataggtaccttaatttggcttcttggcctacactgcctgaaatatttactctggccatttgcagacttgttctagctgtgtgaccttgggcaagttacttcttcagtttcagtttcctcatctgcaaaatggaaatggtgcctgtttcatagggcaattgtaaggagtaaaaaggaactgaagggccgggcgcagtggctcacgcctgtaatccaagcactttgggaggccgaggcaggcggatcacagggtcaggagatcgagaccatcctggtcaatatggggaaaccccgtctctactaaaaatacaaaaaaattagctgggtgtggtggtacatgcctgtaatcccagctacttgggaggctgagacagaagaatcgcttgaacccgggaggcggaggttgcagtgagccgagatcgtgtcactgtactccagcctggcaacagagtaagactccatctcaaaacaaacaaacaaacaaacaaacaaaaactgatgttccacttctgccatgtgtatgtgtttccgtagatgtcaggtcttccctagtgaaaagtccataataattgctatcttgagggctgttaaagggagcaggaggagggatgggacaagggtggcgccaggactcagtgctcatcttggaggtcagtatcatgacaaacagcatcttccagagttgctgtcagacccccaaactgtggactttggatctcacaaaggccgtatcccgatggctctgcaaacccccactagattaacactgctgcaacataattttcctcatgaaatgcactgaagcataactaaaaaaatgtaagtagcagctatcaggcccttaatgaggctataaatacagcacgaaaataattcataaaactatttcctggtgaaaaactgtcctttacctagacctctttgcttgccccattaataacagccattggctttctttactaactcgctttgtaagaaaggaacgaagcctttatcattttgtgactcatgctgctttacccttgtaggagaaacaaccatatagctatacaaagtgcagacacctcatggcacagtaggcagctaggcccactcactatcccggtgactggctccatccatcagttgttcctgctgcagaattgcacaccatcttcttttagggtcataggcagtgtaaatatgaaatctgtggatatcaatagccaatggtcctgggctgaacccaggggtcatgttataccttctcaccaatttccctgggctgtcttccttgaacagatgggtaaatggaggctggggctactggaatgagctcacagggcagggttgcctgaagagtctagacagagctagagatctggctgtgctcaggggcttagacccagaaggcccatcttcgccccaaactcagacagccttgtgtgactcttcttggtgacagctagagtgctcctcatagtcaggctccagcaggaagcagtttgatgggaaccgaatgggaagtgcacaggacagatgtctctggttccttctgtcactgatgctactgtgtggagcaacctagagtcgaggaggtcttcagggactttctggggatgtttgtaaacagatcactgcagagccgctcactcactggcctgtgcctgtgcatggagtgtgtgtgtgtgtgtgtgtgtgtgtgtgtgtgtgtgtgtacgtttgaagaagacagtcacggaaaacagacagtggccttcagtggcctcatgacactatgtttgttggcactgggcagtggaaagaggtggttaattctctggggaggttctagacaagatccgtttgagatctgcaaaaccaaatgctaagccgtatgtgtgtctgtacctatgtatgggtgtctgtcttgcttttgctgttcattgagccttcagatccagattgtcaggaagcagaggataaaaatgaaggccactgggcagaagttggaaagcagggctgtcatggtttccagatgtcagttctagattgcatcatgacaaggggtccccctagggcaggaagaacagcagtaggagaggagagagccaggaggactccagctggtaggatggaattcccatttctcagctggaaaagtcaacatcactaactgcatgttctggagtaatttgagtggaatgcagcagctgtctgagtttttgtagttgccccagtttgggcccccttgtcaaatataaatttgtgggagccagcagttttggaagaagcttctgcagcaggctgtttgcctttgtccaatagaatgggacttgtaattttttttttttcattcttggtgcagatggtgtagttattttaagtaagtgatgtgctgcagtgaaaatgggcaactctttttcatttttcagcttaatgaaaaaaagagaagggaggaggagaaaccccagctagccaacttcgtgctaatgcttgtcttttttggattctaaatgtgtcccaaggcactaagatgggataaatatttcagccactagaaagtcctgctgtcggcctgaaaagatttctaacctcttttaaagcagactgggtagtaatttacttgtacaaatccagacacccccatgtcccttattttaactatgtatgtacagattccactcacattctagggggatgaggcaaggggcaggtggaactttctagggaagagtatgggggaaagggaggaaataaattagtgcctgaacacttggctttcttcttagagtggttataagtatttactggagacctacagagtggtcaggtgcccactgaacacagttgaacaaaacagtgcctctctgccttcacggagtgttcagtctagatggagagacagtacagacacaccagtaagcaaaagctgggttaaaggaaaacaggacactaccagcgtgaaaaacggggaccagctttagattgagtgtccatgaagggacctgaagaagtgatgtaagctgaggtctggatgaatgaggttagccaagtgtattagtttgctcgggctgctgtgaggttggtgcagaagtaattgccttgtgcattatgcagttacttctgcaccaacctaacatagcaaagtccacagactgggtggctgaaatgacagaagtttgttttcccacagtgctggaggctagaagtctgagatggaggtgcaggattagcgtcctctgaggcccctctttcttggctaatgagtggtcgtcttttccctgtgtcctcacatggtcttccctcttacatggtctctttcctgatgtcttcttagagggacatcagtcatatggaattagggcccaccctaatgccattgttttaacttcattacctctttaaagatcctcatctccaaatacagtcacattcggaggttctagggtttaggacttcaacatgtaaattttggggggacacaattgagcctgttacacagatgaaaggtaggtggaagaatgtccggggtcagcaaacagcacatctggaggcctcacagcagggggcactgagatgtgttgcaggagatggttcgaaatgaatatctagaagcaggcagcaactggaccatgctgggctttgtaaactatggccagagttttagatttattctgaggacacggagaacccatcagtgcattttaaaatctcactctgtgtgaagagaaggacctggaaggagtgagaagtgagaagtccaaaggttttttaattaagaaactaaggtttgtcaacctcagcactattgacattttcagcgggatgactcttcattgtgggggctgtcttgtgtattgcaggaggtatagcaacatctctggactctgcccattagacgccaatagcacccccatctccccatcatgacaacccaaaatgtctccagacagtgccatatgttcccaggggggcaaaattgatccctgttgaaaacccatggttgaaaagggcaagagataatggcggcttggattgggtggtgccagttgagtgatgcaaattggatgggtttgaggcaggtttttgaagacagaatcaataagatttaacctgcctttgccttagtttctcctcatgcctttttttttttagacagagttttgctcttgttgcccaggctggagtgcagtggcgtgatctcggctcactgcaacctctgcctcccgggttcaagcgattctcctgcctcagactcccaagtagctgggattacaggtgtgcaccaccacacccggctaattttgtatttttagtagagaaggggtttcaccatgttggtaggctggtctcaaactcctgacctcaagtgatccacccgcctcggcctcccaaagtgctgtgattacaggtgtgagctaccgttaccggccctcctcatgctttgagtttgatgatgtcacttccctaaagcacacggctgtgcaccagctgcatgcctaatgcggttgctcagaagagcaaaaagcatgtgcctctctgttattgttcaccaggccccaggatccctggtcctgctgagaaagcactttgagccccatggctggcaggaccacctgtgtgtaacagacatggtatttagtctctgcatccacccatccatttgtcaagtccatgtgccgccagccttattgactctcagagcaagtactttggaatctaatctggccaattttcccgctccaaaaatctgtttatcagaacaagatttcacagttgcagtgacgtttccaggggggcttgccttggaggagctaactctacaaatgcaagtgtaagtatttccaaacaaagcagaatgacccttacattccaggcccctgaagagttctctgctacagagcagttctctaacaacagagcagttgttagcaaacagctggaatgtgggggttttctgggttgagcatttgttgtctggctagtatccagtacctggctgcccttctagggtccccctcaagcccttgcctggagatggtgaattggtttcatgttcttctcagggttgttggtggctttctggagtccggtcttgagagggagtctcatattgattcttggctcggtggaacagagcatcatgattaattagggatggctgactttgcactacaataggagaaattgcagcagaataggagaaatagtagcataatacctttgcatttcctaacaatcagagctgcatgatttttgaattccatgttgttccatgctctgggctacgtcttcctgcacagagtctttgctgacactgttctctagacctgaagggtgcttactttttatctctgtgtgtctatcaacatccactgtagatgctaccctctttctcggaatcttttttgatttatttgaattttgactttatcttaaggacaccagggagccattcaatgaccttttaaagttaagaaatgattcatttggtgtttagacagatccttctggccacagaggggagagtgggttggagaggggcaagctggcaggcagggaggccaagttgggaagttgtgctgtgcagcaatccctgtaagaaagggtggctgctttggctggagtcgcaactgtggcaatggagagtcggggactggccacatataggggttgatagattgaggaggggacaagggagatttctaggattctgatgtgggcagttgggcagggtagagcccctcattgtagtttctctcctggagttctccagtgagcgatgaaagctcattttcagtaatgaaacgtgcatgtgcgttattaattctgtataatgcagcagatggtctacaagggaaattccatgcaacaaggccggtggggtgttgcttgcctgtgacggtgtccattgcaattggttgttgcccgcttgttctagttataaaatatttttagtatcaccccagtggtactatcaccagactacagaattagtgctcatctgtgtttggaaaagccaggggacacgtcagaggaaaggcgacatatttgtttgctgaagggtgtgtatggatttactgggagacccagcaggccgaagggcatccctggtaaaaagaacagcacgcataaaggatagtggcctgtaggaggatatgatgttagggatctggaaatctagagatgcttctctttggcaaggtttatgaaagagaatcagggaccttctcttctgctaccccgaggcgggtctagacatccctgttcttattttgctgtgtgtgcctttccagcctaaaggtataataagccctagcctttatctctgcatctttagaacatagcacaagtatctggtcataaatgtccagtaaatgcttatggaatgactcaggagggagctctggagttgtggtgtgctgaaggactggtctttttttttttttttcctgcttttccccaaaactcttttactcacatggctccttatctctcagccattgatcacaatggatcagactggtcagatcgatcagatcctggctcccttgaaaatctccccccagggtctactggtagatgaactcagcaccctgcccacctccaccgccacagcactggtgttctctctttgctttctagcctgagggttggctgttcgggttgggggctttggcactttatgaccatgttcagtggagttgaatctgaacttgcagcttggttctcagcttccagtaactcttgaaaggcaattccatgaccttgggaccctgctggaggttacaaatcccaagttcaagattcaatgtggccttttctacctgtgccacctcaggcaggttggttttataggtctgggctcctgtttcctagagtgaaatgatctcccggtattccttccaacttggcccaacttcaaggattctgtgattgtaagggctacagagtgtgaggcctggaaagatcttgcagttcctaatgttggagacattgggagtccagtgctcactcctgtctagaattttaatttttaaccactgctgatggccagaaaagaacatttggattttacaaccagtctttgatggagaaagaaaaaaagtcagtgaacacccattttgtgcctgacattcaagtatgtttgttccctgtatttctccatttagtcctctcagaatctctggaggtggactggggcagattattagtccatttcacagatgaggaaactgaaggtcagagaggttgagtcatctaccagaagtctcacctataccaaaccacacacctttcagttgaggggcgctgaggtccctgctgttgctgtgccgtctgacctgtcccctctctctgacagagagccagctgctccccgggaacaacttcaccaatgagtgcaacataccaggcaacttcatgtgcagcaatggacggtgcatcccgggcgcctggcagtgtgacgggctgcctgactgcttcgacaagagtgatgagaaggagtgccgtgagtggcctggccctttgctggggtggggtggcagccatcctggggcagaggggagcaggtcctgagcaggcttagaccctgcacactctgcttgctgcaagctggtggttttgtgcctcttgccagcagtcctgcttctttgctgtatctccatctcagagtcacatgctctgtgtagacacagggatcttggtggtggtggagccaacgctttgagagagcagaaggttttaccatcaggctctactaatccctaccctggagtcccatccttgccttcgctttatgtacgagccaactgagcatcccagaggttatgtggctgcagcatcttaaaaccagcaagtggcacattggacttgggaacccagggctgcctgacaccagagtccatgctggtgaccatcttacagagcaccgtggaattttcttgatgattaaatgaggcatagcatcctgccaagtattcagcatggagttgggactgaatacatagtaacgtgctttcccatccccttttctctgccgatagatatggcttgagctttgctggggacatcatcttctaatgggcaccaccaggatcaaatggttttgtgatccttcccaccccacctccttttctgccctttacctgtttcatgacgccgaaacatgcatgagatttgggttgatgatcatctacgagaaaagaggcaccggggatgtgagttgagaggggtccgtggtgtcaaatgatcctgctccctgccctgcagaggtgtatttctcttcctcttcagtttgtctctgcagagtgagcttggccatggtgccctgtgtggttgtcctcctgggtgccctggtaggtaggaagcatgactgacaagtggtgggcacagggttgtctcacaggggattgccttgagaccacatgactggacgatggttcctggctctttcatgtgctttgggcaccaggccacgtggcctgtctgacaggagaactatgtgtcctggctctgagcctgctgtctccctggaagccagctgaggaaatagctgaagacaggttaatcatttgaacttttttttttccctgaaacggagtcttgctctgtcacccggggctggagtgcagtggtgtgatcccggctcactgcaacccccacctcccgggttcaagcgattctcctgcctcagccttctgagtagctggagtacaggcacccaccaccgtgcccaactaatttttgtatttttattagagacggggttttaccatgttggccaggctggtctcaaactactgacctcatgatccgcccacctcagcctcccaaagtgctgggattacaggcatgagccactgtgcccagtcagtcatttgaatttttaacatatttctgaccagaatttggggccgagtctgttgacgcatgggaacgggcactggctttggagttcacacacctctggagcaagctgccccctctgaaactggtccttcgcccatccaaggggtcccatatccccagtgcctgctcctgcccttcagagaagtttttgggatgggaaaattgggggtgtgttatttggggagaatatttcatactgcttgttgcatatgatctttctgaattgatcactatacacactgaatttttatttttgcagaattgtttgtttgtttattgttttccagcccaggctggaatgcaatggcatgatcacagctcactgcagcctcgacctcctggactcaagtgatcctcccactttgatccccctagtagctgggaccacaggagtgcgccgtcacgcctggctaatgtatttttattttttgtagaaacagagtttcaccacgttgcccaggttgctcttgaacccctgagctcaataatccatctacctccgccttccaacgtgctgggattacagattacagatgtgagccaccaagcccggcctgcagaattattttttaaaagtattattatgtctattttagcttttctctgtttctaacatggcctcagaattactagagctataacattagtaatctgagcaaatgacatagtatgggtgagctctgtcatctgtctggttttgaggatttattaaacactgtacaagtgtgccaagttaccatttttgagatatggtgtatatttcaacttcggcacatacggattatcgttagctgacctgggaatgtttggcacatgatcagtttctgaaagaacgcaggattaaggagttgattcctaaattgtatgcccagctttgtcaatagcagctgtgtgatattagtgcattctatggcattctgtgtcctgtcactccagtctcatgattttagaattcatgctcaaactggaagacatggtggagagcaaatgtttttaaaaaagatgttgccggcagctgcctggagctgcttggtttggtttggaacaggctcattcttggctattctccattatttttttcccctgacttcctacccttaacccccaagtgtggtggaggtttgagtggcatttatttagtcctttgagcaaaacataattaaaaaaccatgcgccccaaacatacattaacctctctctgtagcccttctttttttgtctttaaatcgtgaaaacagaacattagaaagtttagacagtagagggaaggagaaaaagtcccttttctaaaacaaattctactttcatttaaaatttctttcttttttttttttttttagacggagtcttgcctctgtcacccaggctggaatgcagtggcgtgatctcggctcactgtaagctccgcctcccgggttcacgccattctctcgcctcagtctcccgagtagctgggactacaggcgcccgccactacgcccggctacttttttgtatttttagtagagacggggtttcaccgtgttagccaggatggtctggatctcctgacctcgtgacccgcccgcctcggcctcccaaagtgctgggattacaggcgtgagccaccgcgcccggcctaaaatttcttatatattccctttcagcctaggagtgagggtgtgagcccttgagaaggccgatttgtgtcaaaatcagagcccttcttcccccttagggggctgtgtgatcgtgggaaacttaccagaatgttctaaactttagcctttgggaggtttaaagagaattctttaacctcctggtgcctcaatttcctcctctccaaaatgggggtaataaggcttctgatacttaacagtgttgtgaaattttaacctgtatgaagcacgcagcacagtgcctgtatacagtaagtggcttgtaaacattaactgctattggttaaatctgtatcaactattttatttggtcgttgtcatggggaaatacggttcaattatctgcttttttctacttaacattagaggcccttggccacattctatattgaggattcacagttgttttgggaggctgcctaatgctctgtcaagtagtgacactgtaacttaaccatccctctatgtttcagtctcttctgtttcagtctcttctgcacttttacttctgctggtcaaaatgtttaggatcatttaaagaacttatgcataaccagacgacagaaatatacaatggtttcagccagagtcagggtggacagggctgaggtctccagggtgaccaacttgaccaccttttcaaggatgatggaaacggctgatgtggaatttctgccgccttcccggagggagggagactggttctgtgtcttgcttatgagctacaaagccctttctctgattctttggagcaactgggtacttaaggggaggtgagtgaaggtggcagtgttctcgcctcggagaggtgattacttcaagtgccctgtggagctttggcattggaaagataatacgcttcttaaaaaagaattcttgcccttttcgaagggcaagaaagagcctggagaggtgtgtcatggtgggatatgaggcagtgagcagctcttctgtatccacagcagaggaaggatttttaccagacaggaagattttttttttttaatcgtgacggtaataagatcacatattgtaaaaattgagggcagagaaggaggaaaagcatctgtactcagatccactattggcatcctggaagttctcattcaggcttttccccagtgtaatcgccaggggtgtacagttttatattttgacattttctcatgtaacatttcaacctgttaacagtttttctgtatctccccccatttttctctttatcatttttagtgccattaacttgctataatatggtttatttacacataatttggcatttctcttctttccagttttccactatgggaaacagtgctcacttgtgaacaggagggtggacatgactttccctctgttttgagaaatttgcttaggctaaattctcagaattaaaattactgggttggagggaaggcgccttttctggctcttgacaccgactgccgacttgttttgctaaaggtttgcaccagtttgttggcaacatgtgaaaactatgactttattttagtcttggcagccctgggtaacatctttaaaaaatatttttctggttaatttaataattgaaaagttactttttttaattaaaaaaaattatctagctagattgagtgttttcccttacctctagttactagttttatttctttgtgagatacctattgatggactaatattaatttccagctgagttaagacattagattttctgcctcttgaatctgtagaagagggtcattttgggacactttgagtatatttctgttcttggttagtggagtgccctcagtgatagttttatccaaataacttaaaaataaaataaaaggaataaagataatgttttacaaaaacgaggaagctccatggaagtcctgattatgaggagagcttattagagcttcctctaggccacactatcccaggcattttacattctattgattcatttgattattgcggaagccttattagtaaccggctggtgtcatctccagatgaggaaattgagcagtagagcgattacatggagcttgcctgttggcccagaaaataagtctccataaccttcctccatcagagacccccagtgggggctttcagtctttttctctaggtatctgttaccctgctgaaatggaatcttactgctatcatgacatattatcatgtcaaacctgctttttaaaaagattctaaaaacgtcaataatggtttcttatagaaatgaatatttacatggccgttagtcctgggagtctctgaaatgttttccttgaagagactgtcctttgattagtgctcccctctgtaataaagcagcagtccaaatttccagaacccacaggggaccaggggtcaagagccttaagatctttttccagttctgtgttgattttagctgctgtctctccgtgttctaaccaagtggttgaggggatcttgaatgtttggggtcgtcttcccaaggcggttcattttcttctttggaaagttacactgattgatgtctttgactttccatgtacagacctggccctttatgtttggtgggtgtgtttggttgaggggggtgtggaggagggataaatttgaggactttgttaaatgataaaatattaatgaatctccaaatccagagatagaaaagtaggtgcaaaaatgggatttgaattttacttgcttttactgttcctgaccgtttcttgaacatgtgttattattgctctggtgtaaaggcataaatccatgagatagggttgagagggcaagtttgggcaaatgatcaccacgaaatataagagcaagaaagctggggttgagattgttcaggctccatactcttcctcttttcctttttagcatctgcctcgtcttctgcctctaggtggtgccacatatattttcttttaaacttgcactgcagggcaagtagagatgtggggaaaaagttggattctgagttatcctttaccttttctaagctttaccaggaattcagctgtttctctagggcacctaatgccggctccacacaccaaatgcctctggaaatcaggaagctttcataggatggatagagcttgctgctgcttctcttgggccgttctgtcatttctcaaagaaggggatgtgttggctgatgagctgtggcttagaaaggcaacctgtcagtcattgtgtgcagctgcagtgggctcagttctccccatcactctgtagaaagcagaactggcacaacactatcattttgggttgaattatagcccagccttcccccacaattttcctgtgttgaagtcctaacccccagtatttcagaatgtgactttatttaaagatggagttttataaaggtaaccaagtaaaaatgaagttgttaggtgggtcctaatccaatacgactggagtccttatgaaaaggggaaatttggaagcagaaatatgtacagagggaagatgatgtgaagacttggagcaagaagacagctgtctacactccaaggagagggcctggaacagatccttccatcacagcccccagagggaatcaaccctgctaacaccttgatttcagactcctggccatcagaactgtgagacagtgaattctgtggtggaagctgtccaatttgtggtacttggttatggcagccctagcaaactaatacgaccatcaaactatctcctttgtttaaaaaaaaaaaattattataggctgggcatggtggcttatgcctgtaatcccagcactttgggaggccaaggtgggcagatcgtttgagcccaagaatttgagaccagcctgggcaacatggtgaaatcctgactctactaaaaatacaaaaattagctagatgtgttggcgggagcctgtaatcccagctacttgggagactgaggcacaagatttacttgaacctgggaggtggaggttgcagtgagctgagattgtgccactgcactcaagtctgagtgacagagtgagaccgtatctcaaaacaaaccccaaaaattattatatagtgaatgatagcttcctgcagctgtctaacaggctgacgtctgcagacatcctgctttcatttttttcctttaacaatttgcaagtaagaatctcactgttatgggtcaaattgtatcttccaaaaggatataggatatgttgaaatccaaacccccggtatctcagaatgtgaccttatttggaaatgggggtccttgtggatgtaattagttaagatgaggttgtactggagtagggtgggcccttaatccaatgtgaatgttgtctttataagacgataatatgaagataggagggaagaagaccatgtgacaacagaggcagagactggagggaggcacctgcaagccaaggagtgccaaggattggctttctcgtatgagtgagatgtccggttttttttctgcatcttggttcttggcaagccactgctagccaagggctgaattccaagggccttctgaaggagttgagcctcagaaaacataactggcactctgaagggtctagagaatatcgtggtttaaagctctgtccattaaacacttcagaatgaaaagacatgctctttcacagcgcttacggtgtgcgggaaatccaagacctatgtatattagcgttgcttcttttctcattgagtcattctgtttgtatttggtttttaaatgtctcacctaattcctggcatgatcctcacttcactaaatttctttagtcttaaatgcaaaaccattaatgctatggttaagaacaggggctttgggcccagacagtactgagttcttcccccagcttccatttatgacctgtgcagcccccgggcttaccatgcacctattttctcatctgtaaaatggagataatagcagtgcctatcccagagatgtgatatttcaggggtgatgttttaaacatctagtaagtgctgtgtgcaggccgtaagccagttagaaaggactggatttaaacaataggtactgtttcctggtgcagagaaggtgaagatcagctctgagtctgacatgagctaatatgaggcttgtagctggtgcctggtgtgagttaagcattcagtgaatgctagctgaccctattccctcaaacacatgtatactggtgacatttcctggccagagcaatgctgggagttattactcccctgttcccaacacctccatcctccgcttccccttcccacgcccggtcttttcttgctcttagtttgagagcctgtgccacagaaacaccttcatctgctaggccagtatctgcttttcactgtccagtcttggacacacattcatgagctcacatggaatagcttttagcttagagctccagggagccagccagatgcccaaactggtgcaaaagggaaggaaacaaacatttgaggggctgaggtgagccaggctcttgaggttgcagggaaggaagcttggaggtacctcttctgcattcagatggggacctatgtcttaatggacctgcagtgggcgcccacccccagagtggctgccatccgctgttctcagctctgctggagccctgcacaattaaacacctaagtggattttaatgacgatattttgcttcagcgctcaggcttctcagcctccatgagtatgtagtcttttccaccttcaccacactggcctgaagtcagcaccactccctatggccttcagcactgtaggcctagaacttgcaaaaattactgtcttcctgaccccctcttgccactccagatgtgctctttgtgccttgtggcctatcatgaggacagactttcagttcagatgttggaatcacagcatgaagtttgaggtgggcatctgataagcacccacctacatacagacgtttccaggttgtcaggctacacttaacatgcgtttgactgtattcaaacttttcttaaaggcccctggtagatttttgaagatgttggtaattttacactaaggggaggaagtacaaagtgctccaaatctttctggttttattagtttcctagggctgctgtaacaacataccacaaactgggtggcttagaacaacagatatttattctttcacagttctggaggctagatgtctaaggcaaggtgtcggcccggccgtggtttctctgaaggttctaggggaggatccttccttgccttgtcctcacttctactgatttgctgtctgatatactttggccactgattagctgtctgatatggtttggctctgtgtccccacccaaatctcaccttgaattgtaataaccctcatgtggtcatgggtgggacctggtgggaggtaattgaatcatgggggtgggtttttcctgtgctgttctcatgatagtgaataagtctcacgagatctgatgggtttttttttttttttcatttcaaaaaatttatttcagtagtttttgagaaacaggtggtttttggttacatggtaagttctttttaaattttattttaagttctgggatacatgtgcagaaagtgcaggtgtgttacataggtatacatgtgccatggtggtttgctgcacccatcaacctgtcatctaggttttaagacccgcgtgcattaggtatttgtcctaatgctctccctcccttcgtcccccacccccaacaggccccagtgtgtgatgttcccctccctgtgtctatgcatacccattgttcaactcccacttatgagtgagaacatgtggtgtttggttttctgttcctgtgttagtttgctgagaatgatggcttccagcttcatccatgtccctgcaaaggacatgaactcattcttttttatggctgcatagtattccatggtatatatgtgccacattttctttatccagcctgatctgatggttttatgaatgggagttcccctgtaccagctctgttgcatgccgccatgcaagacgtggctttgcttctcctttgccttctgccatgattgtgaggcctccccagccatgtggaactgagagtccaataaacctctttttctttataaattacccagtctcaggtatgtctttattagcagcatgagaacagactaatacactgtccatccttgtgttctttggcttgtagatacatcactccgtctctgcctccatcatcccatggttctctccctgtgtctctttgcttctttgtccagatttcttttttaaggacactgatcattggattaggacccaccctaatcttgtatgactttatcttaacttcattatatcagcaaagacccaatttccaaatataaggtcacattcacaggtcccagggcactgttcaacctgctacactgggtaaatattgaggaggtaaagctcccagtgaccagcagctaccaccagaggaggcctttgcaaacttagctgcctggtggtccccaagctgtgtggatgctcactgcattcacttggggaatatcgctattaattgttttacctctgcctttgtagcatggtggttatggaacaaaaccaagtgtgtcaataaagcaggaagggtgattcaaatgagaaaataaataaatatatatattttaaaagtcaggtggatgtactcttttttcttctataatctgatgccttcatttggccatttccataatgtgaggatactctaaatgctagttagtatgtatggcagtctgtgaaagttctgtgcttttagtagccctggggctggagggggctgctgtggactaagcacacagtgtcaccagctctccactctccagccctgtttgggacctgggagggctccaactgggggtcccagccagtttggactgctgtcaggttttgtttgtcctgcacaaggacactaaaaacaataattagttgtcggtgtttataaagcaagagcttgcacataaaaattagattatcaggttttcttgagaaatcagatattaggttactttttgcactcacagagaaccatgtccattctgcatctttcatgcatttcaccgtcttgatcattctaaggcctccagtgttttttaaattccgagacacacattttttccccacatttttcaatgggctaagaaaacacagtgtcctaatttaattggcagagttgtttctttcttagttgtacataaaatagtagcatgctttgcactcagtggcatcttggattcaatgaaatgcactaattttctctgattgttagcatatgatatttcagccaatggtgctgaacatttccaaacagataaatgcaccatgtgtgtatgttttcctttggatgctgtgcttagagggtagcagacagggtgcaaagtgagaaggacctggctctgcacccaacactgccagtattgaatcctgactccatcatctgggagctgtgcaacctacgcaaggtacttggcctcagtttcctcatcatccccatggcatttttgtgagaattaaatgagctgaaaccttgaaaccccttcaaacagcagctggcacagaggaagcacacaatcaatgtcagctgtactcttcctggcagtgtggagatcccagctctgcccctagctagtcacttctcttcttggaatctcagttccttcatctgggaaatgggagcagatgtgaaaaggggcagggtgagaatacatatgaaagtgctggctcctggtgcatagcaggcacttaatacgatacacttttccatcttctgccttccccagggatgcattgtgccatgtaagagagagagcctccagggttggcgagagtttttgatccaggctttttcaggtgtcaaagatgagctgggtgattctccatagattctcctttctaacaggtgacagttctgtttcagaaatactgtggatgttcaggtttacagcacattagtcaaaattagcacctcctcttccctgaaccattttcaggagatggaatccagggatctcttgatagtctggttctgaggagtgggctgggggacagcctaggatggggagccccactccaactacaatgctgtcgagttcccattgacacccccaccccctgcccaggaggtgagaagaatcagactatctacctggggtcccggtgctccctcccttgaagctgggacagaagacccaagactctggttgggaagaagttgagtcaggtctattgagataaggcttcctggagcctagagaaaatctgagaagaacttatccaattaagtatctcccaggagaagagtgactgtttcattttctgaagtgactaaatcccccagttcttagaacgtttgtttcattatttagttaagtctcctgtcacatatctctgctggtgccattctaatcctattctggtggtgatagggggacttggacggcatctgcaagaatcccaccaggcctcttccatctcccttggtccctcctaggtgatagcagctgttgtttgggacctgccactgctttcttggaaactaccaatttaaatgccaatattgtcaccagctgagaagtgagtggtatggagtcgtcttaaagttgtcttttaaaccaattcttttgcacaaatatcagcttcattccatctcgccagtcttcttccccacttccagagagcttcattatcatcagcactgtgtgctgccttttctctgcttgcaaggggagaatcttaatgaaataactctgagctggggggcaagggtcatgtttctgtgtttctggaatgagtgtggtcaggttgcctgggcccctgtcattccagcatgctctcattgccaggacttggctgtaactgcaaaatatagtcagtggtaatacgcttggtaatggctaataaaatttaaatggctgcaaaatcacagaacatcaaaaaaaattttctcctggcacatccagacaaatcttgctgatccaagttagggtgtgcagtctttatttttattttttaatgcagacttgcacttttatctgcaacatagctagtgtgcagttgccagatcgctttttaaaaaaatcttgagacagatgagaaaataataattagaaaaagagaatgtggtgcattcatataatgcagacacatgaccagagagactctctcactagtaacacttgaatattttctaaaggttgggagtgggaggagatgggggtagagaatctttgaagtcaaaaggtaactgcatacccctctttagaaagcatttcagaaacttttagcttttgacatggttaatgtcatgtccttttctcagatcactacaagaggagtcacataaaatgtagggaatgtcttaggtctgaaaggctgttgggtgttctagaatcagtgattggaaggcaaaggactcaggtaggttacattgcaagtattccatgttctatagcactgcagagctttaggttaatttcaaattaaaatacagtccttactcccctgaaaaggcatcacttgcatgtacctgagttacttatttctattgtccttgcccttcattttggtgggataagggtggagaggcaaaaaatcagtgtctcagattctctatgagatttaaatatgcaggatctgaagaccatcttggctcctgctgtctcctgtcaagtgaagtgttgtttgcctctcctgctctttcaggatctagcaataaagcctgtgatgtttactgacctctgagagagaggtgaggagaatagacccgagaattttgtttatttggagagaggagggagagaggccatcctgttgctttcttgaatcacatagagagctaagagagaatgcttcaaagatggattggacactgttggaggagtaagtgattgtggtaaggaggtttccatgatctatgttttccctcagctgttttgaacattttagccaatgacaagtgaactgtagcaggatcctgctggtagctgtatgtgtgttcctgagcctgtgcaagcccatcaccgtcactctgctgcatgtctgtagaccttgtcctgttgagccctgggcagtgcctgctttttgatgctcagaccacatattcagattgttgttggtccccaggcagcagggcaggcagtctggtgggccactgagtgaagctgttggatgacagggagcagatggccctgatgcagaacatggtgggtctctgccacttgtctgacattaaaatccaaactagggctgttcccagttccctggaatggaggccactggccagtctgatgctgttaagggaaagttgagtgtagttcagtggtgacagtgctggctgccttgattcaagacctgactgctgcatcctctctatttttcgtcactactggcactcagagcctatactgagtgtccctttagaaggatgtagagttgaagaccctctgctttatttttttcatttaatcttctcagagtgacagtatcttaatccattcaaataccactaactgggtggcttataaacagcaacacttatttctctcagttctggagtgggaaagtccaagaccaaggcactgacagatttggtgtttggtgagggctcgcgtcctggtttgtggacagccgtcttctcactgtgtcctcatatggtgtaaaggatgcctgagctcccttgggcctttttcataatggcactaatctcattaatgagggctccaccctcatgatctaaccagctcccaagagccctgcctcctattaccatcagattggagactagggactcaacagaagaatttcaggaggacaaaaacatccagtccattgcagggtggaaggactttcatggaaaaagaaagcctaaatatagccctgagggtaaagaaagaagaggatgctgcatatttaggcctgcttatggtgattcctatggctggtgggaagggagaggaaaggtttcaggggcacctagagaagtatgtggtgggtcagtcaggcagggccacataagccaagggaaggaagtagccatgtgcttggtggtcaacatggttgagagcattggcgccaaagtgggatgagtgagtcaaatcatgctctacctctacctagctgtgtgatcctgggcaagttacttaacctctctgtacctcagttgccacatctgtaaaatgagataggaatagttcccgtgtcacgggctggtgaagattaaatgactctctggaaagctcttagaacaacacctgcttcacagtaagcattcaataaatgtttgttgcagttcttgacattacttcatgctttaaattctcctgtataaaagttatggtaaaaaaggttgtaaacgcttgcctgccatcatctgtcagtcaccagactaaccataatgacacgactcataaattttcggaatgaataaaggagtactggagtgttatcttggtggctcagcatggtgctgccaaacaaaaagaaagaaaagaaaaagaaaaagaaaagtgaaacaaactaagttttgagtcgtctctcgaataaccacaaaataaagggctaagctctttgccaccttgggctcctgggctcttagggacagtgcccaaccagtactttctaaactgtgcttgatgggtcacattactcatttgttaatgcagatttggggatgactgaaaagctgctggaatagaattcttagaaacagagtggagcccaggaatctgcatctaaacaagcagcccaggggagtctggtgctcactgaattttgaaactcatctgtcataggactagactgagtctcactgagtaaggaagttggttggacaaatcttacattgccagcctcttttgatgtctgggtagggggaatgttcagcagagcattccttctgctaagtccaggcagatgcattgcagttagtttggtggcctcaaaagcaaactgttttgaacagggagtgctaagtaatgggatggtgacatgatatgggttattgctttgttttgcttttaaagttctttcatgcgtattatctcctaaagaaatcaaatagatcgcagatgctcttgttgcaatgcccatgagaggagatgactttatctgagccagaaatgaaattctcagcaagagacacctgtctgttggaaatttcaacaaatattgccaataagattatatccctgttaacagtgggtatctctggaaggtgggataatgataattgttcatttctaacatcatcttattttggcatgggaggcagtgtgtggagtgcttgaaaacacacaagcttgacagaggccaacatgggtttgtcctagttcctttgcatactggacacattatttaatctctctgtgcctcagtttccttatctgtgaaatagggaaataataaaatagaatctacctcctagagtttaaatacatttgtacctgttaagtgtttaacaggtattaacaatgcttgacccttcttagttgttgaaaagaattagctatagttattaacaatgtcatctttaagtacatgcaactggttgtccttggaccataaagaaaaattaaagcataaagagaaatgctgcccaggtcctagaagctgatgtgtgaagggtctagcatatctgtcataaggaccaatcaggatttgctaggacccagctctctgatttgaggtctgattttttttttttttttaaactctgcagtgaggagtaggacccctatctgtttttctaactgtacttcttggagtgccaaagggagaaaggagagcacctgagccatgggggcttggagcatggactcttgtccttgccgaaaacaaagcagctataagtctattttgtaaaaaatatctattgggcttgagatttgattttcacagaggcttctgtggtaaacagacaaaagagttgattcctactggacttgctctctaagcagccttttttttctttctttttttaaatctcattttgacatctgtgattccaaagacagcactgtaattgtcttttttcagaacagagctcacttccaactatcatagcatgagagtactcagaaatttatttctcataatgagccaaaatctctctgcaactctttaaaggtagctgtggagcgccttacgtgctaatgagctccctgttaatagaaatgctcaggcttttgatggtttcagctcccagcttcactcatgactggctgtgttgtacggctgggtaagtctcgccacctgtccaagaaataaacataaggatgtatacaaagtgcttggtacagtgcctggtagacatcagccttggctgccactagcagcagcaacactactgttctaacaatcagaagtgactggtgcacatctgcttggaatcctcttcccgtgaccccagaagaagagacttatgttcatggttaaggataatttttagatgatgccattaagatctctcttcagtgcccttgacactgcgaatgggccatgcaccattaggagatggggcctttcacagttactacaggggctacctggaaacattgtatgagcacctccaagaagttgtcatgtgactcttataaggagtcaccctaatgctagcagttagctatgcccacagacaaggtgatggatggggttccctagagtccatccatcctgcactcttccctttgccctgtagggtatatttcagaagaaaacataaactgtggattgtataatcatcctctgatgcaaaccaaactttggcaagtgtaaacgattatgaaaacaatgcatatgtgaaacacactttccctgcgctctctgtttaatatcccaggttgtgtgccaggtttcccccccattttctgcatttcagaaatattttgtttttcattccagacagtgggagtacaaaggcagatttgtgtcatcacttaatttgttaattctgccaggatttttctcccaccaaccggcaatcctttttgaagtcttatatttaaggctggccttgaggaaaattacataggagcagcattgtatttaccctttgtatgactgcaggggatgtgagtaaaatcaaaacaaaacaagcaattttaaaaacaaaacagtacctctgtgagtgaattccagagtagaccggtatgccatggccgagcaaggtagaagagcagctcttcttgaccctgcatggaacctagagcatggggttttactttactgagccttcttttccttctaaatagaaacatgccctctggcatcttcccagagatgctggctatttacaggattgacatcacccagttctttgatttctctgctgatggaagaacagaattgtaaaacatcaacagaagctgctgcttaaaaagaatgaagatggatggatgcatgggtggatgcatagatgaatgggtggatgggtgggtggatggatggatggatggatggatggaagtatgcatggatgcttggatggatggatggatagatggatggatgatgggtacatggatggatggatgatgtgtggatggataggtggatggatggatgaatggatggatggatggatggatggatgaatggatggatggatgcctggatggatggatgaatggatggatgatggatacatggatgcatggatggatggattgatgatggatacacggatggatggatgcatggatggatggatggatggatggatggatgcatggatggatagatggttggatgaatggatggatggatgcatggatggatagatgaatgggtggatggatagatggatggatggatggatgtgtggatggatcacacacacacacacacacacacacacacacacacacacacacacacacacacttgctctctcagcacttttaaaggatcacttgattgattcactttaacagcctcatatcctccctttccacctgccctgaccccaattcctgcttgtaattaatttttcttctgaagggaaatattctctcaacttttctcctttttgatttgggtcccaaggggtatgaactcttggagagtgttatccctccctctctttctctctcagcccttgcatagatgcctattatcatcagttcaagccatggtatccagatattttgcttggatttaaaaccagaggcagaagctaatgaagggctttcatgttcagaaacagagggttcctggcagcctcactggcttctccatttaattccatggtgctaggggcactcccactgcttagcacagcctgggggactggcagatggcactatcggcccagaagggccagtcttccctggttcagccattgcctgtgcagccacagtgcccgtgtgcagggtagaaaccacagcgctaaaagacacttgcctgtggtcttcctagttagtatactttggtgcaaagaatgaactcttgctgtgggtgagcactctcgcttttctcagccgtagttttctcatctataaagtggttctgttatgttaccttcaagcacccttacaactacagacctctgtaattttcaatggaatgttctcttccttgtgaaaatacagaatgtttttcttgcaggtggacctgcacatgtaggaatgagtttgggtagctttaaggttatgcaaaatggtagagactctaagtgagcatgtagtgtaggggttctggggtcagacagcttgcccttttttttttttttttttttttgagacaagagtcttgctctgtcacccaggccggagtgcagtggcatgatctcagctcactgcagcctctgcctcccaggttcaagcaattctcctgcctcagcctcctgagtagctgagattacagtcatgcgccactacgcccggctaattttgtatttttagtagagacagggtttcaccatgttggtcaggctggtctcgaactcctgactttgtgatccacccgccgcggcctcccaaagtgctgggtttacaggtgtgagccaccgcacctggctgacagcctgcctttaaacagcaactgaattttatataataggcactgtgcccaatgctctgcatggatgatctcattcagtcctcacatcacctaagttctgctagtatccccattatacagttggagagttgaggcttagagaagttaagtaactggctgaggcacttgggtggcctagccaagttttgaaagcagacattctggcttgagttgagccactgaaccactctgctgtgctgccccctgtgggtaagtgcacaccacggcaggtctgtatggaggaggttttcaggattcacttggagctctcggaatgcataaagtgcaatactttcccattgccgcaaaaagatattgcattttaaatgtctgaaatcatgattgacttagctcctcagccctgaagggtgcagcagtggcttgaagcatcagaaccttgaaggagatttctttgaggaacactttgctatctcctgttaaaattagcagcaagcattctcagggcactctccactaaatatgtctggcaggagggtacacgatacctctcccttcactccccaaatcctccctgtattgcagtccagagcttttcaaactttatatgcattcaaaaggcatgggggtcttggtaaaatgcagagtctggctcagtaggtatgtggggtaaggctgattgaatttcaaacaaccccccaggtgactgttgatgcactggtctgaggtctacactttgagccacaagggtctagagtttatgattttcagggagctaagctggctgtatcagaatgacctggagtcttcagtaagcagcttcccaggacctttctgggatattctcaatcaggaggcctaggatagactcaggaaactgccagtgtcccaggaaccacactatgagaaacgccgcctcactcagtggttcctgtgatcgtcagggtccctggtggattgaggccaacttgggaaacattgattattgggtttgggatggggccagaagcccacttgtatcctgtttcgccgggggagcctaatctacactcaagtttgtgaattcctcgcagtaattacttctttacctcctcatctttcgtctgtcccttggccccaaactcttcctcaagctagtgtcccactggctcttgttccttctcctttgttgtagccagtgtgtgactccttggccctctgcacctggcttttgcatcctccacagtaatgttttgctccaagaatctcttagttgtcagatccagcaaatgttgaaatacgctattacttggccttgaagcggtactggacactgcagactgcctcttcgtcttctctcctttgtttgctgagattctgcccactatctcttggctgcccttctaccttcttggtcttcctccctggatcgtcagttgcctggaaatgaattctgacctttccatctaatacattttcccttgctcatttatttccataaactagtgatcctcagatatttttatttcctgaatgattgtccgaaaccacacatttgcgtcaccatttccttgcttaacgtggactctggagccagctggtctgggttcacatcctggctctgccacttgtcagccaagaaatcttgtgcaagtcactgagttctttaggttgcagttttctcatctggaggagggatgaagtacctcatctcagtggagcgcccagcactggggttgatgccctctgagcactcaggagatgtctctttgattttcctttaatcattagtaataagtagtaggaataataacaacaaccctccagtggctcccagattgcacatgaaatcaagtgtgtcttagagagccctcctggctggtccctcctgtctcttcagcagcagctccttccctcctgctctccgcccgccagctctgtctcacaccctggtgctgtggcacatgccatttccctctgtgcctctgtcttccaggcacaacactggaatctcactggagcactcacaccacttcccccagaagcaaagagccacgtcttccttcacgcttctggtcagtcttgggggtttttctgaagcatatgacctactttatcaactccatttgcttataggtctgcgtctctgtcagattgcgagctctttaagttatgcttgcatccctggcatcgggtttggctgacactcattgtggactgtttgaatgaatgaatgatttagtggcactgcaaatcaaaacccagtccactggtatagagggagagccctctgaatgtctgagatgatcttaccttgttacatacaaaaacttagaaatccttcttgagtcctctgttttagtaattgcccactctccctattctaatccattagcaagcccagtcaactctacttctaaagcagtgggtctcagtcagaggtgattttaaccctcatagtcatttggcaatgtatagagacatttttgatggtcacaattggggttgcagctggtgtatatggatagaggctaggaaagatgtgaaacaccttacaatgtataggacagtcacctcaacaaagaattatccagctttagtgtgaagagtgctgaggttgaggaaccctgatttagaggatactgagttcattcacagctctctgtcttccccactcctgtgctagtgtaaggcactgttgtcactccctggactggtcttcctgcttcctttacctccctctgtgcctccctctgtgctctcagagcatttctcacagggcagctgagtggtcttttataaaggataaatcaggccaggtacagtggctcacacttgtaatcccagcattttgggaggctaaggtaagaggaccacttgagccgaggaattcaagaccagcctgggaaacatagtgagacattgtctctacagaaaatgagaaaattagctggtcagtaattcatgcctgtagttccagctactcaggaggctggggcacacttgagcatgagaggttgaggcagcagtgagccatgattgtaccactgcacacaaacttgagcaacagagtgaaaccctgtctcagaaaaaaaaaaaaaaaagataaggtcactcccctgtaatgacttctcatcacagctagaattctgaactcaaactccttagccaggctgaagaagccctacctgacctggctcctgctgacctctctgattcattgtaccctcccctgccatccctgggcactctgcttcagccccactccacaacccttctttctgtttcaagttcttcccaggctttaggtatgttcttgagatgttgcctctgcctggctgctgtcccctcttacccttggttggctgacttcttgtcttctaaacctctctggaactgcttctgccttagatattcctttcctcaacacccaaactacttgtacggttgccgactatcacatctccgtacatcaccacctagcacttagcactgcctgatttgttttttgttttttctttttcatcctcccctgactagagcaccattgagagtgagacctcccctgccttgtgaaaggctctatccacccatgcttagcacaatgcctagcacatagccagttatcaatagacagtgatgggaataggagggatagtaatagtttacacttatgtaatggagactaaaaagtctaagtgctttacatttaatctccaaagtagttttgcgagatgggtatcatgattggcatcttcattttacagataaggaaatggaggcatcagaagttatataactcagctgggtgaggtggctcatgcctgtaatcccagcactttgggaggccaaggcaggtggatcacgaggtcaggtgattgagaccatcctgggtaacactgtgacattccatctctactaaaaatacaaaaaactagctgggcatggtggtgggcacctgtaatcccagctactcgggaggctgagacaggagaatggcgtgaacccgggaggcggagcttgcagtgagctgagattgcgccactgcactccagcctgggcgacagagcaagactctgtctcaaaaaaaaaaaaaaaaaaaaagttatataactcacaatcaaagatcatgtagccatgtagctagaaagttgcagagctggggtttaacttaagtggtccaactccagagttgttgctcttaatcaccccaccacagtgcttgttgaggaaatgaatgtggaatttgaatgatgaattcacactcatccttccttagggtagcctttgtaggattgggattcagtctgatctgggttcaaattttgtaactgactcacattttatgatttacttgcttgtgtgatggggttatggtgtgggagcaccaaaaatctcttgtcttataaagagttcacttctaatgttctggatacttctctccatcctcactattgatcatgcttcctttgttgttttggtcacaaggaaactcaactaaaatttgagccctgatactagtaatcatataatagtttgtggaatgcttttgtctattacctttcttttctgcttttccttataacatcccattttccacattttaaactatttatttatctcagccaactcaatttatgaaaatatgaatttataacagataaatatgtatataaaagtgtgtccctggacaggttacctaaccactgtgatgcttcctgtcttctgtgcagtgttggtaatcattcctgcctcacagttttttggtggagcctaagtggggtaaagtccacgaaagcccagaacacacaataaacatttagtaagagtgtcttcttcctcttcctcatttacggtaaagatgaggaaatctttttttttcccctgagacagagtctcgctctgttgcccaggctgtgatgcagtggtgcaatctcggctcactgcaacctccgcctgctgagttccagtgattcttctgcctcagcctcctgagtagctgggactgcaggcacgtggcactacgtctggctaatttttgtatttttttagtagagacggggtttcaccatgttggtcaggctggtctcgaacttctgacctcaagtgatctgcctgccttggcctcccaaagcgctgggattacaggtgtgagccactgtgcctggccaagcatgaagcaatcttgtgctggtacctggcatagtggaggtgatagaaggtggtttaatatgtcttactgagctgctaagcagcagctgcatgtcttattgagctgctaattgatactactaactggggagctccattacaaaaacccacaataaatgataggctgtcatcatgccctgttttgggcggctcttttcactataataaattggtttttgagcagcagaaagataataggtttagtaagtagaaaagactcgaccacagggggcttgtgcataaagctcagcctggaaaatggaaagcatttatcagtaagacccacagaaacttttattactatggcaactgggtctttggtaagtctctctttagctagattataatgtagtagtgaggaatatcaactgtatgtttcaattgcttattagctcataaaattgccagtttgcatattaattgttactggataaaatagccctatttttaggtgacccagtcacccattttctgataccaagccactttgggaacttaaaaaaaaaaaaacagtagttatagtaataaaaactcttagccttagacaggcatcttctcatttaatcctcccagctactctgtaaggtcagtttcatctcccattttacagatgagagaggaaaagcccagggcagttaggtaacttgtccaaggtcacggttctggtaaggtgtagatccaggatttgaatccatgtctgtttgatttctatgataaaaataactttatagtcttaaccattaatatgggctatagcccatatgatatagaatataaagtttctgtaaatctgaaaaggcaaaaaatccaagagtattgacctttccctagtacagggttggttcttcaacctcaaaagtattgacattttggggccaggtaagtctttctttttgttactgaaacaccaggggttcggtctaggtcctgttactcgacacacagaaagccaatcactgacacgacgattattgccaaggaagaagcctttaattaggtgctgcagcttaggagatgggagctcagtcagtctcaaatccatctccctgactgacatggtttggctgtgtccccacccaaatctcatcttgaattgtagttcccataatccccacgtcatgggagggacctggtgggaagtaatttaatcatgggggtggttaccttcatgctgttctcatgacagtgagtgagttctcatgaaatctgatggttttataaggggcttttcccccatttgcttggcacttctcgctgccgccatgtgaagaagcacgtgtttgcttacccttccaccacgattgtaagtttcctgaggcctccccagccatgctgaactgtgagtcaattaaacctctttcctttataaattacccagtcttgggtatgtctttaggtgtatctttattagaagggactaatacgttgacccactaaaactagctttgtatagcagggaagaaatgtaacaatgtgtaagaaaacaggaactgggaaagggcaaggaaacgattatgatgaatagagagtctctgcatttcattgtctggatgtggtgatctggtgagtttcagctctttgatacttttttgagaggcctgaaagtccttccctgaggaaggaactgaaataaaacaaatgtaaacttcaaacttaagaccagaagggttatccacacccaccccactacatcccccagtattgcctaactttgcctggggaggaattggctaattaggactttcctggaaaaaagcaactctttcatttctgatgtcaccagtcttcttagatctcaggatttaccagaaagttttgttctttatttggttatgttcagagagctgtgcaatttattgcgactatctaattttagaacattttaatcaccccaggaagaaaccatgtacccattagcagtcattccccattcttccctctcttagtccctgggaaccactaatccactttttgtctctacagatttgcctattctggacatttcatataatggaatcatacagtatgtggccttttgtgtctagcttctttgacttagaataatgttttcaaggttcatctgtgttgtatcatgtatcagtacttcattccattatatggaatataggagtccagtttcgttcttttatatgtgaatttccagttgtttcagccatttgttgaaaagactatccagtgaattttcttggcactcttgtcaaaaatcaattgactagaaaagtaaaggtttgtttctagacactcaattttattttattgatccatatgtgtacccttatgccaataaccacagtgtcttaattactctagctttgtgtagtacatttttaaattgagaactgttagtcctctaattttgttcttctttttcaatatggttttggctattcagagtcccttgaatctccatatgaatttatgatcagcttgtccattctgccaagaagctagctgagattttagtataagggttccatagactctgtggatcaatttggggagtattgccatcttacccaattttaagtctttcaatttttgaacatggtttggctttctgtttacttaggtcttctttatttcagtgatgtgttgtagttttcagtgtacaagtcttacacttcttttgttaaaattattcctaagtattttattatttttgatactattggaaatggaattgttttcataatttcatttttggattgctgattgctagtgtatacaaatacaattgattttggtgtatccaccttgtctcctgcaaccttgctaaacttgttcgttagttctaatagttttttttaaaaaatttttgagacaggatctcactctgttgcccaggctagagtgcaggagtgcagtggtgtgatcacagctcactgcagccttgacctcccaggctcaagtgatactcctgcctcagcctcccaaatagctggactacaggtgcaggccaccacacctggctaattaatttttttttttttttttttttgtagagatggggttttgccatgttgcccaggctggtctccagctcctgggctcaagtgatctgcccttcttagcctcccaaagtgctgggattacaggcatgagctaccactcttggctagttctaatagtttttttgtgtatgagtttgaaatcgttcttgttttctaatgtaggcatttacagctataactttcactctcagccttgttttggtatattgtgcttttgttttcattcatctcaaattattttttaattttatttttgatcttccgacccattggttatttaggagtgtgttaatttccacatacttgtgagtttcacaaatttccttctgttgttgatttctaatttcattccattttggttggagaacatatgttatatgattgcattccttttaactgtattgaggtttgttttatgtcctaacatttggtctgtcctggagaatgtttcatgtatgcttgggaagaatgtgttctgtggttgttgggtagcatgtcctgtagacttctattaggtccactttgtggtggtgttcatgccttctgttttcttgttgatcttcagcctagttattctatccattattgaagatggagtactgaagtttctaactatcattgtttaactgactatttcttcctttaattctgtcagtttttgcttcaagaatcttggggctctgtttttaagtacatgtaattatgtcttcctgatagaagacattggctattttatcataaaagttctactttgactctaggaactgaacttttttttgtcttaaattcgattttgtctgatattagtatagccacttatactctcctgatttcaaatatttttttaagcctcccaggctattctaatatgcagccaggattgaaggcactgcttttttggataagttagaagctgaggatcagtattttgttgttaaagttagctcatagctaccaagagatgatagccatgggattttctgattcctgtgactgatgtagaaggcattatagaaatttcaggatgccttggtgaaacctttcctagagcaagacttgtggtgcactaacgtactattttccctaaagagttgttttcaagttacatcatgacacagagaatgttttcttgtgcaggctgtgggaacagcctgaaggagcctccctccctctctgccctgttgacacactcacctctgatgtatctgaatggaagtcttcagttcccgtgggtgttacagtggcttatcttcacattgtaggcctttatatctgccctttgcaggtgttttgagacaaaacctgagttttagggttctgctgtttatgtggatcatgtggggagggccaagaaaacctttcagagatgcctctagagagctcatcagaaatgagcttcctctttggagtccgaaggcaaagaatatgccacggaagcgaggatgtttgaagaaggaaaacctcaaggtttgctaggagccaaggggatgggagagggtggaggctctgaaaagtaaacccttcttcttttggcaaagataaccctccttgcctaagtgagatggaaaagggtctagaatggagtcctctctgagttcattcagacttgaaaactgtctgtgattcttacactcttcactcattttcttttttttttttttcttacttttttctactgcttgttaggagtcatcccttagatatcacctttcatgcagttggatgatacctttactgaaagactctttttttaggtggaaactattctgttctccctgaatctctgtgctcacatctggtcttaatcccagggacttggatccactgtcaggaagtttttccaccaagtagtgaaaagcctccagaggctcagttacctaacccacatttatttattatctttttagatctttcctcacccctcaagatttgtctgtagaagcagcggttgggaatatcttagtttcctgcttataaattctctagaattttcattccaatgtatatgcacacaaaaacctctttatccacatatgtgtgtgcattacaaatagccaaaataaataacctttaaaaacccctttacattataatttcctaatcccaaacttgcttggtggaaattttgccttttttttcctcgtcattcttcgtaataaaagtactttaaaggtcgatgatagccactttgaattctgttatggtttatagtgtctttctttctaaaagtacgaagaatattatgggcttgtctctcttctgctccctcagggctgttggggggatgaggagatttccttgactttcaatagcctcatgatatctttgtgagttcatataaaaagtttcttcagaaaaaacaaatctgactcatcactttcctttagaaagatgtctgttggcttccaggataattccagactcctgtctgcctcgctcccagacgcatctcctgccgcatagcccatgtcccaggtgtcctaacttctcccagatttctgtacaagccataacctgtttcaactctgagcttcagttcatgccattcctcttgtctggagtgtccttccctcttttttttcactaacacactcctaataatctttcatacccaactaaaatagcacaggtttatgaagtactccttggcttccccaggctgagtgggtcccactctttctgagttccttttgcattctggccattccccacgtattaattaagcatccactgctgggcagaaagtgtctgaaatgataataataataaatgggaatagtaataatagctaatactgtataataatgctggataatctgtaacactcaatactacataacactacattttatattttataatactatattttatagtgtaatatcaaataataagatgtaatgtataaaacgatagcaaatatagtattaactatcatagctaatactttgttccagaaaaagtgccaagtaattattacattgtcttatttaatcccctcaacaactgagcaaggttggtagtgttcatctctctatttcctgataaggaaattgaggcacagagtgggtaaccaacttaccataaatcatatggccaataagtggtagacacaacatttaaacccaggcaggctgacatctaactgcttaactgctgtaattaacttttttttgagacaggatcttgctctgtcacccacgctagagtgcattggtgtaatctcagctcactgcagcctctgcctcctgggctgaagcgatcctcccaccccagcctccagaatagctaggactacaggcgtgtgcctggctaaatttttttttgtattttttttgtagagataaggtttcaccatgttgctcaggctggtcttgaactctgagttcaagcaatccactcgtcttggcctcccaaagtgctgagattacatgtgagagccaccacagctagccataattaactgttgaaaggcaaatgttgatacagcttctgttgtgcttaccacatctcattgcaatcatctgcttattgtctctttttcgttctctttctcttggccaggtgttttttttagctaagggcctcttgctagcaggaatcattcttgcagcccccacacttggttctgtgtgtggcataaagtgagtttgagaattaatgttggtggaatgaataactgaaagagcaaagccttagactgtctaaacattacattgatttccacctcatttttctcaggactagccgtctatgtgtaaagcaatttgtagaaccatgaactatgttagggaagggagggcattactgaatctctaccagatagcaagcattttgctgtattctctacatgcaaaatctcattttattttcacaacagcttgggagttctataccatctttatcttccttttacagatggggacgctgaggctgagggaagttaagtgattcatccaagatctcagtgattacgtggtggaactgaggtggaaacctggatgcttcttttcttttctttttgacagagtctcactctgtcacccaggctggagtgcagtggcgcaatctcagctcactgcaatcaccgcctcttgggttcaagcgattctcctgcctcaacctcccgagtagctgggactacaggcatgtgccaccacacctggctaattttttgtatttttagtagagatggggtttcaccgtgttagccaggatggtctcgatctcctgatctcgtgatccacccacctcagcctccccaagtgctgggattacaggcgtgagccaccgcgcccagcccagaaacctagatgcttcttatctctgagtccttctgacctcttaaccctaggctgtagacctcctcttctcagcataaaagagaagagttttggaaagaattttctacgagagaatcttgtggcaaagctgtttcaactggatgccttctttctgtatttatattccagttagcgtatggtctgttgctctttcactccccagtgtgtacgtctgaaacagccaatatgttattttaggaagaaataatacattgcaatatctgatcaataaaacttggagtctactccagtagtcatgtggagctgaactgttgcaacaagcaaaggactttttgctcaagccataaattttgcaaaggctagaattccaggagtgagtttgctttctgggctgtttgtcatctgccttgggaccacaataaaggagctcccccgtttagcccccagatttcctggagaatccaggcagattactttttagaagtcagttatttttacaaggccttctttgctttcttgtccccaaccatgaagtcattttcaaaggaaccacagtttgaccttttaccaaatgagctagaggactgaatatattaatagcagcaacatcagatcgaccgctttttgcagtttttagctagcaatggccacatgtcggttttcactttggggagctgtgcatgttgattcaaattatgtgaattttatactttgattcttttctaacatatacttttgattagcccttgtcattctcacatctttacagtgagctgaattgtaactggttcatagcacatttttttatgagaaatagggcttttttttttttaattaatgaaaagatgccaggtacttttgcgtatatgagaagcttgttcatactgacctcctttcagttgctcctttaccacattgttctgcctccaggcctttacacaggcggcttggaacatctttgattccacaattccacaaacactaaaatttcaaatgtggcctaggtgtcttctatgtattctcattctttgcaggtgcgacacagagtttgtgaattaatattagtggaatgaaaaacggaatgagtaaggcctcatgctgtaaatattacattgcttttccgcctagaccgtggccgacctcagctgaaaccgaccttcccctgagaagcctgttctgatgccagcctcgttcctagtttgagattaagcatcctatagctccccaatcagggcactatttgcattacatgcagaggctcctttacctgtctctgtcttccactatcacagagagagcctgtcagcttcgcttttgaatccccacacaactgactcagcaccagacaggtaatagaatgcttaggaatattttgatattggccaaacaggggcagattctttattgcctctttaatcctattttctgttgggcacaggtaaatgtaaatccttacaaagtagacagaactgagtaagtttcaaagctctaaaaagggcctttttgcttgaacaaaaaccgtttgtatatgagcccacagcttttgtgtgtgaagcagaatttgtatcttgcacacaaatggggaagaagagagcagtgttgaaatggggaaagatcataaagaggccagttgtttccttgtggatatttatctcatggtaactcctctatctggggtgtattagacttggcttgaaggagtcatggccagagtaggtccctcattggctgtgtagccatgattcttggagcggcaataacatcaggaagaaaggaatcatgaggccatttgctctgtgggtataagaaggtggtagaatcggtcagagcaggatgttcacattttagtgcccattgagatccttagtgtgcttagtaaaaatgcagattcccctaggggagagactcaggaatctgcatattcacaagcgtccctggggatcctgctgcaggtggatcactgacttgttctctgcaacactgccccagaggatggggaattctggagaaatactggcaagtaggacagtcctaagagcgagagcctgcccttgccctttgtcaaggtccttagtcaaaggagaccatgtagcccaggaaagtcaactcaaggagcatctcacagaaggaggatgctgcattttgccatgattcctgcaacccagagaaaccaattccagcaaagatcgatgccctgtacccggtgcaaatttagaatgataaaaagaagagtcatggtttccttgaccagacaggagtgtcccctactttgcagaataatgaaatacacagatgttaaaatgaaaagagacagagatggatggagaataatagagcgcagcagcagttaaggagcaacttaacaaaaatgcagaggaaccatgggatgatctcagcctttgtgcttctaggagcgtcattgccaacttgagagaatcagcccatcgcagacaatcctaggctggaggcttttctcatagctgtctgtggccagaagacaataccagttcctcagggaggaggcagtcaacagtcaaaaggataccaaaatgtaaagcatgcatgtcctttgacctagcagttatactttcacgagataatatacaagtgggaaaaataatatatgtatctggctgtgcattgtttattgaaaacaccccaaatgtccatcagtaacgggatttatggatacatagacacagtaaagttacccttagccattaaaaatgatgatgtgtaccagtagttattgacaagaaaagatgtcacaacatattatgtagcaaaaacaggtttcaggatagcatatattttaagggtgcatttaagtaaaattgcatgctcggatttctgcctattaattcagtcagtaattattgagtagtctgtgtgcctggcacttctctgggcattggagatacacagtgaacaagacagtggccctttgctattggaagtgtggtacctggagccagcagcatcgcctgggagcttgttaggaatgcaggatcccaggctccaccccagacccactgcattttaacaaggtcctggggcaatccatttgcacacactagtttttgagaccatgctgtaagagcatgtttaccaaaatgtccacagaatacttccccacgtggtggcaatttgttataaattttacatctgtctttgtatgttcctccatggtttgactttttcacagtgagctatgtcttgtgtttataaaagcaagggtggtgatattgtggaacagctcctcattcgttgggctctctcagccacatactggcaggatcctggggcaggagtgggaggtgagcaggggttgaaggtgagtagctgttgctcatttggccaaccacagaggtctagaagagagatcctggagacccacagctacagcaggagctgtttccatagcctgagagatgcagcaggtctgattagctgacttcatggctgttctggtggaacagagaggcttccacattgcagcctctgtccagctcttttgtatgattgctgcctgggaagagtctggggaggtggccagagacagcaagcccatgctgaagtttccatcatcctccaggaccttgagcagccctgagcccttcccagacagattgggagctacaggcatgatgtctggggaagagccttctatacaaggcctggacagttctgctcctgtgggagaagggctttttcttgggagtctctcctgtacctgtcccagatgaggggtttgatcaggtatggctctagggtaccctgcctaaagtgtagtgtagttaaaagaagctggactctagagcagaagaactggactatagaccagtctgaccctaaatagctatgtgactttgggcaagtccagttgcctctttgggcctcagttttgtcatctgtggaacgtgagaattagttactgagtgcacctatgtggactgcctgtgtgccccagctgttacacgagtctttgtccttaggatatcacaacctggagacactggaatgcctcctggccccctctagttctcacgtggaccccaaatatgggtcccaggactgtctctgatttatgacctggttgtcactggcttctggtgaaatgggaaaaataaggacatctagtgaacatgtagctataaagtttctaccctttcagggtggagagttctttactctgagactttgccttcctgtatttcggatgctaaggcagctgtttatttagggtattagtaagtagagctcattgctggtgtttttgtaagtctttgtgtaaaataaaaagttggcaattgtattagtctttcctccactctcatctactttttttattttttattttgctgatctgtgaattccaggactgtgggaagtaggctctaaaaagtggggacatgacttagatcaggaaataaacccaactcacaggagacccttggtccccatcttcctgctaatgaaagctgccgctttgaaaagtttgtggaccagatccttgagaagtggtgaattcaagtattcaatggagtagagtcaccctgtctgcctttgtcagggctgctttaaagacaggcagggtcagtctttcaccttctgtcgggcgctgctgagttctacgaggaaatctcccctttgtggaaatagggggtgagagagggacagtcggggccttgcccaggaccccccttccccacagccctgtagcaagtcatgcaggcagggagcagctgacagctgttgtctgggataggcttctctctgcccctgccaggcactcggctggttgcctgtgatctgctttgcaggcatgtgatgatgcaaatgtaaatcataacaggacaggcttccctgacataaacagcaactgagcatgctgaccaggcaggaagtctcattagtaattcctgaaaagggtgcaagggcagggccaaagagctggttaattgaatgatggctaattcgtttataattattcatattttcactcttttctctttctcccataaaacctagtcctctggagctgggctggtccttagagaaatctaaggaggcggcagagcagctgtgccatgggaaagatttgaaccttgactttgtttattagcagtgtcaagttacttcacttctggacctcagttttcttatctgtaaaatgttttttttgtgtgtgtgagaacttaaagaaaaagatatctgtgaaacagagcgcaatgcttagctcatattaagcattcagaaaatgctagccatgttctccggcctcactctttccttttataggttcatttggacattatgcaaatatttatgaggcacatggtgtaggcactgtatggtgcagctcctttaaaaatggtaaatgaaagtatgcaaatgagcgtacgttcttggaggctggaaggcagaggcgttagccaaacagcttaatacaaaactggggagaccaagtagtgatgtgtcctgtgaagggaaagaaaagaaggctgagggttagagcgactaagggtgggagtgtaggttctactgcagatagtgcaatgattcaagagactgagtaagatggaggagtgagccatgctgagccctgggaaaaagacattccaggcagtgggaacagagagtgcaaaggccctgaggtgggaatatgctggctgggcttgagaaggaacaaggaagcctgtgtagttaagatttccaagatgggaagatcttcatggccttcatgagaaagcctggaattggagagcagcatgatgactctaggttttattctaacgtaatgggaaggcagtgacgttcttactagaggagtgatgtgctgaggcttgaggaaacactctcagcgtagatggcaaagcctataagcattcttccctcatccctcaaaaggtgatcagaaccagactggctgatcaaggaccgtgtgtcagaagcttgaacctgtctggaaggacacgatggctggagagctggcagaggggcaaacctgaccctggaaaatggaactcctctgcttttctgttactgtagactttcccagcagaagctaaaatgcccatctgtgcagaaaaagcattaacgcagcaggcctgactgctgccctttgaaaagtctgcttggaacattggcccttggctggcagctgggaacctaaatttcagtaggtttcccattacccaactgttaatggtggctcactgtgcctaaactggctgtgcagacagtgtagttgatgctgtttttctgctggaagtctggaaatttggtgtaccgagaatgcctgtgtgaccagcctctcataaaaaccgtgagcactgagcctctaatgagctgccctggtggatgacatttcacacatgttgtcaacaacttgttgctggaggaattaagcacatcctgtgtgtctaccctggaagaatccttgtgaaagcttgagcctggtttcctgtgacttcatttcatatgcctttcactgtaagaaatcttagctttgattatatgccaagtcctgggagttagcctagtgaatcattgaatctgtgtgggcttggggacccctgacacagcatcttatatgaagggactgtagtgttggtgtatctcattactgatgatgttgaccatggtcccttggctgaggtggtatctaccaagtttctccactgtcaagttactatttttctctttgtaattaataacatattgcggaagatactttgacactgtgcatatcctatttctcctcaagtgtttattttctaattttagcatccattgccagatcttgcctgtaacagttattacaatagtgtctgcttcgtggtgactttctgtttcctgcacctcttctacatttattaatgagaagtcttcaataaggaagaactttcctttctcccctttttacttacttattcaacaatttttggtatcagtctcaggtactagatccttattttgttggcctcagatatttattttattctctgtgtcataatctgataccgttgttgattttgttgcttggatggttctagctttggctattgggaacttcaggttaacttctgtgtccttttgacatgcccccatgatatttggacacttatttactttattttgacacttctggcaacagaagatactctgggttcatcttgtttgtatattcttcctggaatcaactatttctccaaggaggttggttctctttgctggataatggtatttagaaaccaagatctgggtgctaggtgtgcttattgctgttgagatgtactgcttctagtcttctctcagcagacagagctaggaaatgtatgtatgtgcattatcccttacatacacacaagtcaatatttatttttgtctgtctgtccatccgtccatccatccatccatccatccatccatccatccatccatcctgtctgtctaatttttaaagaccttgagttcatactggtgacctccaattccttcaaatttccattggaaattttggttcagtttcaatgaaccaaagcctcaggattcactttagccttctcactgtctttttttttttgagatgagtctctctctgtcgcccaggctggagtgcagtggcacaatctcagctcactgcaacctccacctcccgggttcaagcagttctctgcctcagcctcctgagtggctgggactacaggtgcccgccaccacgcccggctaatttttttgtatatgtagtagagacgaggtttcaccatcttggccaggctggtcttgaactcctgaccttgtgatccacccacctcggcctcccaaagtgctgggattacaggcgtcagccaatacgcctggcctagccttcccactttctttatttgcaacttctttctctgacagaaatcttacaatatatttacatatttgttcacccctagtgcacccagaagacagtttcagaattgatgacccatacccttgggagaaacaaatataactagtgtacagtattgtagattttttttttctttagctttatggaatctagtcaacatactgttttcctgagttacttaggctggttcttttcttccccatccccttcagtgtggtggtgttatttactagtaatacagttatgtttacttgttattgtttatatttcattttgagttttccccacatgtgattgattttaagtgtttatttttggggtatataaaatactaccgtagttctaagatatacactgctctgagtatatttacacaagtatatgttaagtcagatagatatactcggagaaatgtgtaaccttctcatcctgttatcttgtctgatatcagttccccatgttttttcactcctttcccactcacaccctgtagataaccaatctctttagtttctggtttatcctcctgtatttcttttgcacagataagccaatacatgtatgttttcttataccccttctcttcttatatggagggcagcaaagtactgttacgggatctttggggtatcactttgccaactggaaatttctgtggccagtgacacctttgcccaagttttgctctggcctgctgggcttctctgcctacttgacctggcaggctgcgttcggctcccactaccagcctagatcccatacctgccaagggcaagccagttgcagaacagtgagggttgtgtgagcgagcgtggagttcagccactgcacagccaggtatgccagctgtggtggggcaggcagctccaggcaccagcatgggtgccagctccctgcaaggctgcaggtggaccaggcataccttaagcagcttccatggctgacactggggaatgcagtgtggtgcccagaaccttggagacttcagcaaccacagagccctaaagagtgtatcacaaacctggcttggggttgctcctaggtctgggctccccaaagggccacagctcttctcttccttcttctctcctcttgtctgctgcgacatggtgggcaaacagcatgtttcagccctgtttgtgttatagctcttttagccttgccattcagtgagtccctagttcttgtcctgcatccgggaagaatgaggtacgcagacaagtggagggtgagcaagacaaaggggaactttattgagtaatagaacagctcagaggagactcacagtgggcagctcctctccgtagccagggtatcttgatgagtgttcagctctcagcagagagggtagctcctctctgcagcttgtcctgttgtctcctcaagtctggctgagtccggagtttttatgagcctcagaggggaggaagtgcatgctgattaatccatgggcaggcctggaaaagttcccactccagtctgcgggacccacagcctggccctcaggcctcaggccttccctggcttgaagattgggcttcacctgggacctaccccttctgcctaggagcatgtctgcctcctgctgcctttcatggtgcccaggtttgtaccaacgggcacctgcagggcagtgccaagctgtcttcagcacccccttggtctccctcccatgtttgtcttcacccaaagtccggaggcggctgaagtggcaggggacttgtgtgtcagtgctgccctgagcgtgcacacatccggctgggttgcaatagttcccaggctcatcctcaactttgctccatgatctgagtgggtgctgacagcagggagaggccagggagctggagcagacacctctgagcctgtgggagtaaggggggcccagggagtgcagagatgtctgcatctgcagctgcaatttgggtggctgcagccatgcccagaagggtgggactcctgcctgctccatgcttctgctgacactgtagagtgtggcactgccctgggcccagctctgcctcagtgcccctctctgcctgcctctccatgaccgaccacactgcttccctaccagcggacgattcagcttggccctgtcacagtggctcccagggtggcgggcaaggtgcaggtggtacggcagccccagtcaaccccacacaaatgaacctgacgcttccagggccagtcccataagtcccagctgtgccatcagctgggtgctcgcaggcccctgggatacagcggagagcgaggttaagactgtggcagaggcttcaggtctgggagcggatcctaccaggccgtgtgagggtggggtttttggctccctcagggacgcagggcacaggggacctactgccgccactgctgctcctgcagccactcctgctgccacagctcacgcttccttactgcagctggtgtgatggcagcggccactctgaacagcccactgctgccatcagtactatagatactcttttctactttacttttttgacttatcagtatgtcctagaaatcacttcataccagtttatagagacctttcataataagctttctaaactttggtcatcagaaaaaaatttctgtcagcccaaggatcagtttttaaattctatgaacttagtgatgatgaggaggatgaggatgaggatgaggatgatgataaatagcataagcattaccattaattgagcatctactgtattctatgctctatactgttttgtatagattatctcacttaatctttgctagagcccaaggtagtagatatcacctccaatttactgataagtgctgtggatacaactggttggggctgatgttgtgggtggtgaaagaataccgagacagtcataggtaaagaaaggcagatttgttagcgaaagtacaaaaatatgttgcatgggtgcaagaggcagcacagcagcgaaggggctatctgcaaagccacaggggctggagaaaagttttatagggtcgtgctagactaggggcctacttgtggaacgaggtatttaatgaaaggatgttgggccagtgggtttgtgattagccatttcttggaacaattgttctccccgacttgggccctcttacttgttgttgcttacttatcaggatgccacagtaaggaaactgaagtccaccaaaatttagaaacttgtccaaagtcataaaaaatagagttggaatttgaacccaggactgtccagagtttatgctttgagaagagttcaccagtaccatgacagaagttccaaggtgaaacaaagccacatgggtttttgaaacctggaacatttcaggccttaaaaccctgatgattgtgagttggctgttgccaaagtcagcatgttacagacagcaagaacatggaggtaatttattgcctgtttgtttcaaagaaatggcccttccttcttggaggaccatgggtcctgcctctaagacagaagacaagagggatgctacatagggcctgctacctgggatgtagcaataggtctcatcttacatctcctaatcgcaagccggagcaccagaaccattaacgggagagtacattaccccacagggctgtttgttatttagcaggacactcaattaagcccaagttacagcagtttctgctaaaactgtttgtgcagcatgagtggaagaagaatttatttggagcaggagtctgccttctgttgtgaaaagtgacagcctctggcagagagagaggcaatgctgttgagttggttgaaatcagggcttctggaatctgcatgccgggcctcacccggtgcttgattttccagctgtgtgaccttgggcaagtcacttcatctctcaaagcgcatttatgaagtggtgataagaaccatactcatttgtttggggctcccaagaccaccccagattcagcgatttgccaggaggattcacaggactcagtatatgatcatactcatggctgtgattaattacagcaaagggatacaaagcaaaatcaacacaggtaaaagacgaatggaataaagtccagaggaaaccaggttcaggcttccaagagtcctctcccagttgagcccaaaggatgcactaattcccctagcaatgagttgtaatgtaacaacatatgtggaaggttatccaccagggacactcactagagactcagtatccagaatttttatcaggggctgatcacgtaggcaccctctgttcagcatgtaccaaaattatagcctcccagaagtaaggaaagcaggggtgttcagtgtaagttgtactgtttgcataaacagtttaggtacagtgagccactcttgttaggtagggtggtgcaaagtctcccaaaatccaagttcccagactccagccaaggaagagccaaccttgcaaggaggtctttgtaagcgtagcagttgcggttctgttttgttacctcttttctgcccatcatcccattgggtgattgctgggtggattaaatgagatgatccatacaaagctctcagcacacttcctagtatggtgaatacttactgaatgttgattacagttcctttgacattcagggaatgaattttgattggtgcttcagcaccttcatctactcgtcatccatttacttacctgttcttcgttcatggctttgttcagcacattttgattggcacctgctgtggtgcaggggctatgttatcctcttgggtacttttgaagcattcctctctagacaatgtggcgtgtgggtgtccaatctggctgggtgtttgaggtgggtggtggtaatgagaagaaagcttcaaggactttaagatgaatcttaagtggactcattttcacattcagtgttagtgggatgagtatgcagtcatctgagaacatctcctgatgtcttgctgtttctttttcttcctgcagccaaggctaagtcgaaatgtggcccaaccttcttcccctgtgccagcggcatccattgcatcattggtcgcttccggtgcaatgggtttgaggactgtcccgatggcagcgatgaagagaactgcagtaagtgctgcgcacttgaacactgtgatcccttgttctttcccgccagccaaacttgtccacattggtcaccctcatcatgtgcttcttatacctagaggctcaggcattctcttctgttacccagattctgttcttccctacttcttgtgtaaatctgtaaatgttcagccaccatttatcaggggctctaccaagtgcactgagcctgaggcttgctgtattttcagttctgacaatagctctgcaaatgcagatgtattatccttagttaacagataagaaatttcaagttagagaagtacattaactcatccagggtcacatagctcataagaagcagagccatttctaggttcattcagaccctcatctgactgatacaacacttaatgtttatgtgtttgcttacttttttcttactttgaattcttttattaaaaaagttggccaggtgtggtggcttgcacctgtaatcccagcactttaggaggctgagaagggaggattgcttgagtccaggagttcaagaccagcctaggcaacaaggtaaaaccccatctctacaaaaagtacaaaagttaagtaggcatggtggcacatgcctctagtcccagctactcgggaggatgaggtgggaggatgcttgagcctgggaggtcaaggctgcagtgagctgagatggcaccactgcactccagcctgggcaacagagtgagaccctgtctcagacaaaaagtgtttatatgttagttgtatgcatactataaaaatttattcttgagaaaacagttcaagtagcatagatgaagttaatgtccttcttgactgtgaccaccctgatttgttttacctgctgtataatattcccctggtatcagtgtgcatgcacacacatactcatgttcactccctctttccttgcagcttagcagtcttgctgttgggtttaactactccttgccttggatacatgcagatccttccttttagcatcctgctgtccacaatgactttgcgtacagcagcctcagtgaccttcaagcctctcttcttcgcctttaatactggcccagctcgcccatcaggttgcttcatacctgccactggtcactctggtcactgtttcttcttctttccccattcctcaaaatgtttagactacttgagcattcataattatcattggctctgaacaaacttacacgtttattttctgtgcatatatatataaaagactttatgttttagaggggtttgaggttcacagcaaaactgagaggaaggtacagagattttccaaatcctctgccccaacacatacacagcttctcccattatcaatatcctcggccagtgtgatacaatcgttacgatcaaacctgtgttaacacatcaagtccataatttacattagggttcactctggtgttgaacattctatggatcttgataagtatatcatgacacatagccaccattatagtatcatacggaatagtttcactgccctaaacattttctgtgcttgtcctattcatccctttttgtacccccaccacatattttaataaatatttttcttctcattattgtaaagaacttggaaaatataaacaagtataaagaagaaagcaaaactgcccatatcccgtaagttagaatgagacactattcatatttatcccattgttggagatactagattgctggagaattagatgaaataataaccgaaaagtagtcagtataatggctggcacagagtaattgattttttaaaatagtggtttaaaacaaaactgtaagagaagaccatagttactaggattttgcctttgattttggacttacaatatacttcttttgtattttagttaatcctttagtaagtgagtatcagcttgatctctgcttcctgctgtccatggggatcttataatctaagggagaaattacacacacacacacacacacacacacacacacacacacacacacaccccagaataatccaatggcaataaaatgcaagtatgacgcattatagtataagcattctaaatgattatgtcatcctatatattccctgccataattaaagaccttgtatgatttaaatgtttggacatttgtctttaattttctctttttttttgagacaaggtcttgctctgtcacccaggctggagtgcagtggtgccatcacagctcactccagcctcaacctcctgggctcagctaatccttctacctcagccttgtgagtagctgggatcacaggagtgtgccaccacaccctcctaatttaaaagcaatttttttttgtagagatgacattttaccctgttgcccaagctggtctcgaactcctgggctcaaacaatcctcccgccttgggttcccaaagtgctgggattataggcatgagccaccatgcctggtctggtctttaattttctaaatgagtaaattatacccattccaaactatgccaatgaggattaagccagcatcttcctctgacatagctaccatttaaaaatagtggttctgaagccgggcgaggtggggcacccgtcttaaccctagctactccagagtgtgaggtgggaggattacttaaccccaggagttcaaggtcagcctgggtaacatagcaagaccccatccctataaaaataaataagtaaatacaattttttttaattagaaaaaatagtgattctagctcactatgttggaaagtggtaaataaaagtatgagtcaaactatttatcccctcgttcctatgtgaattatacttcagagtaatcaaatagctgactttaaaaggttattttttattgaagaataccagctaatagaagaataaagaaattagagtatcttcattttgtaactcctaatgaaaaatgggtctaggtaatgatcatcaatgactgcttaaaaccattaggtaaaaaattgatggggccttcataatggagagatcaggctgaaaactcctgaatctaccagtcagtcttctcacagctttgaatcagtgtggattcacttcaagtagaatgtattaatagaaaccttgccactctctaggtcgctttagagtatagttgtcttatataatacatctgtgtacgttagccaccccacaagaccgtgttttaatttttgctttaaatattcaaacatattttgaagagttccaaaggtattgtatttacccagatattcaccatttgatcactctttccttcattcatgatattgccaagtcttcttctagtatcattttcctcctctgtgaagaaattcctttagcaattcttctgaagttggcaacaaattatgttagcttgccttcatctgagaatgtctttatttcaccttcattcctaaaggatatttttactgcatatagaattctgagctgacagttcttttctataagcactttaagtatgccacttctatctggcttttacgatttctggagagaaatttacagtcgttcaagttgtttccccgtagattatatatcatttttctttagctgctttgaactgtttttttttttttgtctttagttttcatcagttagatcatagcgtgtctgggtataatttctttgagtttatcctgttagggttctctgagctatttgaatctgtaggtttttgtcttttgctatacatgttcagctattatttcttcagatattttaaaagtattatacgttttctcctttctttatgggagtctaatgacaacaatgttagatctgtttttatagtcccacaagtccctgaggctctgtgagtttttatttttttatattttggggggtaggtcagggtttcactccatcacccaggctagagtgcagtggtgcgatcatggctcactgcagcctcaacttcctgagctccagtgatcctccctcctcagcctcctgagtagctgggaccacaggcatgcaccaccatgcctggctaattttttttttattgtattttttgtagaggtgggttttgatatgttgcccaggttggtctcaaactcctgagctcaagtgatccgcccgcctcagcctcccaaagtgctgggattataagcatgagccaccacaccagagctctgttcatttttaatcactcctttttctttttattgttcatattggacaatttctgttaatctgtcatcaagctcacttactctttcatctgtcatctccagtctgctttcaagcctatatagtgttttgttttgtttagttgtttaaatttcagttactgtatctttctgttctaaaatttctttttggttttctttatatctttctttgctgagactttctgtttttccatttgttttgagagtgtgtgtgattgcttactcgagcatttatgtaatagctgctataaaatcttcatcatataacttcaacatctgtgtcatcttggcatttgtctgttgattgtcttaacccaaatgaattgagattttcttggttcttaatatgacaagaaattttggattatattctggatattttgattattatgtgtgacactctgggtcttatttgaagcctagcgggagtgcttatatatgtgtttttgtaggtaaatgacctgcgcaggtcaggccacagttttctaccagccctctgtgggctatggttacaatcgttttcacgctgtttttgcaatgctatttggatgtatcctgcctatggccctaccagtagtttgtgagttcagtctttgatgtgctgattaggaccaggtccatgtgcatgcagcttgaggggatcatcctaggagtttgtaaacagttttatgggttagcttttctgagctcctttctcttcttagtgtctctggttctttccagttccctggggctccaaaagggagaaaatacggtaaactcgccaccattttggtgatagtttaaattttggtcttattctccatttggcctgctccaaattacccttcacagctactgcatgcattctcttcaggttttttaagtgatattcagtgggaaagccagagtgaggtgtgatgactgcatctgacctggagcaggaacttctataagccagtttcagcagcacaaaaagacagtcgtctgatgcagtgcaaaggaatacgcatcaccattatgagattgttctgccaaaatcatcccacctgaatctgattgagcctctaaatctaaccattagtttactggaaattcagggacaggggaatatgttaatgaccccacagggaggcaaacttttagatacagaatgtgggaaattctttaagacccagtttcattcataaataaactctaagaaaaaaaaacagaggaaaagggaacttacagattaagagagtaaaagacaaattaactaaatgtgatgtgtggaccatatttgaatgctgatcatacaaatcaactattaaaaaaattgagatagagaaatttaaatcatggtttgatacttgatattaaggcattattatttatttttaattgtaagaatgatattgtgtctattttttaaagtccttatcttttagaaatatagtgaagtatataaagagattatgtgctatctgggatgcacttcaagccaattccatcagggattgaaacaaaatgttcagtgagttgataattgttaaacccatggagttcaataaaccaggctgtatttttgtatatgtctgaaatcttccataatgaaatggtgagaagaaataaataaaagttaaagaagtggttctgtttggtgatgtcttgactttaacaaaaataactagagagttatatttttaaagaactttggtttgcagacatgtgttttccaggtttagcattcattttgcactcaggagtgaggataagcaaaaacccagtatatataatttttttttttcccaaatagggtctcactctcattttctaggctggagtgcagtagtacgaacacagctcactgcagccttgacttcccaggctcaggtgattcttctacctcagctgcccaagagtagctgggacttcaggcgcacactaccacaccaggctaaattttttgtcgtatttttagtagtgtcggagtttaaccctgttacccaggctagtgtcaaactcctagcctcaagaaatccaccctgcttggcctcccaaagtgctgggattacaggcatgagccactgcacccagccaaatttaaaaaaaaaaggtagagatggggttttgccatgttgcccagactggtcttgaactcctgagctcaagccaactgcttgccttgacctcccaaagtactggaattacaggtgtgagccaccccacccagccccccaaaaccagtattttcttttagagcttcacaatgctgagattttgccctttgactttttttcctttctgctttttgctgtttggcctctttcttccgctgtcctcatacgttcttggctggaggtgaaaccctgggttggctggcagcacggctctcaccccagtcctcattcagtaaggatgaggactccagccaagaactgaaacggcagggtttctgggggaccacgatagaaaattgattcaagctgaagatcttctgctacagcttttagtgtagttgtgcccagaaaaaccactgtgtcctggactgtatctctccactgatgacaaattcttgcctgaattctgagtaccactgaatcatttagctagtatgtctgtgtttttgtgcacagagctccacactgctggcatatttctgtagctctattcatgtcaatccagatgagagtccccatttcctcttcacctctcagccaattcatcagttgtagcctcagaaagctgtgtcttttattgggtggactagccgagctaaaagtgtcaacaggagaatttttcctcccagtactccaaagctgcatcgtcaaggtctccttaaagactctcacatgactggtttcctttggaaatctttctggtttgccaaggctgggctgggtcatcctcctgtgtgttctcagaccatacaggactttcttcaaacaaatgtcaactcatcagagaggccttccatgaccactctatgaaaaatgacccctctcctccccagtctcacactctgtttctgtcccctgcttcatccttccccacacttactgtcttccctactacattgtgacagccatgaggtggtattatagtgtggctcacagctatatttccagcgccatgtatattatcaggctcagccttagcaagcgacaaacatatactgaataaatggtacttctcatgctttctcgtaatggcatattgacttgcctgtatagtatacaaactttcagggcaagtgaactgcttggctgacagttactgagcacttaccttgtgtatggcctgtttctacatgctttacgtggatgatctcattttaggtagatagtattattacctcctttttatagataagggaacagagacatagaaaggataaataacttgcccatactcacacacttagtaagtggcatagttgaggtatcaacctaggcggtataaatacagagcctgaacttttaactattatatgaatgtgtattcccaatacatttttttttttttttgagatggagtctcgctctgtctccaggctggagtgcagtggcacgatctcggctaactgcaacctccgcctcccgggttcaagcaattttcctgtctcagactcccaagtagctgggattacaggcgtgtgccacaaagcccagctaatttttgcccaatacatatgttttagagacagggtcttactctgttgcccaggctaaagtgcagtggtgcaatcatagctcattgtaccttagacacctgggttcaattgatactcccatctcagcctcttaagtagctagaaatacaggtgcatgccaccttgcctggctaatttttaaactttttttttttttttttgtagagaaggggtcttgctatgctgccttgaatggtctcaaactcctagccccgagctatcctcccacttcagcaacctgaagtgctgggactacaggcttgagccatcatacctggctaataattattataataaacatttattgagcacctgctatggcccacatgctattttccatgctttgctcatttaatttttataaaagcttatgacagagacattatttttgtcctcactttatagatgaggacattgaggcttagagaagttgaataatttttccaacatcatatagctagtgaagtggtaggctgaaatttgagcccaggtggacttcacactttcacttctaaccactacagcaaaatgtatgcttggaattgtcagctggggcagatcataagaagttgagaatataaaagattatattttatactcagtgagaagcagttgataatgagcagatgcaggatgaggagaggaagaagatcacatgatgggagactggggaactgggaaatggtggccctttcatagcagtaggaccacaggaagagggagaggctaggagcagaagggagaatgtcagtttcagacatgcagagtttgaggtgagagggtgttcaggcagaggaacccatgaggcagtaggagaaagatgtttatttctgggggaaggtttagggagctatccacagaaaggtggtggttgaagcagtgatactggacttgttccccggaaaaggcagggttgggtgttggacaggagataaccatgtccaggaagcctttaccgacaaggaagaaacagactaccattagcaatgactgagttctgccagtggccccttgcactgactctagaggggttttgaaaattaaaatcctcgagtccttagagcctgaggaaaagggaagcaagactgaagtatttttgcctcttgcctgcttgcccagagtggcggccctttcctctcctacagacacagaagaagttccatgtgcagaatgcggctgtacataggctacgttctgtcttcgagggggaaaggctgctgaggctgggggacctggtagccttggggctgggagaggcccagaggacctgttgagcagacttaggaaggaggaactgacaggtgtcaataggcaagccaaggtcaaggcagcgagcattttccaagtcacaaagggtgcagggcttgttgtcgggatgatttgcagggagactccttcagtgggctctggtttcctggggccaggcgccctctatcctctagaagagaagtctcagtgcagccccctctccctcagttgcctggtttccagggaaattggggctgggaagacaaggactgtgtggaggctatgaggttgggaagtgagtggtgaccacctcaggatggagaagccgatgggaattgtgggggctaatgacaaggagtttctcatttatgtgtttttgtcaagaccctttgaggtaggagaggagccgacttcacagactttaaatgaattaaagagtacatttcctaagtcctactgtagacggattgcttcatttcctgtcttgaagcaggtcagttgcttttgggagaccgcagtggtccctcggtcttatcttttagatgtggttgaagtaaaccctgccagtttaattaaccactaagcggttcccttcactcctgcctccctccctccctccctctgccagagagagagacaagttctttttcctgagtgttgtggcttgggaaatagagctttagaaccctgtgtttttttgggtaataataaccaaggagcttttgagcctatggttcagtttttgaagttaactctgcagacaattttttccacccctagtgaaataaatattgtaaaatagaatgttcctctccccagttaactgagtaacataatacatttctcagtgactggtaagccacaacgaggacaaagaaaacaaacatttggagcacgttaaatatggctaaaagatagtgaaacataacatcccagaggatgaaatgtttcctggtctgtttatgatctgttcattgagcatttactatttccagggtcctggaccaggccccatgggaccacagaaacccctaagacttgtctaccatagtcccaaatgcaatcattctgaaatctggctgagccaagtaaatagctgcagagggtctggaagaaatgtagtgaaatctgagctgtctggggtctttggagagatctgccactctggttaagtacgtctgcttaataactgaatatttatgcctttcaacaccagcaacaggaatctatctgagacgtatcgaatcttggctttgtcagcatgtaccttttttggtagtagcacagggtcattcttaggaacattaatttttagaccaggctataatacagggttgcctttggctcctttttagaaccttctagtctctttttgaactattctaggctgttgtgcttttggaattctttttaaaatatttttatctttattttttaaatttatgcatatatatggggtacaggagaaattttgttacatacacataatgcatgatgtgatcaagtcagggtattcagctgtccattactcaagtgcagtacatttttgttaagtgtattcaccctactctggtttccttttatctcactctatgtttgtatcctttaacccacttctcttcatctctttatcttcctcccttccccctgctcacccttcccagtctctgttatctatttttccactctctaccaccgtgtgatcaaatttttagcttttggaattcttgaggttgctttttagagcgtttctgtccccttctctggctgtcagcttttatttcttgctgccagtttgtctgcaaggcagtaagtggcatccccctccctttttatttgctttgtccttgggagctggaatacagaacttgttggaatttacgtaaatggagaagccatagaccctgagagagctgatggcctgaggccttttccttgaggaagctcctggcactttcaaggcatgaacattgtgatgtatattttgatggttgggaggcatttttctgtggcttgctgctacgtttgggctgtgttcctctaccatcctctgcttctgttttttctgccctgcaaaggatgggggagattacactgtgttttatgaggagtcattgacaaggtggaatgctaggtgtggttgtatacaaggatatagctatgtctcctgagcaactatgcccctgagtgtgaaagatactaaatattaagaggtgtttgtggaccagggagagctttatgatgggagagtaaaagggaagggaagtgagtgctcactgaaacatttctgctagactagacgttcaaaaatgtttagcaaagtttctcaaacatactgaaaaggaaaagtaaagtaaaatgaacacctgcattcccaacatccagtttcaaaaatgtatcattgtgttgctgtatttgcttcagaattttaaaataataaaatattaccaaatataattagaaatctcagccatacgtctttgggatcttctcttttctccagaggcatccattgctctggacttggggttgtttattcccattaaggttttttttttctttctgtatatatctttttaatcctgctatgataagtagcattctcttgcatggggtaacttcatattaacgtaatatagtacagtacatagcctactactgacacaggatttttctgggccactttgccagtcaggtacctccacaggcagtgacgctccctgccccgcccaggccttactgcaccccaggtctgctgctggaggcaccctgcccattcagcccacctgtgttataggttgtacccacgttcagtggttcctgagctcttgtcccatgtccaagaagaatgagatatgctgacaatttgaagggtgaatgggggtagagaagaattttattgagtgatagaacagctctcagtggagaggggatgcaggggtggttttctctcccagtgtgtctgggtccagggctttttatggactcagaatggggagtccatgctgattggtttgtgactgtgcaaaaaaggttaaagttgaagacaccactcaaaggtgggcgtgacaatgtagaaaaccaattaggaaagggtaggtatatgtaaaataggtgatggtggggatccatcagaggagagtgcaccaaataagaagacagtttctcaatccagtctgtggatttgacttgtagcttggctttcaggctttaaactgtctttggcttggaggtggggtttcaccggggactcgcccctgtctgcccaggcatttgtctgcttcctggcaccatcactgcttgctttcctccctcactattgtatttgtgggatttatccatcttgacaccagttcattgatttttcactacaacacagcatcagttgatgcactatggccctgttttgcctagcaccagtttttgtacataaaattgtatgcatacatagtatgcctttcatttacaaattgtctgtggctgctttgtgacacaatggcaaggttgagtcattacaacagagacaaaagaccaaacagctaccaaaacctacaatatttactatccggcccttgataggaacagttagccagccctggcattgtaacagtataacacatggtatccattctttataagtaaacatttgagccttttcttttcttttcttttttgagacggggtctcgctctgtcaccccggctggagtgcagtggcacggactcggctcatttcaacttctgcctctcaggctcaagtgatactcctgcctcagcctcccaagtagctgggattacaggcatgcgccactaccacccagctaatttttgtatttttagtagaggcagggtttcaccatgttggccaggctggtcttgacctcctgacctcaaatgatccacccacctcagcctcccaaagtgctgggattacaggtgtgagtcaccatgtctggcccattttagtcatttctgattttttaattttgcaaataatggcttcagtaaacatttttgtttcttcaagagtcttgcagtggctcacacttgtaattacaacactttgggaggctgaggtgggaggattgcttgaggccaggatttgagaccacgctgagcttcatagcaagacccctgtctctacaaaacattaaataattagctaggcgtggtggtatatgcctgtagtcctggctactcaggaggctgaggtgggaggattgcttgagcccaggagttgaaggctatggtgaggtatgattacaccactgcactgcagtcggtgactgagaccctgtttcttaaaaaggaagaaaaaagagtctctctagagaagagtatatagctggaagtgaaattcctgggccatgccatgtgcaccataggctttactattcctaaatgggcctcctaggtggacgtaccaatttgcacccccacttgtaacttatgagacttcctctccctccacattcttgccaatgacctggtactttaagaccttgagtgtggcacgtcatcaccagtgacagtatacattatttcacggttttactgaccatttgctgttcctcttatgtcaattgcctgattacatccttggccctttttttctattgagttatcttttctttttgatttttgagagttctttatatattcttgctactagtcttttgggttatatgcattaaaaccaatctgtgacttgctttttaaacatacatacacttacttgtagacatacacacacataaacacgtatgtggcgtttttccttggaaagtttgagaggttgaaagggtctaagactgaaggaaaagtaagtagatgacagtagtttcagcaaggatgactctgcacagctttccccatcaggacgtttacataagcttatgaacgccccgtcttggagcacttagaatgcctttcccaggctgtctgagtgagcaggtggttactgatgttttggttgcatagatgtgacccacaaggtcctagagaagctgaaggccaccacggtgggatgttgatggacacaagggtttggagagctgccttggacaaaaaccagacgtgatttgtggttttggatttctccatctcggttttggctgaagtcagacctcggtttcagcttgatccagttgagccattctctggcccacagcgatgtcaataattaaaacttccattttcaggccagaccacttttgtttgagtttacatcattggtccatcatcctcaacactgaaagcactggtttcctccatttccccacctctctgacctttcaaatcaaacttttggaattgaatagttaaaataaaaaagtcttcagttcctcagctttagatagcgttgtgaagttaaccaagtccttgcagctgtgatctctgtgtgttcacaacacctcagcgaagcacagggagtagattacaactgccatcttgccgttgaggaccacagagagacgctagagctggtgtggccctgatcctgtagcaacatagcaatcttctgtgctgggcctggcgtctgttctggtgctgtacccaccacatgaatatgggtgccagctcagttcattccccgagctctgggatgacccctcttcatcattacagatgttgctccttgtgggagggccacactctgtaggaccgagattcacataatgaggggaatgagtgtaacattccctgagcctgtgctacatgtcagactgggcactgtacattttcccacggatatcatttgatgtgcagattaatgccgtaagtagcagtatcagctttttggcctgtggctggcgtagccatacagggccagtgcttagcttagaaggggaccatgcttggttttatgttctgctcttgccatcttgagtttttaaaataatttttgacagcagatcccacattttcagtaggcactggacctcacaaatcatgtagagggtcctgtccacagataaagcagctgaggctcagagaggtgaagtaatttgcccaagattaataagtggcagagctgggattggagtaatttctacttggctgaactagttattgaaaacagagccctggaatgaaccttgtttgaatcacactgcaggtaaattgtactgtagaaatactagttttctgtggagatttgctgttgtgttgttaagtagctttgtgctgaccttgtactggccagttgtcacacttcttcttaaggggacggcccagatctgtcatttcttttgaggtctcagaaagtgcctagaataggagcctcatggaggagctgctcagaaaatgctcactgaccaactaggttcatgggcttttttgtttgcaaagaagaaatcgaggctactaagtttaccttagtgagtcataaagaataagtgaggaattaaaaggctgatatatagttagggaactggaagtatcctacacggctgtgggatcagatcatgtcattacctccacagtggcagagaggtgcgtcaatccctgcctcagctactccttctggcttggctttgctccatgtgtcccttatgctaccagccattcactcttgcctcctccaggatatgtccatgaggttcaggttttgcccagacccctcagtggctgctggccagccttcgggttgaccatttcgggtgaggcatttagcatgtcggggtggagagtggcaaaatagataacagagaccagagacttggaagggtgagtagggggaagggaggaagataaagagatgaagagaagtgggttaaaagatacaaacatagagtgagataaaaggaaaccagagtagggtgaatatacttaacaaaaatgtactgcacttgagtaatggacacctgaataccctgacttgatcacatcatgcattatgtatatgtagcaaaatttctcctgtaccccgtatatttgcataaataaaaaaacaaaaatggaaaaaaaaattaaaaagaattccaaaagcacagcagcctaggatagtttaaaaagagactagaaagttctaaaaaggagccaaaggcatccctgtattatagcctggtctaaaagttaatgttcctaagaatgaccctgtgctgtcaccaaaaaaggtaaatgttgatgaacccaagatttgatgcatctcagagagattcctgttgctggtgttgaaaggcatcaatattcagttattaagcagacttacttaaccagagtggcagatctctccaaagacccccaggaggttttagaatgaggcagagtaagtcttgtgtccaggtttggctggccagccttacagcatgggctttgagtctgccagcttagaagataagcttactgcttcctgagcgggacacacgccaggctggaagaagttccagggtccccaagggaacttgctggcctccctggtaatgtgctgtgttttccctctgcagcagcaaaccctctgctttgctccaccgcccgctaccactgcaagaacggcctctgtattgacaagagcttcatctgcgatggacagaataactgtcaagacaacagtgatgaggaaagctgtgaaagttctcaaggtaggaacctctcaagctctaaaaagataattgcaacacaacactgcagtaatggaacaccctgaaaggcagaaagcaacacccattcccattccaaacacaatagctctgttagtttttgcactcagccttgcagcccttgtacaggtaggtacccgtgtttacgtggctttaactacaacacacctaccattttgaattttgtattgttcctgaattaaatatcatctatacatttctcttcaaaactgtaatatgccccaactgtgttacatactgtcatgttactctcctgtggttttctgagacaacgctttattggggcaatccaggttgtttctttcccttgaattacttctttgggataaagtctgcagagtgggatgtctgcacaggtgtctgttacacctcagcatgcagctgtgtttttttttcttttttaagtttacattgctgacatcattgtctgtgcctgtcagttttactgtgctatcacagacattcacaggcatcacaactgctgccctattttttttttcccatttttgctaatttggtagtcatagaataacaacctccccaaatgctttcatttgcatttctctgattatgagcagagttcacattttttcccgtcatgtttgtttactgctttgtttccttttctgtgaattgcctccttgtgtctgggctattgattttggggctgtctcatggaagctgagggatgcagctggaggatgggaagatgagctttgttagggagtctgaggaggacacaatgggataaggtcatgtcctccctagttaaaactgaccgggtacatttctttactcatggactcttttttttagcatttcttcagtgattagaaatactaagatttaaaatgcacatctgttttaaggcatccgaaagaatatatatttctaatgttataaattggtatcatctgtatgtaatctttcctattttcacttagtattatattgctgtgattcacctgtattgtttgttgttggagattgtttgtcttgacttatgttcagtgttctactgtatgattgtaccatagtttatagatctaataaaagtgtgaaaagaaaagtaagagaatgatggttaactgcttagctggttaactcatatattgggaggtaggatagatgatggataagttccatgtagttagatgtaggttattttcaaggtcctagcttttattttgattggtgtttatgctattaaaaatgaacgagtgaatgaacagatggtcatacataacaactggtgagagtgggctacaaaccaaggattatggtcaatctaaatctatatgcctgaggtccataggaaagaaaagacaaaatgtgtattggcatagactttgccaagatttgtgcagagaacagctgtgggaggcgagtcttggatagaattagcttctgattgtctttgcctggaaaatgcctttcttgggtcgactcttcacagtggttctcaaagtataatcctcagtccgggagcatcagcatcacatgagaactccgaaaatgcagttgttcaggcgccattctagaccagctaaatcaactggtgtcggtgggcccagccagaaatgcagttgttcaggccccgttctagatcagctaaatcaactggcgggagtgggcccagccatcggcgttttacttaagaagccctcaaggtgattctaatgcacactgaaggctgagctccaccattctacagtcacctgagagaggtttataatcctgccatttgcctagaaatttccaaacttctgactgaacgcaacgtattgctggcctttacacaagatcaaatttttataaaaccaaacatgccaatgtcttgccagtgatggacaccaaatagggaacaagaatgcaaaatcaagtaagtattagcatagataggaaggattgaggaacattttctatggcgattgtttctttttttggggggatggcatggacggagtcttgctctgtcacccaggctgaagtgcagtggcgtgatcttggctcagtgcaacctctgcctcccgggttcaagcgattctcctgcctcagcctcccaagtagctgggactacaggcgtgtgccaccacgcccagctaatttttgtatttttagtagagatgggtttcaccatgttggccaggatggtcttgatctcttgaccttgtgatctgcctgcctcagcctccccaagtgccgggatttacaggcgtgagccactgcgcccggcctatacagtttcttaagtgtgtatgtatcctggactcacttactcatggtgccctaagacgttcagtgaaaagactcccacgtctaagatgtggaggttaggcctgtcaatagtttgggcaacaccctcttctgtgcccatcccagtattttactgaagcagatttttgcttgcccttaagaagaatggtgggtccctctgtaggctgtttaaagctcctatttttttaaattctgctttttctctctcaccatattccacgtcccataaatatgaggtttatggagaaagttagtggtggacacatacatatgaagcccaactcttgacacatactttccttagaatctcagctttgtgccttccttagccagagggcatccccttagaaaataagctacatatgcacgtgctcccagaaaataaggcccaccaggcagttgctgacacctgtcagtttcatgggtataacagccaccccacaaggtgcccacttgtggaaggcattgctgtgagctacccaagaagagtaacaagaacaggacctgtgcccgttttgcctctcaaatcctgccgaacctacgtggtggcattgtgctctgtacatagtggatttgctaagtgctgaagactagaaaagacttcttggtagagtgttgttattaatgctgtgttttaatttgcaccctgtgtgatattgcaccgtataggtttttaagttatgtgagttcagatatccacgatttattaaaataataacaagtattattattgttgtttaaattgggtagagaattccgtcatttcctcagtgggaatctgccctgcagtgagtgtgagatgggagacagatctggagttcccttagctgtctgcaattctgcagcctcatccttcgtagggtgtacacatctccctgccctgagtgagactctggtattaagggtgtgttttcttgcatcatgtaacctctatgtccaaaccgactaactcattttggtgcttgaccaaaggaaccccagcacatcagtgctgtgggaaaactgacccacactgagctctatgcagtattttcctgaagaatctcagagatagtttgactagacaaaatattgccctatgccacataggatttgacccactgtcatcttttttttttttttttttttgagacggagtctcactcttgttgcccaggctggagtgcagtggcacaatctcggctcactgcaagctccgcctcccaggttcacgccattctcctgcctcagcctcccgagtagctggaactacaggcgcccgccactacgcctggcttattttttgtatttttagtagcgacggggtttcaccgtcttagccaggatggtcttgatctcctgacctcgtgatccacccgcctcggcctcccaaagttctgggattacaggcgtgagccaccgcacccggccgacccactgccatcttaacaatactttttgatgcactgagtactctgctaagcacctctgtacatgagctcacttagtcaaactttgttctctctccttctgctgggtgtgtagcccttaaaaatagatctttgctctcagttatgtgggagaaaatgatattttatcatatttatcttgatggggtagagcaaactggctggctccaagaccagaaagagagtgcttgaaataattctcttccaatttgactagggtatgaaatagtggtttctccactttagcaacaccagtttatgggagcccctcctcctctctctccttatctgggatttagttcccctccttatccttggccttgaaaactaacatacagtctgtaaggaactgggcacgagaatggggccctgaaagtgcagtcattattctgtctttgtattctatatgagatgtattagagaccaaagaaggttgtggtggaactgaattttaattggggcttcattgattggcaacataacccatttccaagaaataaagtaatagctgtggagcaggctttcgatggcttttctgttgcttggaactctctgtgggagggacacatctgagagttagcaggtcctgccatatacatgttgggggtcggcggcactcaggtggccttacaaatgttgactgaatgtggcgggcaacctctgatgatccccacctcctggtattcatgccttggtataatctcatcccttcaaatgtgattagatcttagatcccattcttttggcgtgtgtcaaaatttgtctactgtaaaatttatcattttaaccgtttgtaagtatacagttcagtagatgttaagtatgttcacattgttgtgcaaccaatctccagaacgttttcattttgcaaatctgaaactctatacccattaaaaaataactccctattctccttccccccaggccccgggcagtcatcattctacttctatcttcattaatttggtaactctaggtacctcatacagtggaatcatacagtatttaatcttttttttttttttttttgaagtggagtctcgctctgtcacccaggctggagtgcagtggcgcgatctcagcctgactgcaggctccacctcccgggttcacaccattctcctgcctcagcctccagagtagctgggactacaggcgcccaccaccacgcccagctaatttttttgtattttttagtagagacggggtttcaccgtgttagccgggatggtctccatctcctgacctcatgatccgcccgcctcggcctcccaaagtgctgggattacaggcgtgagccaccgtgcctggcccagtatttaatcattcttaagtgtgtatgtgtcctggactcacttactcagggtgccctaagacgttcagtgaaaagactcccaagtctaagacgtggaggttaggcgtgccgaaggtttgggcaacacccttttccacgcccatcccagtgttttactgaagcagatttttgtttgcccttaagaagaatgacaagtccctctgtaggccgtttgaagtttgcatttttaaatcctgcttttctctcttcatgttccatgtttgtgactggcttatttcacttagcataatgtcctcacggtccatccatgttgtagcctatctcagaatttccttcctttttaaagctgagtggtattcaggtgtatatatgtcacatttggtttatccattcatccattgatggacacttaggttgcttccaccttttgactattgtgaatcattatggtaagacatgagtgtatggattgtgactcgcttttaacaaagaaaatgcagcaaaagtggcggctgtcagtcccgaggttagatgatggagccactctagcattgtcttgcctgccctcgctggctagctctctcccactcttgaggcaagccagctgccatattgtgagccgccctactcagaggcccatatggcaagggacggaaggagggctccaacctaagctagcggggaaccgaggcctgccaatagccacatgagtgaggttggaagtgggtcctcccctagtcaaacagagacatctgcagccccggctgacacgccgactgtagccttgtaagactccctgagccagggtgtggccactcctgggtttctgacccatagaaactgtgagatcataaatgtttgtttgtttaaacctctaagttttgggggtcattttttctgccacattagataactgacatactgaatacttctcaggtgggctccaattctcactgctctaaccacagagagcttgtggtgactcaggtcacagtgatcggtgaaacctttggaagatcatgcaggggtttataagaatagcaaacatttggagtactaactgcatgtcaggcaccattctgagcattattgtattttcctgtacagttctcacagattccctctgagagtgggtgctcttatcacaccccttttctagatgaagaaactgaggaacacatagtttgttcctggtctagtccgcacagggagcaggtggtggagccaggatggggactcggctcatcacactgacggacagactcatgtttttcatcaccccataagactcctgtctggtaacactgagctgggcccaggactttcaggcggtcagtcctactcttggcctgtgagtttatgggggagattagtatgaagactggcatgttttccctctctttgtactccaaaagttttcctttccatgaaaaagaataatgtgcctgtccaccttccctcctcctgaggaatgtctggcagttaagctcttctcaagcagccaccaatgccgggagagttaattaagtgttttggcagtttctttatcttgcttgctgtatcctggtgataaggcttgaggagaatttgaaaagctggctgtgagatttggcacctcactggaagctaacattgacagctttgtcctgttccttctgcagaatttgtgtgtgtgtgtgtgtgtgtgtgtgtgtgtgtgagagagagagagagagagagagaaagacaaggcggtgtgtgtggttgtaagagtgtatgcattcttcaagttggcatttttgtccttggggaggtaatgggtaggtgaggtgttacctcccctgtgccaggcccctggctgcatgcagggatatagaagtggtcttggccccttgttgaattgtcctcctcccccgctgaaattcttgtgttaatgtcctaaaccccagtgcctcagagtgtgaccttatttggaaatagggtcattgcagatgttacttgtgaagatgaggtcatactggagttgtgtggggctctaatctgatatgaccggtgttcttataagaagggaaatttggacaccgacatcacacagagagatcaccatgtgaaggtgaaggcagaaattgggatgatgcatttacaagccaaggatcagcagagatcgccagcaaacaccagaagccaggagagaggctcggaacagattctctctcgcagccctctgaaggagccaaccctgcggacattttgatcttggacttctggcctctggaacgaggagacaatacatttctattgttttagctgcctagtctgtggtactttgttgcagcagccgtagccaactaatacagtccccgagaagtcacacttaagcaaggcacagccattcactaagtgccagagcagaaatatagccaagaggatgtgaaactgccagagagtgatcagagtagagtgcaagagcgaaggaaagtgagcttccaagggagactggaagtgctggatgctgtgtgggaactggacagttgccggtaaagaatccccttggcagggagagctggaagtaaagaatcgcctcggtaaggagagctgctagtaaagaatcgccttggtagggagaactcctggtctgcctatggtgtgggacttggtagagccatgcttggttaggaggacacctcccagcctgtatttcaagttcattttctgtacttggtgcacagacctcattatctctctctacaacagccccagacctggagtcagtggagtcagaacccttccatgttccttgaaagccatggcctaatccatcaatatctgtgttctaaggaccttggacagttgcactttccccttggagttctaatgcctaagttagctggtgactgaccttgatttattgctggattctgggctcacagtgaatatatatgtatctatgagaagaaagaattagggacagtgactgcttcttgccttaccctctcaaatagatacctcaaataaaacctcagaggtggggaaccccaggaggagggtcctaagggctgctaggcagaggggtcaccaaatcagaccaacactgctaactctgtggcttttgtgtcctgcatccgtgatgaccagggtatattgtatatagttcatcgagggaactgtcctttagctactgctgaaacttggagtttggtgtcccttcacacgctccacctaccccaaacccaccaccaccatatggggtctgtgatagactggatttttactttcagttcttcactccctccctctgctgtgtgacctggcagaatggccagaggaaatgtccctgccccgtggatgcggggcttgctttggcccgtggtgtgttggcagtcagcatgagaccagcatggcctcttgcatctcagagatcttcctggagaagaatataccctgggcgctgctggtccaaggagaatgcagtggcacatggaactgacccggacccaccctgcagctcaggatctgtcccagctgaagccagcagagccacagccagcctgcagatccaggagaagccagtgaatctttgctgttgtaaaccactgagattttaagatgtgtctgctacatagcaaaactgattgatattagatcctcaggaaatgtctgtctgtaatttttctttttctttttctttttttttttttgagacagagtttcactcttgtcacccaggctggagtgcaatggcgcgatcttggctcactgcaacctccacctcccaggttcaagcagttctcctgccacagcctcccgagtagctgagaggcgcccgctactatgtctcactaatttttgtatttttagtagagacggggtttcaccacgttggccaggctggtcttgaactcctgacctcaggtgatctgcccacctcagcttcccaaagtgctgggattacaggtgtgagccaccatgcccagcctctgtttgtagtttaacaggtatagtcatgtgctgcataatgacattgcagtcaacctacatatatgactgtggtcccatgaaattataataccatgtctttactgtatttttttatgtttaaatacacaaatacttgccattgtgttacagttgcctacagtgttcagtacagtaacatgccgtacaggtttatagcctaggagcagcaggctgtaccatataacctaggtgtgtagtaggctcctccttccagctttgtgtaagttaattctatgatgtgcaccccatgatgaaatcgcctaatgatgcatttcttacaatatatccctgtcgttaagcaacgcatgactgtatttttgattgctactgtgtgccaggcattatgcccaggagacaaaggcacgtaccaaattttgttaaatcttaaaatgccatctattgtaagagctatcattattttatgttttgctgagaaagaaacaatactgaccattaaattatggcacagtgttgtttttaagatgcattccaggccaggcacggtggctcactcctgtaatcccagcactttgggaggccgaggtgggcagatcacgaggtcaggagatcaagatcgagaccatcccggctaacacagtgaaaccccgtctctactaaaaatacaaaaacaaaattagctgggcgtggtggtgggtgcctgtagtcccagctactctggaggctgaggcaggagaatggtgtgaacccaggaggcagagcttccagtgagccgagatcgcgccattgcactccagcctgggtgacagagcgagactccatctcaaaaaaaaaaaaaaaaaaaaaaaaaaaaagatgcattccagtttcagaatgttaaaatgtaaaataaaaattgtatcttagaattgaagaacggtaatagggaaccagacaaatgtggtctctgctctaatagagctcatattctataggaagagcaggtgttcggttggtcagtagcgtgaggaatgtgttgcaaggacaggcgcaggacactctggaagtgaatggcagggcagtcagtggggtgctaagtctttctcaagacaagatgctgaagttgaaaccagaaggatggggaagagttactggacaagagagaggagggtcagcggagaaggatccttccaggcagagagaatggcaggtaagcagatcccaaggtgagaaacagcgtgatgcatttgaggaactggcagatccacgtggctgccctggggtggatgtcaaagaaaagccagagctagatggtaaagcactaaaaacaaactttatctagaaaaatggttgccatcagggaaaagagacctcagtatagaactgggttcaattccaaatataataggaaaagtgggaatttttagccaagcagtagggtggggttagtgggtggaaaattactaagaggaaacatcagggtaaggggggattctgactcaatggacctaacaggattctcactgaaggcaggccaggaggatggtggaggatggtggaggatgaggaacaggatcagatatcaagggtgagcatgtggcagatggaggattttgctaaactgactcatagggcttttgctagaatcagacaatgcagagaggaacgcagaagccccaaagctagggcttctttgagaagagagctcagaagaaccggagtggagtttggtcaaggagagaatctttgtcatggacgggggaagaacagcctgcagggaagctggagtggtccgtggtggcctgcgtggactgggggcctgggaaaccatgggaaggatgttgcgctctctcccatgggccgtgggaagccacggataagacacgtgaaggtgggggcagtgggaacatatgggggatggcttcaggaagtatttcaggctagaatcgccaagatttgatgacaaactggatgagagtagcaagctgcgttatcaccatggggatactaattttgtggaactagagaatctgccgtattattttctgattgtgcttgctttccactttgctgctccaggccccccactagtctgggtaattgagagtaaaagagcttatacttttggaatagagagatctttgcttttttctgtcaccaaatagaaccaagtgactaagcaggcagagataatttctacagaagtcgtgcagggcatgtgataggagaagtgctaattttagtttagttttccaaatatggatggaaaaagctttatatttaaaaaaaaatagtctgcgtttaggggatccaatcaaaaatgtcacaacctggaatttgaagggtggtcagtatttacgccaaaccttgtggctgcaagtgatgtcaagagcttcattagagagtccgtaggaaagaatcatcacccttaaggaattcctgtagattttcatagaatgaagctgctggaggtccatttaacaggaagaatgtggaagccttttttccacttttaatttagagtttgaaagcccagctgggctgagagaggcaaaaatgctgactccattcgaagaaactgaaggaggctgggagaggttgattgctgcctttgtgtacaggtggggttttcttcttagtaatagagtgtttgcatgacaaaagcttccttttctttaaccacagcagcaggagtttgaagatttctgaaacgtctttcatttagaagcaagtcagaatgattctgtactcaaagacagtagttgcttcctgataactttgttactgcggtaatctttagggctgtttctttagtctcccccatttctttcaggtgcaggtttcccctccttgtccctctccagttggtccctgcctctgtcctagctctctctccccggtgaatggcggagtccatcctggacacctggcagagtgtgattcctcctgaggtggaaggactgagtttcagagcagtcagggatcaggggtagggcttgctgtctctctgcaagtttgctctgcaagtttctggagccctaagactgctgtgttgtgctgcttgattgtagaggggacatttatccctccatggactgactgctgtggctctcagctccccaacccccaacaccctttgactctcttgggtctttctaacattcgttcatgcacacatcatttgcagagtgcctgcaattgcccggtctcacccaggtactggaagaaatacaaactattatagatcagctcaaagttgctcacagtcctgcaagggagaaacataatagcctgcagataattaccctcaagtgtgataaatgctgtaatagaggaatgagcagcatgccgtgggagcttgaggctggcaaggagtgacagtttttcctagggggatatggcaaggcttcagagaaatgaaatcgctgcccagtctttacaaatacataaaaatggacctgaaaacaaacgtggggctgggcatctagccagagagggaatagtatagccaaagacagagattctgtatggctggagcaaagtgtgcatgtgtatgtgtggggagtgggagacgtgaaactgttagggtgcattgaggctgactgctgggggccccctccctgcaggatccaatgagaaggtggagacagaggaagaaacccaggagaaatgagatgttcaaccctggaaaagaaattcataggagcagctcgttatcactgcatgccgtgagaattctgcttatccttgtgtcttactgagccctgctagcctacaggcaggatgagcctggggaatcggggaatcgtagacctgtgaatttctaggggtgagaagagtttgggaagctcagtgaccatagaagggatatcctccccctcctgcttccaacaagtggcttgaaaaacttacctgggttattcaatcaggtcagttatgtctttttttttggccccagtttgacttcctgatagctttgtggccagtgaaaggtggaaatgtgctctgtgttgcaaatatgtcagttcttgtcacatcccccaagtactccaagcagctctttcttgtttccaccttgttttcctctctggaaacccaccatgttatcagtctgtttcatcttttttttttttttttctttctctgagatggagtctcactctgttgcccaggctggagtgcagtagagcgatctcagctcactgcatcctccgcctcccgggttcaagcacttctctgcctcactctcccgagtagcggggattacaggcgcctgccaccacacccggctaatttttatgtttttagtagagatggggtttcgccatcttggccaggctggcctggactcttgacctcgtgatccacctgcctcggcctcccaaagtgttggggttacaggcgtgagccaccacgcccggcccagtctggttcatctttagttcattttgtggaatgcctctaaatgacacttacccatcttctcccattggttctcttccttgagattttgtgccctttatcatgtgtctgctgctcaaatttgcatcagtaggtcagctgttattgaaaccctcctttttttctttaagaaaatttatttgtacctctacagcagaaatagagagagaataagtttgtgcaaaccacactttatgaaatggatcctcatagcacatcctttttaatgcaggcttgttgttgcaacattattcctggattttcaaaatccagccaacatggatacctctgctactctgaaaccctcctttttgcagagcacattgctaggtgctgagagtcaagagaattcctatgagctgcttcattctagtagcttattttttaattgaagagaaagaccaggaatacacaaccatctctttgaccactactaacttgagaaatgttgcataaggccttctatttaaaagtaaacgtgaattccccatatatccagagtgccaggggacttaatgtatgttaaattagttgccctgtcctcagcaacttccagaccgtgcactcatgacctttggaaggggcagccctctgctctccaagacacctccctgccatctcagtcattgttgaccaaaccttaagtggacaattgatcctaggctagtctgtttatcagctggccagcagcaaatcagaatgtctctttcaaagacactcagggctgaatcagccttaggatgctaagcaaatcattccgtaggataggacacagtcacatagaagctacagctgggaaaggcagaattcatagtagagagtgctggtccacctagaggccagcccaagaggccagaggtggccatccccaaaagagagatggagagagtatttgctttttttcctcagatgttttcccaaatccccaggaagcccagtatctctgccttttcagtgaagcctctgtcttctagagtatgcctttcccttcatttgaactgatttgagtggattgcaagctcttaccaagaatggtcagtgtcagtcagtcatacatggagtcatggaagacctacattgcatacctctgacaaataggaaggaatgggaagacagggaaaaggttcagaaagacagatatgtgcacatcttttgagggacttttgggatctagtttctagggtttcttctatgattctttctcacattaggttcttaatgtggaatatttgaggtggcccagggattctgtattagttagaacatagggtaagctgccataacaaagagatcccatcgtgaagtggctaaaatgagatgcaggttatggcttaataagtgccttcgatgagaaaaagatctctcacttggaataccccagagatgagcagtttaggccaacagggagctctccgctcctcaggaattccaagaccactacagtggttactatttctgagacatcagaaagcggggaagtacagaaggagaagactgaaattaaaaaaaaaagaaagaaaaaggaaataagaaggggagaccaggacagatagcttgatatataagaagatgacctgaaagttatacacatcactttcactgatgatgtggttgcctgatcatgacatattcacatgaccacacctagctgcaagggaggctgatcaatgttttctttctcattgtgggtacttatatcaccttttatatcctaggtgtagaaatcacatagcatcactttttttttttttttttttgagacagagtcttgctctgtcatccaggctggagttcagcagcatgatctcagcccattgcaacccctgcctcccaggttcatgcgattctcctgcctcaacctcctgagtagctgagattacaggcccacgccaccacacccagctaatttttgtatttttagtagagacggagtttcgccattttggccaggccggtctcaaactcctaacctcaggtgatccacctgcctcggcctcccaaagtgctgggattacaggtgtgagccaccattcccagccaacttctgccatactctattgatcaaaatagtcaggactttctataatattatgaaaaggcagaaagggagattggatgggtactggggattgattagccacagtctttgccacagactcttttggactgagccgataggtcaaaggttagcttatgcagtagcatgggctgtaggttttttgcactgatcaacaccggaacttttagaagacttttagaagatttgttgctgctgtgagtgacatcagttcacacagcctgagagagaactctcagtccatgctgtccctccttgggctcactcaagtgaaatgggtcgagctgcaacactgtgcggtgccaaccgggagaaatctgcctatcggggctgagagacatcctgtagtggctgcccgtctcctttgccccaaatgtcaagtggaagaggtgcttcacatatttatttcttcctacatgggctcatttattgtaagcccattgtgacccttggaaagccaagcttttatcttgattttggagtgtgatcaaggtgacagttgttctctggatgacaggaatctgactttggttttgctttttccatagaggtcagttggcctcaaatttgggccaatttgcatctggaggagacctccaaggacagatgccttgtcctcattagctaatttgtcaggcagtctttcctgtgtggcacagaaccttttatagatttttcctcaaactcgttttggttggccagtgcctgcctgcctttctttctggaaatgtgctgtgtatttgtggggacgtgactccatggtgcgtctctcttcccaatacattccctttcccctatccacagccctgttacttctgtctttcttccactctcagtgcagcaattttaaagtacatccacagattctttggcactcctacctttgagaggtacagactgtgtccctacttctggaaactgggccagctattgtgactattttgatcagtagagtatggcagaaatgatgctatgtgatttctacgaataggatataaaaggcgacatggcctcttccgtgtccagaatacccctcttgagagcttcagccaccatgtgaatgtggtgccctgagactgccatattgtgaggaagcccgaactatctacacaaagagaccctggagaggccaatgagaggagagagatgcttgggccacccctggctgcttcagccactgctgtcccagctgcagatactgtctgactgcaatgacttgtgagacctggaaccaaaaccaccgcttccttctcaaattcctaaaccatagaaactgtgagagatgataaagatggtgttaaatttggggatgatttgttatgtagtagttgctgattggaacctcagtcaataaaaaggcatctccttgctgcatcgtcagtgtgctcgtcttgatagagaagctaatagtaggtacccattttcagagtcttacttttcctaggggcagctcgaacctttcactggacccccgcttcccaagagagcattcatgtggcccttgtgttcctgaactctgtcaaagatgaccactccctgaggttgcacacgaaggccagaaaggctactgacctcaagctctgctgtgtcatgtttctgtcacacacagctattccttatcaccccacggtcacatccgcaaaaggacgccccagtccctcctcacctcaagcatcatccagcgaggctgtatatggtgcttctgatggaagctgagcctgagtccctgatccctcacttccttggcatgagactgaagcctgagatacctttactttctctgtgccaggcctgtgctaggcatggaggatatggaggagaacattagatgtgagaaagtttttaaaaataaagtccttctgctttgggtataaatctcaggagtaagctagttttgcaaggcctcccccttaccttagcatgtatattaacatattcatgatataaaacattaagagcccaggttctggataggtcaggcaacagctgtaccacttagtagctctgtgattttgagcaagttacttaaccactctgagcttcacaaaggcaaccaggcctgcctctaggattgctgggaggaaatgtgagaaaggctgtccagcacttagcaggtacttctaagtgtgagttccattccccatggaccaccattcccctatataaccagcaaccatcagagctaccagcccaagccattccatctttcgaaaaacaccaaattgaagaaccagatgggttccccagtgtactctgtctctgacagctgacaagggttttctttttcctgcctaccagcaagaagccagcgtcccagcttggttccatctggtatcttgcttcctggcctaacaaaaaaaggaaataccagtggaatgttcacatatagctgggggtgaaaccgaccctcttccaggaaggcggggatggggggatgctcataaggcgcttctattgtctaaagtgcccactataataactcccccaattgtgttcagagaaactgtattacaaataacagagctgaatctcgtattagcctttgttaattcagtgttaggcacctgggatgcatccttggacaagagagactccctgcattatgtggttctcttcatttctagtgattggcacctcagatatcaagggaggagactaaaaaaataaaaaataaaaaaataaaaaaataacaactggcactagtttaaaagccacgtgtaattcttgattagttttcttgattagtttggggaaattaaccatattttgattatttatcaggacaaagacttgccttgtcattgcctgagtaacctttctttttctttttttctttttttttttttttgagatagagtctcactctgtcacccaggctggacttcagtagcgcaatcttgggtcactgcaacctctgcctcccgggttcaaccaattctcgtgcctcagcctcctgagtagctgggactacaggcgcgagctgccatgcccggctaatttttgtatttttatagaggtggggtttcaccatgttggccaggctggtctcgaactcctgacctcaggtgatctacccaccagtgatctgcccaccttggcctcccagagtgcagggattatacaggtatgagccaccgcacctggcctgcctaagtaatcatttagagcaaaagttgtgaggtagaatctggaaggaaaaggaggaaggagcctctgagatcagtgatccattctagacaatcacactttgagacatttggcgtagatgagtcaccttagactaatttatggtgtgttttctattagaattgcaaaattctcacacttgcagggtgttaaaatctgacttcacatcatatttaatacatactatatttaaaactgggatatgaactgaaacaaaagcaaaaactagaaagaactacactcgtttgctgacttctgaactgatcttgggtttggccattgtcattttcatttccaccactgtgactctctgtatctcagtaatgtattttggatctgaaccattccatggattatcagaattattaaactaggacaaacctaaaacatcggaacaccccagcagagctggaactgaactggttgttgcctggctccctggttcccacccagcgtgacagtgtgatgggcagtgtgacagccgtggctgctgtggtgtctgcaactgagcttccacttcagctctgctctgattcaggagcagtgtcagtgatggccttgatgccttaaatggtggcttctccgctatgccaatccttcagctcctaatatggtggtaaaattcagattattatgtaagatatctataaacattggtggaaagagctggagagtggaaataagtgtaatcagggctctatggggcagaagttatcaaaggagaaggcaccaaggccagcatcaaggtgtgtttggagctagaagagttgccctggagaatatctagttatagtgatccttaaccaaaggtggtggaaaaatgtggggctgagagagggcatttggaaatgtggatggtgagttccacagtgttggcgtaggggtggagatgtgattggcatttaatcatagggtcagggaaacttaacatcctccatgatagggtagtcttacaaagcaaagaattgtcccactccagataccaatagtactctggttgaaaggtgttagaccaactcttttgttttatagaggagaaaatggagaccaagagagatgatgtaatctgtgcaaggtcacacagctaggaaatggcaagaactgcgaatgggaacctggttctttggactctaaaactgaggtctgttttcatcatgctccttgttaaggggaaaaaattaacttatggtgtagtgattagagggaaacgtctgcatggcattgtatatggtatcagcacattactactgtgccatttgacacacatgtctccaaacagaagtgagaaagtaagagtgagtgtgtgtgtgtgtgtgagagagagagagagaaggagggagagagagagaaaaaaaatacctcattttctgccaagtagaagccctaaactgaactggattcaatttgggggtcctgagcaccactacagaaggtatcagtcaataagtatattattttgttttagggtttttttaacagctttatttagatgtaattaatataccatattaattcccccatttaaagcacacaattcaatgtgtattcacatagttagacagccatccccactgtctaattttggaacattttaattacttcagaaagaaacccccatacccacacacagtcattccctatgaactccctgcacctttccttcagccctgggcagccccagtttgatttctgtttctatggatttgcctcttctagagattttatagtgatagagttatataatatgtgttcttttgtgactgacttctttcacttagcataacgtgttcaaggttcatgtaaccatgggtgtcctaccttttggcttccctgggccatattggaagaagaattgccttggggaattgttagtgtagtaaaatacactaacaatagctgatgagctaaaaataaaaaataaaaaaggttcgtccgtaattttcttgatatccaccacaaaagataagcaaaaaagtcctcacattcaaagaacactcttgattctaacctacagtatgtatcagcttctggatttttttcactttttggctattatgaataaggctgccatgcacatttgtgtgcaagtttctgtgtggacatatgtgttcatttctcatgagtttatacctagaagtggaattgttgggttatgtgggaactctgttttaactctgaggaactgctttctgctattttggactgttttccaaagctgctacattgtttcacattttacattcctaccagcagtgcatgaaggttctgacttctctacatcctcaccagcacttattattctctgtgttgtttttttttttgaagacagctatcctagtggtgtgaaataatatctcactgtggttttgatttgcattttcctaatgactaatgatgttgagcatcttttcatgtacttattgtcacttgtatgctttcttgtgagaaatgtctgttgctgtcctttgcccatttgtaagttgaggtcttttgattgttgagttgtaaaagttctttttttaattcttcagacaattcctttatcagatacacgatttgcaaatattttctctcattctgagttgtcgtttcacattcttaacagcatcatttgccacacaaaggtttaattttgatgaggtccaactcatctattttgttgttattattgcttgtgcctttaatgtcatatctaaaaaccattgcctaattcaaagtgccagagatttactcttacattttcttttaagagttttgtagttttagctcttatttttaagtctgtgattcattttgagttcatatttatgtatggtgggagttacgcatcattcttttgcatgtggatgtccagttgtcccagcatcttttatcgaaaatgttattttttccctcactgaattgtcttggcacccttgtctgctgttttaaataaatacactgcatagactcccttggctatatttctagtctggaaacaaatacacaagtagtgtgtgattgtctctgtcttcatatttagttgggacaagccgaagctgtatgatgatgtaacaggcattttttttttaaatggttagatctcttcttcactgagtgaccttataacaccacacacgtctcctgcagagaaccagtgccaatctccttcaccagaatattttctgctccacagatagtgatagttgtagcagtagttgtactcattggaaactgtcctgtgagtgtttagtatgtgctaggcactctcctgagcactttatgcatattatttatttaaaccttgtgagatcttagactaagttagcacagggaaaaaaggaatttgaaaaaaaaagaaaccttgggggaacctcatgaggcagtgatgagtatccacgttttaccaatgaagaaaatgagacccagaggcattagttaatttgccctgggtcactcagctagtaggtgaaggggccaggtttgaacccagcagcccacctccagatgccagtctacacctccagaagtgagactaaactgcctgctgtgggtctgaatgtttgtgtctcccgcaaattctatatgctgaaattctaacccccagtatgattgtattaggagatgaggcccttgggaggtgattaggtcataagggcagagccctcatcgatgcccttagaaaaggggtacaagggagcacattctgtctttccattgtgcaaggacacagtgagaagacactgtctgtgaaccaggaaatgggccctcaccagaccctaattctaccaggactttgatcttagacttcccagcctccagaaccaggaggaataaatgtttgttgttcacctggtccatggtattttgttagagcagccccaactaagccaccgcctctctagttcactattctgtccccggtatccagggcatcatagacactcaataaccattcgttgaatatgcaattggatgaaatgaataaacgaccagaggagtaatccagacagagcagcagtggccaagggaagggaggattgatttatgggagaaaattaggggaatgaaatccatagaaagggtttgcctaagtgagagtgatgactggagccagaagacacccgggggagaggaattgtttcacatggtaggaaaaggggaggagggagagaggtggggtggtggagtgcagcctcgaggctggaatataaatgaagagccacagagctgatatttcagcctgtggaacagtctgaggaaagtatggaaatgccatcatgtaagcacgtacacccagggcattctaccctgtcctgtaaaacagcaagggcccactttgtccaccaccacaatggcgatggctcctgggaagggtgcgccatgagtatcaaattattatggttcgggaaaataattgctggttgtggaattctggagaagtagtatcgcaaaagagagacatgcacagaagtgttcaggcagggagagctggtttgtataaataagagcttgatgagctatctgttatgatttatgctaggaatccatagcctctgtgcttctcacacagtacataaacccaaaaggtcgcctctagtttggagtggtgatgctgtgccagtgtgggagcaggcaaggccgtgaggccttcttcctcacaaatccagcacctcccacctgccatcgggtaaagagagggagggcactgcaatggctggtgttactgagccctcgcggcatgccaggcactgctcattcgtgttttacaccatttcggaatcctttgaggaagttatttctattatcacaatccccattttacaggaggggaaagtgaggttaagggagacaatgggataggcatgaggtcatccagtaaatggcagagccaggattcgaacccacactcttgtgacctcagagcccaagctcttaactatgccttccacagacacaatccatgcaccttaggatttttacctgaggttcttagtttggtttgggggaccaaaggaacaagtaaacaagcagaaaatgatgaggaagggctgtgctgtgtgcccaagcgaggaagcaaaaggatgggcatgaacaatttgtagatgccatccagaacagagtggtcaaggatttggaggctcagtgcagggggagaagtgggaagggcttgtgctgtacacatgagggttaggaactgatgaagccacctccccaagcctcagattttccatctgaaaaatggaaacaggattcatctccttaattgtgactatcaagtgtaataacgttggtaaagagcttagcacaggcttggcacatggtaggactccataaatagacactgcaattattcgttctgtggttactgcatgacgatgatgataacaataataattactattattattaagcaggaactgttttaggtgctgggaaaccaaaaggaaaaaactccatccccagcccctaggagcctgtagtctagtgaaggagataaacttgtgaacagataattcctatctaactgcttgcttccttttctatgcactcatggtactgcctggtgtgatggttcatgcctgtaatcccagcactttgggagggcatggcagaaggattgcttaagcccaggagttcaataccaacctgggcaacataacgagatcctatctcaatttttaaataaataaataaaataaaatttcatacaaggctaggaaagtgactcatgcctgtaataaataccagcactttgggaagctgaggtgggaggattgtttgagctaaggagtttgagaccagcctgggccacgcagtgagaccttgtctctacaacaacaacaacaaaaatttaaaaatcagccagacatgatggcacatgcctgtagtcccgactgcttgggaggttgaggtgggaggatcacttgagcccaggaggtcaaggctgcaatgaactatgatggcaccactgcattccagcctgggcgacagagcgagactccgtctcaaaataataataataataataataataaaagtgtggtacataataagtattcagcagatactttcaaatgagtaaccatcagtgcttatttttaaatgtaatatgatgtgtgcaacacaagagttgaacccagcctagagctcagctaatcgtagctcaccaagcttagctccattctacaagctggtgcaggtttgccctacctgcttttctttctcctgggagcaatgtgctgccccacagcatggttttctcctggcagtattagaagtacaaaatcgcaagcccagctctataagcatattttaagcatctgctcatttgtcccattgaccccaaggtaagtcacatgaccaagcccaagatcagtggggcagataaatatattctatctccagccagagaggctgcaaggtggcatggccaagtgcacgggtgtggaaagggtgaagaattggaaacagttatgcctctttcacagtgaagtttggagggggagtaggccctagccacaaatgtctgccccttggcctggcagatgtcctgttttccaggagtccagccaggctgtggcacagtgccgaccccctgactcttgtccgagggtctgtgccaaccacccggactcctaaagtccggctgtggctgtagagttgaatattggctgaagccaggctgccttttattgagtctgcctccgcctcattatttacatagactgtaaaataaagcttaactcaaaattaccgtaagtcagcgcatccgagtgaagccggcagctggaccttcacaactgaaagcagactaaataaaagggggaggatgaaaaaagaagagctgcaaataagatgtcagggaatgcttaattatataaaggttatgcatttgcctgcataattgtccaaagcaactgatggcaacagctggcagagaagctggtcttcagctctatttgtgtttatctggtgcctgtcaccgtaatagctacaagaagtattgatcacaaattaatttggcctcattccttctcctttttgtctctacccttatcagtctcacttcccctactaaaataggaaggctattgaatacatggagaaaacttggagtttgtggaggctgaggctaccaagtatcatggaagcaatatactatatgccaggcactagcataggtagcatttgtaactgacttttttaataaaacaaccctataaggtaggtattcttattcctgttttacatataagggtagtgagacccagagagatgaactcatttgacaaaagtcacacagcttggggtagcctggtgattcccttaaccacggctctcccaactgggctctgcaaggtgggtattttgggagttttttcactgcacctggagtgaaatctgaaccctttaccacagactacataccctgtatgttctaactggtcttcaagcacatcttctcctggtatcctccaccttgtccggcacgctagtctccttttcctttctttttttttttttttcttggagacagagtctcactctgtcgcccaggctggagtgcagtggcatgatcttggctcactgcaacctctgccacctgggttcaagcaattctcatgcctcagactcccgagtagctgggattacaggcttgtgccaccatgcccagctaattttggtatttttagtagagacggggtttcgccatgttggtcaggctggtcttgatctcctggcctcaagtgatctgcctgccttgacctcctcatttccatttcttagacatgccaagctctttcctgtttaagggtctttgcaggtgctgttacctctgcctagaactgtgttcctgcaaggtcacccgttctaccttagctgtttccctcctcacccttagtattattgttcacagtgtccagagtgtttgttccagggcagttatcatacttatcagttgtgcctttatgattgtgggtctgcactctgatctgtgcattccatgtaagcagggatcatacttgtttcattcacttatgtgtacctagatcctggtacacagaggcagtagagtgcattagagcatggtctctgaaagcaacttcccgggttcaaattccagctctgccacttattgtcgactatgtgacttttaggcggatgactttctctttctgtcctcgttttctctgcctgtaaaataggaataatgatattgttgtgtagaatgaattaagacataaaaatgctttgtacagtgcctaatacgcagcaagcagtacatgtttcactgctgttagtcatcatgattaaaatcattagcacatagtagatagtcaatgtttgttgaatggatgaatgaatttctaatcgcagaagggtaaacaggcctcagctggtcgatggggtgagtttgtaagctcagtgtgagactgctccatctgagatgacacggtgatcaaagggttgttctttaaggtgtgctgatctccactactcggcacccaactgcccaaacagtgctgtaaggtgaacagatttgggagaccactttttgtgattccgtaagttattttggtggaggtggacagagttttggtggtggagaatggtgtcttcttgctcctgcagtgcacaagatgttttcaagccacatggagggtgtggctggtaggctctatggtcctgttccgtcccctcccataaccccctcaacctgatctgctgcaaaaggctaccccccttggaaggcagctgatagagaagctgtaggcttatgctgggaccccaccagggacaaatgaggccgatttggagacactgtggaaccaggaagtcagtctgcacattgtgatctgcgcctgcgatgctcctccccacccttcacgtacagtgctgtttggagggctcagtcctgctttctgctctcctcttgcctttggttctcctttggcaggatcccgcaggaagcgttagaaccccaccactgctcccgatgccttgcttctgtctgctgctggtccccgctgcctgcactgcccgccccctcatcacctatctctgctggcctctcaagggcactgcattgtccttcagttcctgggcgtgaatctgctcatcaggcaccatttaccttctccagccctgtgccctgttcctaaatcaaggcttacacccaccaagagcagggtttcttttatcccactgtaatcactcctaatgtaatcaatatgctcagatctcttattggagagagtaagttatcaccaagacccctgccagccccatttcagccaattccagcatgcagggaagaggttgaggattggccttcggtgtggtcagggtcgggaggctggtccccagaagaagccagttgttggctgtgcctttggggcagcggagtctggagcccggatcatccatcagggctatcagccttgtttgggtttttcagtggaagctcattcacgtatgcaataatgggatgctgggtggtctaagttgccttttgatttttagtctccgggaactccagtgttcctggtgttatttggtatgtctgtggctttaatttcctttttaatttctgttgaaaggaagaaagaactctgtggagttataatctgcagagaacctatgttgtaagaccagtgggtgtcctgaatggctaagtaattagaacatgcataatcacccagagttaaacccactgccgagcaagtgcatcctgtgaactcgactgtgtaaacaaaattgtgcagaatcagcccaaaaggaaaattcaacaaatgtgagcagtggtcatccctggtggtggattgtagagaatttaatgtctggttttgcccatttttcagttttttacactgagcacattactgttgtgttttgaaagaaagacacgcattaaaaaataaccaacacctgtattcttgtcaacacttgatcttgcaatcttaatatagaagactgcaaaaaaatgactgttagaagctaaagatacaggtttaaggaatgtctttactttattgtttatataatgaaatattaatataataaaactacagatttgcatatggaattggggttaaacagaggtttgaaggattatcaattatgaatagtttatggtgaaagttacacaataaaacagtactgagaggaaggtgtttttcacttatatatttgaatttatatagtacatgctgtttaatcctggctggttccttaaatctcactttgtctcagtttcaccatctgtaaaattggggtactagcctgttaggttatttttaggaagatgtgattaatatttgtgaaattcttagaacaggattggaacatagtaggtactcaagaaatgcttgatgctgctgggttagtcttattgttgtgatacagaggctttgacaacagtttttgctcctacatcagaagtaacagtaggtaaagctataatgttagttaacctgagtagacttcttaccatgtctgagccaccatgctaagttttttatttaggttatgtcatttgctcctcaaatctgcttcatatcagtttaggatgtaagggctcagagaggttaagtgacctgcccaagatcacacagcttgtaagaatttgattccaaagctcatgctctgaatcactgttttattacctagtattgtattttttgttcttctgcaggtacccaaaatatgcacttgcctttactttccctgggtcaaaggtccaccagttgaggtgttttaatgcccttccaaagatatatgttgggaatttctccagctgtttccccaaagcagcctcctcctggtggatgtacaccgaggaggcaggagctaccccacactcactgatctgaggcatcaggtggccgggaggttcataactcaactgttgcgtattgatggcagagttgtttttacatatatatatatatatatgtatatgacatgtaggcaattaaacttagaatgggaactgaaagatgaagaattaattccctgtttgtttgtaatactgtgtgtaggcaaacaattaatcagcatctgtataaataccctccccataggggtctggcccagggacagggagctcctctgcctcctgctagctggagaatattggtccatctcacgcatttaaccgcaatttcttctgcccagccttgtgctggatgcttcaacaagtgaagcttaccaaaccaccatgcacagatgctccccctgggactcgtgggtagagatgccagagggtgccatcataaaggactgtagaagcccgtgcacctgggaaattggactttatctcgagagcagtggggagcccaaagggcagaactacaatccagtttttaatcagaaaaaccactctaggctgggcacggtgattcatgcctgtaatcccaacactttgggaggctgaagtgggtagattgcctgaggtcgggacttcaagaccagcttgggcaacatggtgaaaccccatctctactaaaaatacaaaaattagcctggtgtggtgataggcacctgtagtctcagctactcaggtggctgagtcaggagaatcgcttgaacccaggaggctgaggttgcagtgagtggagatcacattactgcactccagcctgggtaagagagtgagactgtgtctcaaggaaaaaaaaaaaaaagagagaaaagaaaaatcaccctagcatcggtggaacagtgatgggcagaggccaaggttagtagagagacactggctgggatgctacctttgtagtctacatgagggatggtggtggctttccctgtgagatggagggaaatggacaaagtcaagagatgtcagggaagtagaagtacaggtctcaatactagatttgatgtttggggagtagagaggaataatgatgagggaaccagcccctgcctccagctcgagagatttaatagaccttcccagatagaaatgtcccggtcattgtgtgggaaggttaatttagaagagcatatggcatttgttctctgcctgcttctgagaagaacactattagcccttttctaagtcctttctaaaacaaaaacaaaacccaaaggatttggcttgcaactgtcgatggcagaggctgctgcaagcaggacttggtgttttgctgattcgaacattgagcagaggtatgtggtctgggattccctgtgaaatcagccccagagccttcatctccaatagcctgtgccaacctagaaggccaatatgaaagttgaacgaggaactaggaatggtcctgtcccagagtcccttcagaggaggtgagccagtatcaaatccgaccttgctgggaccccaagggatgttctgcactcagattttataaatcgtcctttgtgccaggtcccttcccgggagccacaggcatgacttaggttgttgcgtggattcccttacctagggcatagagaggccatgcaattgatcattgctctgaggcagtcagaaaatgtggaaggaggcatcccagctgaaacatctgccctaagcctccttcttggccctaaaacctgcctggaatgttcaccacccccaacactctccccaatccacccacctcctctgggtctttgctcagtgagaccttccctgaccaccctctatcaaactgcatcttttcccttccctgctatatttttctctgtagtatttatcaccactgggtgtacactgtccttacattcattcttgttgtttgctagtctccctctgtaagataaaagctccaggagggaacttccgtgttttgtttgttgttcattgcagtatcctcagcccccatagtggtgcctggaactcaggaggggctcagtcaatatttgttgaatggatagtaatagtaatggctagcttttatcagctgagaccctatgcttacagttcactgaagagttgagagacaggcattgaacaggcaatttcaagtgtgatgattcgtgtaaggaaaagtgtaggacacgatagtagcacggtgggcttccctgaggaaggggcatttggctgagacctgaagggtgataagaccctgaagagaagagtcttcccggtggagggagcagcatttgtgagggcataaggtaaagagaatggggctgacgggatagaactcacaaatgaagtgtgcagaggcttgtctggatgtgtccacgggggctggaaggggctggattttagaaaaagtattaagatcccagccttgatcctcaggacagcgtgaggccatcaaaaggttcggaaggaagtttggagggcagaaggctggagggaatgcttccttgcccagatgaagcctgaatgactcgcagggctggggcaagctgccgccagttttatccacaaagcagcaaccacttctgctaagatagtgatgactccgagcccctccagctcccctgttctcctcaaccctggtctgagcgcctgctttgtgcgagtcattcaggcttcatcaaggcactatgttaatgttaggtccttcttacagatcagcccacgtagtcctcacagcagctggttgaggagctattatcatcatccccacttggcagtggtaggtagaggctgaggctgagagagttgcccaggttcactctactggaaggagccagctctggaatctggaattcagccccaggcctctctcagtccaagtccagtgcgcactatctctttcatggactgcctcccattctcaggatcctaatgtctttatctaaccctgctggtggccagaagcctctacctggtacccgtcacaacccaggtgagaccaggcatctcaggatgcctcacctgacttccagctggaatccaacctgagctgtgcagttggctcaaagggtggccaaccagaggagcagatttatccacattggcatcagaaaaaccactctaggccgggcacagtggctcatgcctgtaaggctcatgccttgagaggctttccctgttctcccagctctcaccccaccaccagtaatctgtgcttaaacgagctgtcttgcctttccacgcaaatgaattggagatggtgaggctccaggcagcagcagacgcatctcaaagctggtttggggcataagagctttctctctatgagaataacctgcttcggagccttctcaaggatagggaggttggtatttatataaagtgaggttttcgaaatgaacagaggtatgagctgcctggcagtgtcctggaacgagccagtttgtaaaataactacttttttgttgctttggggctagaatacattataccagagtaagagatggtaactgactacattattgtatttatttcttaggaatgaaaacactatactattcctattattggggatgctttgccttttaaaaaaattatggtgaaatatacataacagaaaacctactgtcttagccatttttaagtgtatggctcagtagcattaagtactgaattattgtgatgatttgccttttgaaatccagaaaagaatacctgggtgtattttgtccaagcatgtaatattgcttccttgactcctatttatagtttctaacatttgcatggtttattccagtttgtatagtctatatcacacatcttgcctcattgaacccacctggggcctggggtgggctgggcaaaggaccagaggagcttaggtgctgggtggtctttgtttcgagcatgttctagtgccatctagcgtctgtgggaccttgtgctggccaggctaaggctgttggatttcccctgcttggggcgatggctctgtaaaacccaaatagctttaaaagagcaccaaggagatgtttgtctttttaaatcagctgggatttttttttttttccagctctgatcccttggaaacttacaactaaaattcatttcattagcagtcagaacagtgtgtccctttgaagttcagacagggtgagattaatatgaacacgatattaagctattaagcatcagtttgccaaacctatttataaaggagagcggaagacggaaaataaaggaggctgcattaagaggctcctttgccaagtccactgtctcttgttggaaaatgtgtctcaataacccgtttttgtgtgagagaagagaaaaagaaaacgtgtgactgtgtgtgtgtgtacacatgcttcaatgatgtgtgattatctaataagagcaataatgcagcgtggctaaacttacacagtgttgactgtgtgcccaacactgttcttagtgctttatatttaaaatttgttaaatcacacaacaacccagaaggagtaggtgtcattatttccccgttttatagatgagaaaactggggcacacaaaggttgggtggtttgtcgaaggtcacaaagccacagtaaatattttgtgatagagaaattgttcaggactcagaagcacatggatttttaattcgggtttcaggtgatgttgcgttttttcttcctatccatacatcacttttgagcgccttacagtcccgataggagaggaccttacatagtgcttgtcaagtgaatgcagcggtttaagcccatgtggggtttttggcttgttttaacgcactcataagtaacgtactcatgcggggccgtgtatacagagggaagagcaccacgttagtcagcaggtttgagtttggtcctcagctctgtggcttcccagccacgtgaccctgggcaagtgacttcctctccccagcctcagttccccccttttggggataatagaatgagttttatagtgttttggggtttttattttgagaggataaatgagatactgattaaaacagcctcttgtctagtgtttggcccatggtatgtgctcattaaattttacctttgtttaccttttatctggaaacttaaacttacttagctctccttttgcattttctggcatctcctgcagtgatgattcatcttccttatggcctaagaaggccaagtccatttgtccattttcttttttcttttttttagttgagatggggccttgctatgttgtccaggttggtctcgaactcctgggctcaagcagtcctcctgtctcagcctcccagaatgctgggattacaggtgtcagccatcatgcccagcctgagtccattttcttttcctttcttttcttttcttttcttttcttttcttttcttttcttttggaaaaaactgagacaaggtcttgctctgttttccaggttggtctcaaactcctgggctgaagcagtcctcctgcctcagcctcccaaagtgctaggattacaggcatgagccaccatgcccagcccaagtccgttttctttttcttttcttttttttttttttttttgagacggagtcttgctctgtcacctaggctgtgtctcagctcactgcaagctccgcctcctgggttcacgccattctcctgcctcagcctcccgagtagctgggaccacaggcgcctgccaccacgcctggctaattttgtttttgtatttttagtagaaacagggtttcaccgtgttagccaggatggtcttgatctcctgaccttgtgatccgcctgcctcagcctcccaaagtgttggtattacaggcatgagccaccgcgcccggcccattttctacatcgaaggataaaatggtccagttctgcttgggtgtgggttcttaaatgtctgttctagttgaaagaactgaaagctgagaaaaatctggctttgttccttcttccctctttcagatttccaagtatatatatatataacatgtatgtatacacacacatacacacacatgcatgcatagcgacccagataattttggatcaagtataacaggaatggagataaaatcagaaggacatcagacatttggatgggcaaccagacactggggaaaaaatcttgtttgtctgcaagttacctcctacaaggcaaaaatcataacatcagcatcttatggaaactgaaaagggagatccggagaagcttccagaaagcagggggatacattgaaatgcattgtacactcctaatgattgcaattttaagatgtgtaaagtgttactgatagtctccttaatatgcagtgtctgttgtcattaggtattaataagcactaatgatattaataagcacttttatcagttcctgtaaaaatcgagttttcctgatcttatttttcctgtcatgtcttaggctgcttaatcatagattctcactccatagggtctgcagcatttgcatgtctgaaggaagtggtttcttcatccagagctctcaagctttgagagggaattttacatatcatcttaacagtggtgtgtgggaaatgagatatggcatttttgttcgagggaactcttgtaggcccccttcacatctcatggagaaggcagcagtgtagtttttgcaagcctgagcccagcctttcagctgaaggtagctgcagccacattgggcatctgttacggacctcattgagaaatggaatcattcattccctcttgggctcattcagttgcagttatgtttaacttgcttttgagaacctcccctcttgctgggaagtctgtcttttgatctgcagcaggaagaatagctcagaattggcaagttggtggtgggtgctgccggctctctggggaccaggaggtatcatctgcctggtaccatgagggtattaaagggggtgaaacactaatgacttcttccagctcccctgcctctaggtttctctcctggttactcttatgtccccagttctccactctcagcacccttcttttctccattttccctgtttcccctctctctttccctcctcttcctcactgttgtaggtgcagcaaaagaagagtgatgtttggtggatacttgggataactgagcttccaccttcttttgactcagcctggagatgcagcctctcaacttttctgtataaatcatttaaacacacggtttaataagcacagagttttgctgtggcttgtctctggtctttcagatcaaagccagaagtccagggaaatgtctgggaaaagtcgtgcctctgcattccagttctgtgcattttgattcttgaaagattgattgctggctttttgccctttccccatggctggggtttgggaagattctggagagttgttatttctggcccctaagccttgaggggtggcaacaattctgaccttgctttccttcttcctgccttctgttcccattctgagtcttctcattatcctgagtgtttaaaatgataaactccttcatggcatcacctacccatctcccaaaacagtgatttaaaaagcatgaaaaaccccaggtaaaatgaagtcaaacagatttctttgttttggaactactacaagtcttggatgctttagaaatccgtaagtggggttgggcacggtggctcacgctgtaaccccagcactttgggaagccgaggcgggcggatcacttgaggccaggagttcaacaccagcctggccaacatggtgaaacaccgtctctactaaaaatccaaaaattagttgggtgtggtggtgcacacctgtaatcccagctactcaggaggctgaggcaggagaatcgtttgaacccgggaggcagaggttgcagtgagccgagatagcaccactgcactccagcccaggcaacagagtgagactccatctcaaaaaaagaagaagaaaaaataaatccctaagtgggagatacagtatttggcattttccaaaagtacccaaccaaggaattatttcttggagttacatctcgtggatcaacactaccaacactctagctctgaaggacctgctagcattattccttcaggataagatattccttctatataacccagttcatctgtgcacatgaatctgtgtacactgagtcctgtgctctatgccgattggccttcatgaatgtgtgctgcagggggcatgctggcctatctcagaaggattaagttgaggcataaaagcctgagtgcccactgtgcaccagatgtttcatatacactgtcttaggtagacttcacaacaaccccacaaggtagatcctgtttttcctatttcacaattgaggccagtgtacagagaagtaaagtaagttactgatacagtttggttatttgtccctgcccaaatctcacgttgaattgtaatccccagtgctggaggtggggcctggtgggaggtgtttggatcatgggggcggatccttcatggcttggtgctgtctctatgatagtgagttctcttgagatatggttgtttaaaagtgtgtggcacctcccgccagactctgtcttacttgcttctgctttcaccatgtgacatgcctgctcctccttcaccttctgccatgatggaaagtttcccgaggcccacccagaagctgagtagatgcctgcaccatgcctcttgtaaagcctgcagaactgtgagccaactaatcctcttttttttttttttgagacagagtcttagtcacccaggctggagtacagtggcgcgatcttagctcacggttacccctgtctcctgagttcaagcaattcttgtgcctcagcctcctgagtagctgggattacaggtgtgtgccaccacagctggctaatttttgtatttttagtagaggcagggttttgccatgttggccaagtgggtctcaaactcctggcctcgagtgatccacctgcctcagcctcccaaagtgctgggattacaggcatgagccaccgcacccagcctaaacctcttgtttataaattacccagactcaggtatttctttatagcaatgcaagaacagcctaacacagttacccaaagccctacaactagcaaattctggcagggccagaattcagcatagatattaggaagaggtccatggaacataacgcagccatgctaagcctcatttgtcactggccagcaacctgaactgaggttgaccaggaaatggatttgtgatgggaccattctgtcactgtttgtgtatgtaaataagggacatctctgacacctgctggggtagccagaacatttaatatcctttgcctgcctgaacaccttttcagatgtagggctcaattcacatacctacaagttcagtttttacccaaccaacttctaatgacataatctcatgagttcattttatctgtaacctctcatcagaattagcagatcctctgcaatttgggaactctggacaaaatccaggggaaagattctgaaggtgaagcattcaagtctagcagtcctaatggaaacagtgtaatagcaacatgccactcatctgcagtcagcctggatgacttaaattggtttccaggaggttgaagtttcatgagaacagctcggcacagctaagctggtattaataagcacattgtgcccgtggacaacattgtagatcaatacagtatatgctccaaattcacatgatagatgagtaccattatgacctaattagcaagccttatattttgaatagataaatagtaattccaccacataatcctaaaccacttcttgaaaaacgccgttgctgccgctcttccctgctgcagagatgaaggcagagtgagcagaggaatgggtaaccatttacatatttatttgcttctgtgatgggtaactgttttgtctgtattcacagacgtctctagttcagctgtgctcattattttttaacatgagataagaggaaagtgttcagtttttttaaaagtcaaaccacatcttaagggtggaatttactgggccatacgtaactcaggggccctttaatctgttgcatttgaggtgcatcaccctgagtgcttgaagatcagggagttgggtccaaggctggcagtgacaccagcaggctgtcctctgcaagggaaccatctattgccttgtgggcaagaacatgggctctggattcagagagatctgggttcaaatcctgactctcacctttcttaactttgtgaccataacatttctgaaaggcaagtaaatgggattgctaatagtacctacttccttgggtggttgggaggattaaatgagataatgtgtgtcgtgcctagcacagtgcctggcacatgatgcgggaatagatcagttagtttttattgatagtctcttttatcttttgtgcagtaaagtagtttgaccaaatcaaagagtcccaaagtaaggtcttgacaaacatattggtggaggtggctctcagactattttcagtattaattagaagtgcctgatgtctttgcctttgactggactcactccaacttcatagcaacacccattatctcatggaggtcagaggcttggtttggcagtgacatttgtttatgattagttaaaaatgggaatcatattaattagtatttaatagctgcattttggtgacagattttgctaccaagctgcccttacacatcttacttggaaaatgcctctggtttagaagatggcagttgtcagaacatgtgatgcttggggggtttgaggggtaggtggacattgaagatttgtggtggtagaaagtttaagacccttggtctggatggtgttttctagttaaccttctctgattctgtgagtcctgcctgtgcagagagcacagtaatagggtaacatgtaatccctatgtaatagggaacctgactgtttacctatacacaccttgcctaccctttcttctcccacccattatgccctagctggtggccttggcttaagccagataaatgtccttataatctcaggaaaatgcaactctcacttctactccctgctatccctgtgctgccagcctgcctggaatgctcttctctctttgtggccctactcagggttcctttagcttgatactgctggtcttttggactggcaaactctttgttgcattatagaatgttagccagcatctctgaggtctatccattagatactagtagcaccctggtccctaagttgtgacaactaacaatgtctctaagaccttgccaaatgtcccctgggagtgggggcagacccaacttaacatcctgccttctccatgaagacttcagttccagtccgcataattcatccgtcaattatagatgatcccaactttggtctgtgtgtgtcttcattttgtctccccattcaggtctcactgttaaagagtttggaccacattgtaacttctctgtctccacagagcagatccttgtttgctgtattgatttttaacaagagcctcctggcttgctgttggttgccatgaattgagcacctgatgtttttcagtcgcttcatgtatattttctctaattcttacaacaaccctcatcttaacaggaaagatatctgaggctcagagcgggtaagtaacttacccgtagtcacacagctgatgagtccaaacctgtgcgcttccccataaaccaccaaaccctgccagtttcgggagggcagcaagaaggcagttggtgtctctgtctgtctgtggcctgtgtttaaattatctccaggagacgagggtgaagggatagcgtgggagtgccctttgagaatggatgttgggaagaacctagtatggaaagaatagggggcaacctctcttcccctggaaggcttggcagcaggaatccagccgaagtgaatgtgctgtgggtttagagctgggcactgattggttcttctgtggcagccctgaaggctgagtcaagaataggtcagccttacatgcttggagatgctctggaaaatgacatatctcttattgggctaagcaccatgctagggaaaagtaaatattccctctggcagccatgaaaagaacagtcagcagtgatgagcaggacaagggaaatgatttgttttgtcttggaaagctgtgtttgttacctctgaatatggcatgtttgttcttaacgaagacttacctgggcagtttgcagaaggggaaatctggtgaaccatgagcctatgaggggatgtgcacttcttctagtaggcagggcaaagtaaaccaaaatggcaggacccttctcacaccagagaataccttggcctgtgtagaagaggatgcgcatacgctcattcatatcctcattgttggtaatgatgaaaaattaacaaaccatctaaatgcctgtctgtaggggatttgacaaatcctgtgatggaataccatgcagcacatcaatttttgagacagggtttcactatgtcacccaggctagggtgtagtggcactatcacggttcactgcagcctctacttcccgggctcaagcgatcctcccacctcagtctcctgagtagctgggactacaggtgtgcgccaccatgcccagctaattttttgtagagatggggtctctccacgttgcccaggctggtcctgaactcctgggatcgagcgatctgcccacttcggcctccctaagtgctgggattacagacgtgagccaccgtgcctgacgttgtgtacactttaaaagcatatggaaaccaatattatttatttatcatagatagaaatgtgtctatgaaagtattaaaaatagactttcaggttgcaaaacaaactgaagaaaataattacctaggagcacgaggggtgagcaggcaatgcaattgaagtagataaagcatccttctttgccttatccgaaaggtactactaatgtgaaaaataattaatggaaatgtgacaaaatcctagctggttttaattctgggtgctgttgagctttctctctctctctctctctctctctctctctctctctctctctccgtgtgggggtgtgcgtgtgtgtctgtattttaaaaaatggttccatccaaaatggagatatgcgtggtactagccctgcttcctgtatgggctgtcatggggattcgatggcagtaatatatgtgaaaatgctctgtcaactaggaagcaatgcaaaggcaggataatgtttatttaataagaataatcacctatcgagtttttctttggtccttggctaagtagctttgtagcatttggaggcttgggagagtttgcagtgatttacactctccataccttgaagttcatgttcgtttgttttgtaaaaactccccagagcacacagcagagataaaagtaaagagaaagcagggatcgaatttttatgtgcgtcttggaaggctggggaggatgtggaagcggatgcatccctccgggaaaatggagacagctgcctgaatggaaacccacagccccatccctgtcctgaggtctggggtttgatcttgtagtgcatctgatcaactttagtacatgcttactgggtcgttggtctaggcagtagccagaataggagaatttggtgggggtgggagtagggaatcagtcagtaaagggagacagggatgggtgaagaagggatgtacgctaacccatatagatgaagggcatgttcaaataagtagtttctatggcaacacgtggagtgagccaggtgcccccggcccgagcagacaagcaggctctgaatggagcactctccattacctgaagaggtagctggctggagcagccagggtcacaggaagtcagcagaatagttgggtggaaggcaggctaaaacacagtgcatagcctcatctgcatttctgaaggcaataaattcccatttaagctgcaatatcgatctgctctgtgaaattgcagtatcagaggttgttttcttttttttccttaaccatacaattgggacctttccctgaatctcagacaggatgtgcaggctaacttgttccattttctaaggaaaaataaaccactattgcttgcttccagtcgcctcccccttcttcacttttggggaagccatccagccatggctggggtttccggacagatggtgcccatccttagcagcctctgtggacctccatttgggacactctgaatgcagtgacacactagagtcactccttagtttctgacctctctgatggttttactctgatgaaagggtagactgcagtctccctcattcacacatcccagctgtattaagtgagctgaagaagacatagacacaagaatatccatgtgcctgtttgttcctactctgtagttctgctgtgtgtttgtgatttgtcatcatattccgtttagtagctgctggtgaaattttgaggttgaattcttactaggacaactgttcacctaccagccttaaacctggctcctcatgaagtctggatgtcctcaaccttcagcacctcttagccctttagtctgagtggaagaggattcggttacttgatccacagtgcatgctgaacccactgtctggttcccgcccccgcctcctgcacttagtcttaagcacaaacgtctaaaagaagccaggtgggaggggcagtggtgcacccggtgcagccggtgaagtgagactcacactcattggagggcacgtgccacaccaaagggaagcccccaacccagctgcagccaggcattttcaagcaggagggcgctttctgcattactacctcttccaggttatctaaaggagccagaggttggaatttctgtgtgaaagctcttgatttttaaatattgaaggaaaaaacaattggaaatctgaaagcactgtgcagtcacgcaaaaatccagctcccaggctcatggaacccaggggaaaagaggcaaaccaccccaatgggatttaggtacatttgaaaaaggagccaaattggtgaaccttttcattaatatacataacaaacattgattaaacacgtactatgtggtaggcactatgctaagtgcttaacattgcagatgcatattcaccagtgaggcgggtggggttaacttcactttacagatgaggacattgagtctcagtctgggaaagcattttgcctggggtcacctaggagtgatcagaaccagcatctgaacccaattctgtctgtgagcctgtgaacctgttccccaggcacaacgcgctgtctccggcagccttgcttcccctgcttaaaagtcacaaagaactccctggccagaaaggaaacccaaggcctggcgtcctctacctctttcccgtggtggccttgaatgagaaaccagaagaagctggcacatcaggtgaatgtggctttgaccactctctttctccacggttcagggcggaccttcttccaaaaatagacttgccaaaagtcttggctgttgttagctcagaaataacctcattgggcaggaggatcctgtacctggaaattatgtattttcccacttcctgtttgagcccagggagaatgccacaggaaaaagagaaacaggtatggagactgtgtgttccagccttcctaagtgtattagttggctgtggctgctaacaaaataccacagactgggtggcttaaataacggaaatgcatctgctcactgttctggaggccggaagtccaagcacaaggtgtcagcaggtctggtttctcccagcaccccttttttttggcttgtagatggcatctccttgctatgtcttcacattagattagagcccaccctacaaacaaaacaaaacaaaaacctcattttagcttaatcacttctcgaaagaccttgcctccaaatgcagtcgcattctaaagtgttggaggctccctctccctctccctctccccctccccctccccctccccctccctctcttgccacggtctccctctgatgccgagccgaagctggactgtactgctgccatctcggctcactgcaacctccctgcctgattctcctgcctcagcctgccaagtgcctgcgattgcaggcgcgcgccaccacgcctgactggttttcgtatttttttggtggagacggggtttcgctgtgttggctgggctggtctccagctcctaaccgcgagtgatccgccagcctcggcctcccgaggtgccgggatggcagacagagttgcgttcactcagtgctcaatggtgcccaggctggagtgcagtggcgtgatctcggctcgctacaacctccacctcccagctgcctgccttggccccccaaagtgccgagattgcagcctctgcccggccgccaccccgtctgggaagtgaggagtgtctctgcctggccgcccatcatctgggatgtgaggagcctctctgcctggctgcccagtctggaaagtgaggagtgtctctgcccggccgccatcccatctaggaagtgaggagcgtctctgcctggccgcccatcgtctgagatgtggggagcgcctctgccctgccgccccgtctgggatgtgaggagcgtctctgcccggccgccccgtctgagaagtgaggagaccctctgcctggcaactgccccgtctgagaagtgagaagcccctccgcccggcagccacaccgtctgagaagtgaggagcccctccgcccggcagccaccccgtctgggaagtgaggagcgtctccgcccggcagccaccccgtccgggagggaggtgggggtcagccccccgcccggccagccgccccgtccgggagggaggtgggggggtcagccccccgcccggccagccgcccgtccgggagggaggtgggggggtcagccccccgcccggccagccgccccgtccgggaggtgaggggcgcctctacccggccgcccctactgggaagtgaggagcccctctgcccggccagccgccccgtcccggaaggaggtgggggggtcagccccccgccctgccagccgccccgtccgggaggtgaggggcgcctctgcccggccgcctctactgggaagagaggagcccctctgcccggccagccgccccgtccgggagggaggttggggggtcagccccccgcccggccagctgccccatctgggagggaggtgggggggtcagccccccgcccggccagctgccccgtccgggagggaggtgggggggtcagccccccacccgccagccgccccgtccgggagggaagtgggggggggtcagccccccgcccggccagctgccccatccgggaggtgaggggtgcctctgcccggccacccctactgggaagtgaggagcccctctgcccggccagccgccccgtctgggagggaggtgggggggtcagccccccgcccagccagccaccccatccgggaggtgaggggcgcctctgcccggccgcccctactgggaagtgaggagcctctctgcccggccaccaccccgtctgggaggtgtactcaacagctcattgagaacaggccatgatgacaatggcggttttgtggaatagaaaggggggaaaagtggggaaaagattgagaaatcggatggttgccgtgtctgtgtagaaagaggtagacatgggagacttttcattttgttctgtactaagaaaaattcttctgccttgggatcctgttaatctgtgaccttacccccaaccctgtgctctctgaaacatgtgctgtgtccactcagggttgaatggattaagggtggtgcaagatgtgctttgttaaacagatgcttgaaggcagcatgctggttaagagtcatcgccactccctaatctcaagtacccagggacacaaacactgcggaaggctgcagggtcctctgcctaggaaaaccagagacctttgttcacttgtttatctgctgaccttccctccactattgtcctgtgaccctgctaaatctccctctgcgagaaacacccaagaatgatcaataaaaaaaagaaaaaaaaaagtgttggaggttaggacttcaacacaggaatttaggagagaacaaaattcagcccataacaccaggtaaatagccaaatgaatgggtgctggtgagaagcaccaagacctaaattcttattcagactcagtcactgctcagcctcctgatcacactccaactcaagttgtcacccataaaatcagaataatgtcaccctgtgcacttacctccctggattattttgaatatcaaatgtccgatgaaagtaagaactgctacatggcagcaaggctttgcttttagataatccatcagtgataagagatggcaaactttttgtatgtttctcataaccttttctctctttataggagtaatatacacccattgtccatccttttcataccatataattgagattatcctgtaaagagctatataagctgcttctacatatcatagtatattgtatattggtttcctcaggctgcataaattactacagatttggtggcttaaaaaaacagacagttattctcgtacagttcagaagagaagtccaaatcaaggcatcagcagggtttgttccttctgcggaccctgagggaaaattcactgcatacctttctcctaggttctggcagcttccagcaatccttggcatttcttggcttgtagacgcatccctgcaatctctgcttccgtcttcacctggcattctccccggagtcccaagatttcttgtctctgtgtcccaaatttccctctactttattttattttattttattttattgattgattgagatggaatcttgctttgtcacccaggctggagtacagtggcgtggttttggctcactgcaacctccgcctcccagcttcaagtgattctctctcctcagcctcctgaatagctgagactacagatgcatactgccacatgcagctaatttttgtatttttagtagagacagggtttcaccgtgttagtcaggctggtctccaactcctaacctcgagtgacccacccaccttggcccccaaagtgctggattacaggcgttagccaccatgactggcccccatatttactttttttttttttttttttttttttttttttttttttgagacggagtcttgctctgtcatccaggctggagtgcagtggcatgatctcggctcactgcaagctccgcctccctggttcatgccattctcctgcctcagcctcccgagtagctaggactacaggcacccaccaccacacccagctaatttttttgtatttttagtagagacagggtttcaccatgttagccaggatggtctcaatctcctgactttgtgatccacccgcctcggcctcccaaagtgctgggattacaggcatgagccaccacacccggcccctctatttacttttaaaaggacaccagtcatttgacttagggtcaagtctaaatgcaagatgatctcatctaaagttccttaactcaattacatctgcagagaccccgttttccaaataaagtcatattcacaggcaccaggggttagaacatggacataacttttgagggacacagttcaaccccctacacatagtatcatgtacacattctcaagttattaacaattcctaaaacaatcagtgtttcagaatatctcctcatggggctgtggtatgatgtatctgacactgcagttgccagactcctgtgattctgacctcttacatcactgcaaagcaatacctgactttgcatatgccctgtggtattacaagggtgagccaccagcttgagtctttattgcctgggcctttatttcttttccttttttccattagttgttttttatttttatttttatttcttttgagacagagtttcactgtgttgcccaggctggagtgcagtggtgcaatcctggctcactgcaacctccacctcccaggtttaagcgattctcctgcctcagccttgcgagtagctgagattataggcacccaccaccagcctcggctaatggttgtattgttagtagagacggggtttcaccatgttggccaggctggtcttgaactcctgacctcagtgatctgcccacctcggcctcccaaaatgctgggattacaggcgtgagccaccacacctggccagattgttttcattgtttctgtttttcttattaaataaatgttatatatctagcatagggattttagaaaaggagcccagtgatggtcctctccttggttctcaaccctgtgatctttgtgttttaacccctgccctgtcactttagggatctggaagcgggaaggagacatctgcgagtgctcagatgactatctcgatacactcagggtgtattttctggggtgactgtaggggcatctcggttcatttggtggcaaatccaacttttctattccctaacgaggactttgctgcctttatgatttttctctcactgcctgcttttggaaaaatcttctgacagttatatttaccagtagaactagaagggaatgcttcagtctatcctgtgtttagagtcatggagttggaggaggtttgggtgggaatctgagtgacagccaaggagaaggagatagggccgtcttggggttttctgcagtctcagactctgggtctttgtatgacccttgggaacatgaagcagccagggaatggagccaggaccactttaccccagcaagactcccaagctatatcttcaaaggtctgagggacatggtgcattcacttgtcttctgctacccacagatgaccagctctgtgaaggaggcatcccctggcttgggtaggcagaaagtgttggaaaggaattgaagtaacatttcagtttgaaggttttgtaacagatggtggtggcagctgctctaggagagacaaatgaagttagtgaaatggtccttcattcagtctaccttgtgcatccatccatttagccaactgtgttgatacgtatgatgaaccaggccccatgtcgcacactgggatgataaagagagaacacctggccacagcgtctggaaactccttatctaagaagagggacagactcatgcccacatgatgagttctgttgagtaccaaggtagcagaaaaggggagctttgaactccatttgggagtagccagggaagatggcctttctgcaagattcttgagggaatgatcaggcactcaggcctgggaggggagaagacatcagacgtcaggggatggtcagatgcctgtgcagaaggtaaaatgaaatctgtcagataaaatctacaaaagaatagcggttggagagttgtgggcacaacaaatgcaaagaccatcctggataaagttaagttggcaggaagcaagagaaaaaggggaaagaaagtatcagtatgcagtcgctagaaaggataggacaaaataacccaacttggaaggccccagaaagacaaatgattcaagaagcaccgtctgtgtctgagacgctgtccctgcacagcagtgttgtccagctggtgagagatgaggatgagagggagtttgaatctgttcgctgctcctatctacctgttgaaaatgtcagagctgtgagtctgcttctgggctggtggccagggtctgtggctcccagcgctgtagtgtcctgccacgtttgtctcagttggtaattgggtagaaaaccatctcctggggcttggtgaccagggtatgagggcactgaacacagtgccagagcttccagaagtgctggggcaggtgcatcccttgctgacttggggccccattgaggctctgcgtctgttcctcatgactcatgaatgtgttcctcatgactgttcctcatgactcatgttcctcatgactcatgactcatgaatgtggctgaattgagggctaaagccctgggtctctcttacagcattgctttggcattcaccaggccagggcaggcgtgaacggtggaatagggagtgtggtaggatgaggtggaaggtggggtgtcctttttcattccccaaaacagctttcttgaactatccaccaggctgcagggggtatcgtttacctggggactgtgtggtgtcccatctctagggaagaacaatgttgcctcctagtggctgtgtctgtcttggacaccggtatctgagaactgagaacaatatttgttccataaatgaggcatgaatattactctttaaagattccctgttgaaggcaggcacagtggctcacacgtgtaatctcaacactttgggaggctgaggcagcaggatcacttggggccaggagtttgagaacagccagggcaacaaagtgagacctcatctctacaaaaaaattaaaaattagccaggcgtggtaccacacgcctgtagtcccagctacccaggaggctgaggtgggaggatcacttgcacccaggagtcccaggctgccgtgtgttataattgtaccagtgcactccagcgtgggtggtagagcgagaccttgtctctttaaaaaaaaataaaaaaggcaagaccatcctggctaacacagtgaaaccccatctctactaaaaatacaaaaaaaattagccgggcgtggtggcgggcgcctgtagtcccagctacttgggaggctgaggcaggagaatggtgtgaacccaggaggcagaggttgccgtgagccaagattgagccactgcactccagcctgggcaacagagcaagactctgtttcaaaaaaataaataaataaaaaattaaaaaggaaagaaagaaagaaagatcccttgttgaagctgaatgcccatgcccaaattctggccttctctctacctcctgcttttgcagtagctttctaatgagccttcctgacctccagtccttgtcactgaaagcccagtcctgcttgtcttgctgtctgtgttcaaacacacaatagcccctcattgccagtagcataaagctgaatctcttactggacatggaaagttctccgaggtctgatctgttcaccacatgcacccataggcacctctgaacaatccttggtttcccacctttcaggcacacttttctgtctgtctagaacgccctcaccagtctagccaggccagaggtttccagttgttcaaattgtaattcacatggtgctgtttcagtgaatcatgctcatatctgggaatgacctgaattctatcccagctctgatgtacccacatggtaacattagagacagtcataatagcagctactgtgtattgagcacttactacacaatacacagtattgtgtagtaagatgggccaggggtgcacatcgcaaaacttcagggggtgccatttacatcgaatacagaagagaggcactgctggccactgtgccaagaccttcatatagataatctcagccctaacagttggactctgttaccgccattttacgaagaaggaaactaaggctacaaatgttaagtttcttgcccagggccacatagctagtaaacaattgggctgggctgtagtcaactcaggtctctttccaaagcccatggtctttccatggcactccgctccctccttaatagatgctaagttccgtgagggcgggatcccactttgaattgtttttagtcttccacctcctccattgagcttgataaatgtatattggtcaaaatccccagtcctgtctagtgccagttacacatcagtgtctgtagtagagaccctggcgctagcatgaattctaccaagcaggctagactttacaatcaatcaatagaataaaaggaaggaaaataaacagttcctcccagcccactgagtactattgtcttgtctcttagtaccactacaaggaaatgctagatcatgagctggggctaccagagagcttcatagacttgaccccaacactttagctggatgacttggagaaaattaccccaaagtgtctgcagtgacttctgtgaccaccaccagcttcccaaaccagcccatccaactcccttttcctgagtgaggtaaaaactggtagaaccaaggaatgctgaatttccaaacgcctcctaagggaactgaaaccgcaaattggccacttggctgagaaatgctctctttccctccaacacacactttccttttcctttagctaaagaatccatagatgagtctcactttgtgatacacgtgctcctgaaagctgtgtggaattgagtcattttctaaattcaccagggaatctttccattttaaagaaaatctctagtcagttataaaaccagatgctatcagagacagaaagaccattagaggtttatctaattcagctttcgtctcattttacagatgagaaaaccagagaggttaagtgacttggccacagtcacacagctcgttagcgataggaattgaccttaagtcaaacagagccttaggtcctctgatgctggtgccagtgctttcccctttccaaacctctttcataatgaaatcacccagcccctacccgtgtccctattcactcccaccaaaaaaatcctccatatagtctgttttacaaattcatccattcttctttcagggagggtttcatctatacttctggctttgtctgcttccaactccctttggccatttgcacagatcagcttttctaacagaaaggtgtgcagaaaaaagttgaaatagcaggtctgttttaggataaatagttgggacgcttgacagcttgcacctggtttcccccagactttactccatgcacctttttccatgctatttttgctctgtaaccttttgctctaatacattgtgcctgtgagtacaagtatatgctgagtcctgtgagtcctcttagcaaatcttcacaattggggtgctcttggggacctccaacaaagagggagaggaagctttcagtcaagggtacaatcaagcagtctcctttcttaattgaggcagggatgattaaggtttgtggatgaatactctgaggtcctgctcacctgggttccactcctgaatctgccatttaccatggatttgtggcaagttattttctcactctgagcctcaggatctccaacaaaggggttagtaacacttaatggcttcgggttcttggaggacgccgagagatgcccagcatagtcggggtgcttgaccaggatgtgctccatgggcataggaactctgagttgtagatgtggtatccccacttctcagaacaggtcctcctgcagcaaatatttgttgaatgtatacttcaggagtgaataaatgccacctaacattgctgcagaaagcacttgagcccaggagggaccggagattattgtcaagcaagatgagtaaattccatataagtttctgtctgagcactggctggctctggttgctgtgggagagaacttttaattgaacacagttgggggtatctctgctttcccagaccttttgctgggtcagttggcacccctccctctcttaggacattgaggcttgtctctggattaccttggttgatctatttctggatctgtctgtaaatttgtcataaaggtagaccctgttaccaagtacatgttcttaattagcaagacacattttgaatggctaagtggaacatccctttttgcaatcccagtgacccatttcccaagtgctctcttttggccttatttttttctgcttcttgaacaaaggagaagggaggaatgcagctatgtgcatatttatttgctctagtggtgggcaaatgtttaaattcctgccattagggggtttctctagcttgctttgcttgttaatgtttttttttaacaggataaatcatgtgcaagtgtcatcgatagactaacaagaggtaggcgggccatgggaaagtagaatttaccacctctccaacagttcaaggatactgttcttctaagtttttaaacattggttggaattgtgccttcagtggggtgtgggggagttggagaggcaccttcatcccagactgaaggccagaagcctcgggttccagttgtgtctcaaccactgagttgtcccagagactttggcataaactgcttgacttcctcggcctctgttcttctttttgtaaagagatgagttcatccagaatgttctctcgcattctggcattcttaaagagtcccaattttgagctcagagaatgccacaccgactgaaagtaagtcacacctttaaacatctgggggacttaaatttgaagaatgtgcccatgatactaccaccactgatgtacccagcctgcgggtgagccaggacaggtaaatggtgacccactgttagtgtccaagagatgactagaccccaggtggcacagcctaggggctcttggaccccacttattccctttgtacccaagtagctttcctaaagcatgttccttagaaccctaaatccacaagcagctccgcctgtggtcacatgaatttgggaggcactttcccaatcttagaaatcacaacagaggtttagagaagtcgtagggaaaagaaattgtttgttgttgtctaacctgtgtttcctgaacttaattgaccaaaaaccccgttattttcccccattccatactgcctgtagcctcccatgcaaacccatttcagaacctgcagctgcagtcagtctggagtcaggtaacttaattaggaatctgtttcatgtcttatcattcagttcctattggttaattttcttggaacttatgtcagagggacatccatgtgcatcctaatgacagcctcatttgagacaaaattttccatcatggacaaaccaaccaccaggtgaccccaggcagtctcccctggcctctaccacaagtccctctcccaggagctcatgctgtctttaggcccagtccatctgtctgtctgcttctctctctcccttcctgtcctctttccttgggcagctcctcctcttccccatttccctgttttccaccctctcacccttgcccttactttgaattctgctgggaagaggatggccttttaccccagacccacaatctttccagttcaggctggttcatttgccatcatttgctttctcattgattaggaattaatcaatggctgacagtctccccagagtggatcacagctgtctaggaaatctgctgacctagaaagattttcagatgctgttaacaacccacagatcacgctgtcaagtattttctttcttcagcagctcttggcatggcgagcatgtgattctgcccctctgctctgtggcctttcagtgacattcattatttatccgggtcctttgaagctctgcctcaaaatgttgccagaaattccaaattattttcttccttcttgtttaaagaatttcatctaaaactttgtttggagagagcccgctgaagtcatagttatattgacttccgcgtctgttccccagctcatctttgctccctgttttctccccacgctggcctccgtgcctggaacaagtcagacttgtgttatttcccagctgtgtgaccttgagcaagtggcttaatgtttctgagccttagtttcttcctctgtaaaataaggataataatacgtacttcacagactagtggtaaggattaaatgagacaatgagagaatgcaaagcacttagcctagttcaagaacatagttatccatcactttaggatacagcaggggcctcttgttcacccctgttattcccaggggtacccgcctggctcatagtaggtgcgtagcaagatttttttcaatggaaactagagtgggatgcgcctatctagaaaatcctctgttggagcctagtcttggtccttaaaagtcctgggcctgccttccccctgcctttaagaagctgagccagcaatagtagcatgtggccacctgcagggctctgtggaggaaagagctttgagctgggaaattatgttcttagatgagtcatgttctgcctcaccatttctttagtggttctcaatcctagttgcacattagaatcacccagggagcagtttttagagactccatacaagagattgactctgctgattcgaggtagagccttgcgatgtgtcagaagtcctttgctttcgttgagaagaacgtactgagtggaaattgtataacctcatcaacagctaagcacctgaagggataaaaaagaccgccagtagttggcagtcttggttgaggcttcaagattgaatccaaagcagcttgtgattcctttggagtggcacgatccccaactgaagagctgtttgcacatacacattgtcactgcaaactcaaagcccaagtttgttcgtatagccagctctgcccagcaggaccctgggtagggccaggtgccttggcagaacatggatggggcagtacagggccacttggatcaggtccacccatttgccattgttagcatgagctgaaagaagttgggtctcccaaggcagtgctgtctcactgcagtaaacagcagttttcagaagatctacgtccttgaaatatacacagattgggttttgtttgtttacccacacacagccttctcttagaggggagttaaggtaaggaaatgactgtctcaacactcacaccctgatgtggcattatttggcaacaataacttcttcatcatcccctcccctcctcatggcacccacccagctggcagaaaatgacaaagaaggaagatcagcattcatcatcttcagcatgatatggtttcagagatttttagcatttgatttgtaacatttcagaaggcaacataaatcaagctggtaatttgttttgtcatgccaaaaaaaaaggaaaatctgaattcatttgggagaacgtgtgtatgtcagtcactgccttttcggatctggttgaaaagctgcaaatatttttctccacacaaagtacattcaggttttgttgatgatgttgttagtacagatctcctctggggcactgagtaaccctggggagaggatgggaaacagcgtaagggctgtaattttcagcctggaatagaagcagcaattttaggcaatttaaacaattctattaagggcaatcttttggtctcctgctggaaagagaggaccccattcagaatgctcccagtaatgctgtaaggggctgatggggtctccagattgtatacagtttcctgcacccccgaaaccatcatagaggatctctgccccctcatgcctttaaacgggaacattaataatttcctgcttagtgcaggatgtagtccaaaaactcaaaatgagttgtccagataaagggagacctctgggggatgccagacaaacttggtcttgtcagaagagaaaaacttgagagggagttaattgaagagtttcccacattgcagcttgtgagtggttctgttgcacttttgttgatttttaaaatttctttttatttagtcagtttttaaagtcccaaatgaaccatggggttcttggcccagagaacagatgaacattggttaggccagggagttattttccagcaaactgcccatgagttaaactccactctgtggattgggggtcatgataagggaagggagcccctactattttgcgggtctctgttttgagtgtcttaaaattctagtggagtaggagccattgggaccatcacaggaagatatagcccctgggtgggaagcagggtgtctgtcttttggagggagcggagtgtctccatttcagttgttgctgagacaggcaaggtctggtggttgaggaaacatctttttctctctgagcctctttttgagcttagattataaggaatctagatctgtcacgggtagatgcttccaggttctgggagcagaaggcactgctacaaggaggcaagttggggactcagtagaaggtaacctgttggttagtagctgttaagcaatttggaccccaacctacaataagaactacttttatatcacaaatatacagataggaagtcattctacattcagcacactgacgcaggtattttttaatacattctattcccttcttttcgttttatgctggccctgacccactatgttagtttctgtacttattatactatttggttgagacctgatgttgaaaaaacattccagtgggatagtctatgaagatagcctcagcacatgagttatgagagctgcctcagctgtgagagttccaggcacgtcactgtccgggggtaattccctttgagtttcattgaattttaaggaaaaagcccccttgctcttcctcaaatgcaccaaagactctctcaccccaggatctttgcacttgctgttctgttcacttagaacacctgtcttccatatacccaagggtccaccttcagctctttatcaggtgccaccctctcaaggagaaccccatccccatccccaccccctgtttaaaattgcaacccatcaccaaccccgctccctcttcgttccacttaccatgttctgggcttttttttttttttttttgccacagcatttattatcttctcccaaacaatataccctataactttttattatatctactctctgtctctgcccactaccatgtaaattctgtgagggcaggaatttctgttctgtatatcatcatatcccatcagctggagcagtgcctgtggtgtgacagatgctcactgaagactttgtggaatgaataaatgaatgaattaatgctgttaaaatgatagcctcttcttactacaactgtcttttattttttttaattgatacgtaataattgtacatatttacagggtacaatgtgttgtaatccatgtatacgttgtgtaatgatcaaatcagggtaattggcacatccatcaccttatatgtgtgtcatttcttttggtgactacattcagaaaggtctagctattttgaaatatacaatacattattattaactatagctgccctactgtgcaagagaacaccagtttttctaattgtaattttgtacgtgttggctgctttcttaaattgtggaaattaaaggaagggctgaactgttactcagatttgaatagaaatgaggaagaagaagaacagtgagataaggagatagtgacagtgatacatgttgacaattccattgaaaaagaacttggccgggtgtggtcgttcatggctgtaatcccagcacttaggacacgaaggccgaagcatcgcttgagcccaggaatttgagaccagcctgggcaacatagtgagacccccatctatataaaaattttaaaaaacttgctgggtatggtggtgtttgcctgtagtcccagctactggagaagccgaggtgggaggatcacctgagctcgggaggttgattctgcggtgagccgtgagcacgccactggactccagcctgagcaacagagtcagaccctgtctctaaaaagaaaaaggagccagatgcggtggctcactgctgtaatcccaggggaagccaaggcagaaggatcacttgaggccaggagttcaagaccagcctggtcaacatagtaaaacaccgtctttacagaaactaaaaaaaaaaaaaaaaaaaaaaaagccagatgtggtgacatgctcctgtagtcccagctacatgggaagctgaggtgggaggattgcttgagcttgggaggttgaggctgcagtaagcccagatcatgccactgcactccagcctggcaacagagcgaggccctcaaaaaaaaaggagaactcaggggacaagaatcaaggtggcaaaggcctatgacctttgcccacagaataaccacccctaccctggagggccaggacggttccttcctctccttccatcccaagcctgagtcttatgttccctgcccagtagtgagtcctccggcaactcatcagcaacacagagccgcagggcttttgttgggacccccttgaaaacactcagtcccacgttgctgcacattgctagtggttgataagaccgttgcaggaaaatttataaatccgtggccttactggctgtgagcgaggcagataagccacagtctgacagaaagaaaagcatctcccttccctgttcttgcctgagatgcaaagaataaacctgaatctgtgtggtgaatgaacgtcctggtgaagtgaacgtgataaaattccagcttgctgttttgtgggacgtattgcaggcaccgcatctttgttctcagtcccctctgccctttgtgtgggccagcctcgagggacgtggcccagtgaatcctgggggaaaatcacgctcacagaaagccagcgtgatttcccagccagaggagataaggcccgtgggagtgaatggcagcttagcgacccctgttgcaccaaatcctccttgaaatatttaattataagatacatgaatgcttatcccagcagttattttttcctcttaacccatatttagccttgcagcaaaaaataaaatatggttcctgggagtttatctttcttttaatgaggctctcaggggtcagttttttcccttaaaaaatttttggcccatcgttcaacccaggaactctgcttgtcagagaggatctttgaataaaataatgctgtctggttcttttcataggtatcgtttaccctttcatattggttttcagttttaaaaagtattttcacatagaagaaatcgggactgaaaatgcgttagtgaccagctcaaagtcacacaatgacttagtgagaactcgaaatggaaacaggatcttttttttggcgtggggagggacagagtttcgctcttgttgcccaggctggagtgcaatggcgcaatctgggctcactgcaacctccgcctcccaggttcaagtgattctcctgcctcaccctcccgagtagttgggattacaggcacctgcaaccacacccagctaatttctgtattttcagtagaaatagggtttcaccatgttggccaggctggtcttgaacgcctgacctcaggtgatctgcccacctcagcctcccaaagtgctgggattacaggcgtgagccaccgcgcctggccagaagcaggatcttgaagctctcagaatgcccgtctctccttctgtgcacagtgagggcttcccattctttctgatttccctttcctgtagcagagaggggaagatactccacattagtcaagagctttagggtaccaggcactgtgtgtaaagtacatttcttatattacccctttgattcctcccaggaatcctatggcatctataatactatccccattttctaaatgaggaaatggaacttcagagtgattttgttccaagtagaaatcaggctctggcaactgcttcctgctagcagggtgagatacaaacttttacaaatagcagacaggccatcatataaatatatgatgtatttataaatacatacctgtagatatatttctaaatacatatctgtagatgtgtttataaatgtgggggaaacagataaaaatccctacccttgtggagtctacattctgttgattcattttgggatggatggatggatggatggatggatggagtacaacaatcttcagaggccaactccacttcagtcccggcaaattcctcttacagaagagcggtaagatacattggtagacatatacaacctgggcttcagaccagggaagttttattttgccactaaatttagccactgtatcaacacatctcccagcttacaagatgactgagaacaagtgtaagttcttgaggacacaagcccttgccttagtcagctttgtgtgccctgctgtacttaatgcttcatgggtgttcattaaatgtttaaatgaatgagatgcataattcagttacgatgaggctctctgagaatgagttaacatctatcgagagttgtgcagtccgcagacttagaaatatccaaaaataatcacccctagagagatctctgcaaatcagtaatgaaagaactgaagtaaaactataaatcattccgttaacggttttatacatttacaagtaagtaattttggaagcaaaattggtgtataagctgtatttagcctcgatgtgctaagcaactttgaaccaaatataaattcctggcgtggtatttttaagccacggtgggggcagggtgctggggaaaaagttgagttggaggagcatcaaagctatttttgtaagtttcatctacatttttagaaagatgcatttttgaagaattgggatatcagtcacttctccctggcaggattcctcatcaagggagaaatgacagcatgtccgatcttccttgagtctctaaagatcgcattattaagatggtttctgtcactgtgcaccatgtctgagaacatgtcttggcacaccaccctgtccttcgtctcctgatttatagcttgcaatagacttgttgagtgtgaagctagaacccagacagaatgttaatgcagggaaatgacatgtgaatcagtggtgccctgggctttgagtgcacatgactgaggggaggcccagtcagctgtggctgtgctcctcacattagctttgatttgctagacattgcatgaagaatgaagcagagccttagccgtgagcttctcagactggagctaagccgtggtccctaagtctatagcttcccactggagactgacttaattagccaggatcctgagcttggctaatggtgggcccagtgaatgcttgatttgcaatggaaatgcccaatttggtatggagtctccatttttaaaatgcattggctaactttgcagcttcccccatccccttctcatgacagtctccctttctggaatatttcaaatgcaaagggggaaacagggttgtcgttatatctggatcctatccacaagggctcagcagctgtgatgttcagcaggccaaatacagacccaagagaccaaacagcttcttccttccccaagcagttaaaacaaagatctgctcactgccttgcctgtgtgtcttcatgggtgtttgatatcagggtaaactctaggggctaaaagtgggagcagaaaaagcaatgcaaacgcattaggcgagaagccagggcggatcagcaaaaggtctggaattatggaaggctgaagataagcagttttggttgatttccaacacaggcagttgcctgctttaatgtctggataagaacttgcctgtaattggtagatggattgcttggctataaatggagcctgaaaagagtctattcccttccagcaattaaacatccccctgactgctgccactttctccactctgattattcagcagacccattcttcttaatacacagcaccgaggtgtggcttagcccagcctggtttgaattagcttatgggatccacattaatgaagcctagccttacttccctgcatatgatgtgtgactgggtatagtcaagtgcccagtgtaggtaaatagatttcggagaatggtgatgtaagatacctaccaaccatatgtggaaatccttttcaggatggtttccctctgcaagactgtaaaggtaggaaatgcactgcctttcccaccccttcactcctgcacccatttgataacccacttgagtgtttagaacagtcttccaaagagggatgtgtgcaaggtgattgtttagggaaggaagggagggagggagggagggaaaagggagagagaaagggaaaaggggaggggaagaagggcaggaagaaagaaaagctttagatttgatatatagattgacgggatcatgtatataatggaaatatacatatattgggggaatagtgtctcaaatggtggaagttcactggtttagagcactgaatgagccacctcaattttgctcccgttttcatctttgtccctagtgctgagtggcttcagttttcactgctttgatctatgtcctgcctgactggattaagaaaatagagacctagagcttccagtgggaagagaggaaatcggtgacagaactgaattaagacatctttctagaaggagccattttccagcctcttaccactgccctgggtgatcctctaggtcacacaggagctgatatcatggttgagccctgggaatctcagccacgctctgtccctgtgcatctcatacaagcttccatggtgatgaaaattgttaagatgtcttatgtgaagcacatgggcgttgggtttgctcatcacaagctgcctgctgctgatgctgtttcacctatttaaaatacccaagtgttgctttatttaaaattgaacaagagtcagccacttagaacatttatcaataaactcatcactcaaatggaattgtgcccctgcccctgcacttgcatatggtcttagattgctgctcatttccaggcacagatggcttgcttcaaaattttttgcttgaacagggtaaaaaagcgagagttggtagcttttaagtgtacaaacttgccaagaaaggaaaatgctgtgagtggggatgattgctggcaagcagcagggtccgatataatccatgtctgtccatccgtgtgtctgttcttcagccctgtgtggcagatccccttccagtgagtgagctttagcaaatggagtgtctatgacagctatttgaatcatcctagaatctactggcttaaagctgacagctctgactcttcctttaacttcttaagtgcagtgttttggacagagatagaagctttgcgagcaggcagcccgccagattcttctatgtcccagatctggatgttagattagaaaatttgatatttacaaatgtgcttcaccttgaattagccatgacccagttgctattgtttgttgaaagagatatcttttagaattttacttatacaactgacttgcttttcaaaagcacaataaaatcttatgttcccattataaaagtacatatactcattacaggatgtttggaaaatatagaacagggaaaattttacccacatttcctgcttccataaataatcactattagcagttggcgtatttcctcccatatccttttccatgcctaggcaatggaggctttttgttcttgcaaccgtgatactttttattcagttttacatcctactttttttcccacttatattaataaatattttcccatgttgttataaactcttagtaagcattcttaatggttgtatgatattctattaaatgggtgcatcttattttacttagccacacatctattgatgaacatttagattttgtcaatacattgttgtagacgaagttgtgatggctttaaacctttttttttttgctttcgtcttttgaattacttccttaggatagattaccgtaagatttatatgaggtatgaacacctttagggcccattacacttatattactaacttgttatccaaatggatatctgtttacacccccacaagcaatttgatagaacctttttttcatcacgtaattgccaacataggatattatcattttaaaaaatcattcttgcactgctaggcaagaaatggtatctaattgcagctcccttctaagtgttgattgagcctttatttaggaaggtcctgctgtgttttgcatagttcattggaaattctaggaaagtgctcttgaaaaaggaaattatttattttcattctactttttcaaacttctcacctccccctcccaccccccagttttaagtcatcttacatgaagaaatataagaccaaattacagaagcagggaattaatgatccaaagattctagttaacaagatgatcacccaggtttcaaaaaataagtgatctcatttttatggcttaaatattttagtaaccgttgagtgcctactgtttatatttcttttctaggctgactggcttgcttcctccctccctccctccctccctccctccctcccttccttccttccttccttccttcctctattccatcctctcctctcctccctcctctcccatcctagacagcttaggtgaagggctgacagagggaaattgactggctaatctatgtgcagtagcccctggttcctgctctttccgctgaacatgatttatagttgtttggcagaaggtcaaaatctgattccatagagtgggaatgcagggggaaatatttgatttctttgacacagttcattaaaaattcatacatatggatctggaaatgaaacattgctccatgtcaacatgagttacagtgggagcctagagcaagacatgagtattcaagtgagacactgtcaccaggtaatcacatcggcatggcagtgcctctcagtgagacatggaagggggaaaggtgacctggactctggagggtggaaatgaaatttttctcttttgcctaaaggctttccttgtaaatagaagccagtttgttagaaaacctctgttacaaagagcccatttcattcatgtattcttttgtccatttgtttgacaaatatttatttattttccactattggtaaggtgtatattgattaataagagagatgacttatttcaaatttccctgttatttctactttgtttcttaattcttcctctttgaccctttactttagagctatctgacttttacaatgtctagacttcaagccttttattataaatactgtaaatggttggaaacatgatcttctagcccagtacttctcaaattgtaatgtacacacaaatcatctggggatctgttaaaatgaagattctgattcagtaggtccaggatggggccagagagaatgcatgtctgtcaaattcccaggagatgccgctgctgctgatccaagcaccatttgaatagcgaggctctagtctaccatatctgtactgggttgaataatgttctccataaattcataaccacccagcacctgtgtatgtgaccttatttggatatagtttttgcagatgtaatcaagttaagatggttttatggtcaacattcttcaggaaaatggaattaatagaataggatgtagatagaatgatattaatttattttaaggaattggttcatgcagttgttcggggctagctagtccaaaatctgcagggcaggtcagcaagctggagaccaagagaagagtagatgttgcagtcttgagtcagaagggagtctggaagcagaattccttcttttcccgggaacctcagtcttttctctgaaagccttcaactgattggatgaggcccgcccacactatttgcttgaactcagagatgttaatctcatctgaagaaatatcttcacagctgcatctggactggtggtggactaaaagctgattaccatagcctagctaagttgacacataaaattaaccatcacgatgaggtcatactggattagggtgggccctaaatccaatatgtctcatgtccctgtaagaagaaggaattttggacacagagacacagactcacaggaccacgtgaagacagaaacagagattgagagctaaacacaattgatccaatggaggtaaagagtagaatcattaccagatgcatctacaagccaaggagcacccaagatagccagaaaccaccagcagcgaggaagagacaaggaaggactctttcctagggccttcagagggagcacgccctgctgacagcttgattgcagactttgggcctccagaatacatttctattgttttcatgccacgcagttcatggcactttgttacagcagccctgggaagctagcacggtatctaagacataggcctacaacagacctaagaacatcatcacaaagccagaatgcttgacttttctggtaatttgccaccttgacacatggatgcagtgtctggaaggtgcaccaactaaaatgctttgtcattctcatagaagagaagttcagagtcactgtgggtgggaatgaattggtcaggaatcccctcctctttcttagactcccgagttggtctgaaaacgctcatcgatattctcctctactttctcttctggccctgccttcaggttgcagggcagcccggtgacaaatgaggaggagctgaatttgctttttatttgaacaaactatactaattgaaatggaccccactgggattgctgtctgccataagtaatgtatatttcattaacattttctttaaaaaccaacaagatcataaagctaagattgctttagcctaaatgctgtccagatttaatatgcatgatataacctcctggcatagcactaagcttgagcatgcaatttttggtgcctccctgatgcttgtttttaacaggaggagaatcaatacggggtgagggttagaccaacaacgtgaactgtcaagaaccagagaaataattaaagttataatattaacaaaacaacatggttgtagaggggatggataaatgattttattccgtttttttctttcttctttttttttttttttttttttactgcctcaggcatatttgttggcattttcagaaggagatagaatcaggagttatttttctgctaggaaatgtttaagtaaatcccagttgtgatcaatagggtagcctccacaaagcaagcaaagcagtaaatgtcactcatttcactttttagcaacagttgtgtgtgtgttagagccgaagtctgaaaccagtgacttcaacattagccagggagtatcgaccaaaatcggtggtgaggagataaaattgccctggaaaagttgggttccccttaacaatggtagcatggagaaatcagacttccagatgttgtgatttctcagctctctaattcatcaaattaagatgactttcaggactgcctggagatggacttcagacagaacacagcccacatcatgctttgagctgaacacgtttaaaagagtttcacattgaggttgaagcatggctgtgcagaatgacatatgaggaatgactgtattcccattataggagtcaccctgcttttttactctcccagaagagttgtcttatttctgatttgggtgagtgcagactacagttgtggagcattagctggacccctgctcctcctggggcaaaacaaatccttcttattgatctgtgagcttttttattgatacataatgattgtagtgtttatggggtacatgtgatattttgacaaatgcatacaatgcataatgatcaaaccagggtaattgggatatccaccacctcaaacatttatcatttatttctgctgggaacatgccaaatcatctcttctagctgttttgaaatatataattattgttaactgtagtcaccctactgcgctgttgaatactaggacttattccttctgtttaactttacgtttgtacctattaaccaaactgtctttatcccagcctcacccctgccacccttcccagcttctggtaaccatcattctactctttccctctgtgagatcaattttgtttagctcccacatgtaagtgagaacatgtaatatttgtgtttctgtgcctggcttatttcacttaacctaatgtcttccagttctagttcctgtcatttgttactgcaaatgacagaatttcattctttctgtggctaaatagtattccattatgtatacataccacattttctttatctattcatccattgatgggcacttatgttgatttcgtatcttggctaatagagctgcataagcatgggagtgcaggcatcttttcggtatcctgatttcctttcctttgaatatatcctcagcagtgagattgttggatcatgggggtaaatctatttttaggtttttgtattttttaagttttttaattcaataggtttttggggaacaggtgctgtttggttccatggataagttctttagcggtaatttctgaaattctggtacacctatcacccgagcaatgtacactgtacccaatgtgcagtcttttatccctcaccctcctcccacccttccctctctggatccccagagtgcattatatcattctcacgcctttgcctcctcatagcttagctcccacttgtaagtgagaacatatgatgtttggttttccatccctgagttacttcacttaaaataatggtattgaactccatccaggttgttgcatatgccattattttgttcctttttatggctgaacaatattccatggtgtgtatgtgtgtgtatatatatatacacatatatatacacatatatgtacatatatacacacatatatatacatatatacgtatatatgtatatatgtacgtatatacgtatatatacatatatatacacacacacatatatatctgacattttctttatccacttgttgatttatgggcatttgggctggttccatattttttcaattgcaaattgtgctgctataaacatgtatgtgcaagtgtattttttatataatgacttcttttcctctgggtagatacccagtaatgaaattgctggatcaaatgatagatctacttttagttctttaaggaatctccatattgttttccatagtggttgtactagtttacattcctaccagcgatataaaagtgttccctgttcaccacattcatgccaacatttattatcttttgatgttttaatgatggccattcttgcaagagtaaggtggaatcacattgtggttttgatctgcagctccctgatcattagtgatgttgagcaatttgtcatacgtttgttggccatttgtatatcttcttttttttttttttttgagacggagtctccctctgttgccaggttggagtgcaggggcgcgatcttggctcactgaaacctccgcctcctgagttgaagcgattctcctgcgtcagcctcccgagtaggtgggacaacaggcacatgccaccatgcccagctaatttttgtatttttagtagagacagggtttcaccatgttggccaggatggtatcgatctcttgacttcgtgatccacctgtcttggcctcccaaagtgctgggattataggcgtgacgtttatcttcttttgggaattgtctatttgtgtccttagcccactatttgatgagattatttgtttttttcttgctgaattgtttgagtcccttgtagattctcgatattagtcctttgttgaatgcatagtttgcaaagattttctcccattctgttgggttgtgtgtttactctgctgattgtttcttttgctatgcagaagctttttcatttaattaagtcccactgtttatctgtttttgttgcatttgcttttgggttcttggtcatgaagtctttgcctaagcccatgtctggaagggtttttctgatgttatcttctagactttttatggtttcaggtcttagatttaagtctttgatccatcttgagtttatttttgtataaggtgagagatgaggatccagtttcattcttttacatgaggcttgtccatttatcccaacaccatttgttgaatagaatgtgctttccccactttatgttgttgtttgctttccccactttatgttgttgtttgctttgtcaaaggtcagttgactgcaagtatttggcttcatttctgggttccctattctgttccattggtctatgtgcctgtttttctaccagtaccatgctgttttggtgactatagccttatagtataatttgaagttggataatgtgatgcctccaggtttgttctttttgcttggtctttctttggctatgagagctcttttttggttcctcatgaaatttaggattgttttttctagttctttgaagaattatgataatatattgatgggaattagattgaatttggagattgcttttgcaatatagtcattttcacaatattctacccatccacaagcatagggtgtgtttccatttgtttgtgtaatctgtgatttctttcagcagtgttttgtagttttccttgtagaggtctttcatgttcttggttaggtatattcctaaggtgtttttttgtttgtttgttttgcagctattgcaaaaggagttgagttctttatttgattctcagcttggtcgctgttggtgtatagcagtacttctgatttgtgcacattgattttgtatcctgaaactttactgaatttatttgtcagatctaggagactctagaagatccagagtctttagggttttttaggtatatgatcatatcataagtgaagagcaacagtttgacctcctctttgacaatttggatgccctttatttcgttctcttgtttgattgctctggctaggacttccagaactatgttgaatagaagtggcgggcatccttgtcttgttccagttctcggggggactgctttcaactattccccatttagtataatgttggctgtgggtttgtcataaatggcttttattacattaaggtatgtcccttctatgccgattttgctgagggttttaataaaaaagggatactggatttttgtcaaatgctttttctgcatctattgagatgatcatatgatttttgtttttgattttgtttatgtgatgtatcacatttcttgacttgcgtatattaaaccagccctgcatccctggtatgaaactcacttgatcatggttggattatctttttgatatgctgttggattcagttagctatcattttgttgaggatttttgcatctatgttcatcagggatattggtctgtaattttattttttggttatgtcctttcctggttttggtgttagggtgatactggcttcatagaaagatttagggagaattctctatttctctatcatttgtaatagtttcagtgggattggtactaattcttccttgaatgtctgatagaattcaactgtgaatctgtccgtgcctggacttttttggttggcaattttttaattatcatttcaattgggctgcttgttattagtctgtttagagttcctttttcttcctggtttaatctaggagggttgtatatttccaaaaatttatccatctcctctagcttttctactttgtgtgtgtaagggtattcatagtagccttgaatggtcttttgtatttctgtggtatcacctataatatctcccatttcattcttttttattattattatgctttaagttctagggtacatgtgcacaatgtgcaggtttgttacatatgtatacatgtgccatgttggtgtgctgcacccattaactcgtcatttacattaggtatatctcctaatgctatccctcccccctccccccaccccacaacaggcccaggtgtgtgatattccccttcctgtgtccaagtattatcattgttcaattcccacctatgagtgagaacatgcagtatttggttttttgtccctgcgatagtttgctgagaatgatggtttccagcttcatccatgtccctacaaaggacatgaactcatccttttttatggctgcatagtattccatggtgtatatatgccacattttcttaatccagtctatcattgatggacatttgggttggttccaagtctttgctattgtgaataatgccacaataaacatacatttgcatgtgtctttatagcagcatgatttataatcctttgggtatatacccagtaatgggatggctgggtcaaatggtatttctggttctagatctagatctttgagaatcaatatcgtgaaaatggccatactgcccaaggtaatttatagatttaatgccatccccatcaagctaccaatgactttcttcacagaattggaaaaaaactactttaaagttcatatggaactaaaaaagaacctgcattgccaagacaatcctaagccaaaagagcaaagctggaggcatcatgctgcctgacttcaaactacactacaaggctacagtaaccaaaacagcatgatactggtaccaaaacagagatacagaccaatggaacagaacagagccctcagaaataatactacacatctgcaaccatctgatctttgacaaacctgacaaaaacaagcaatggggaaaggattccctatttaataaatggtgctgggaaaactgggtagccatatggagaaagctgaaactggatcccttccttacaccttacacaaaaattaattcaagatggattaaagacttaaatgttagacctaaaaccataaaaaccccagaagaaaacctagacaatgccattcaggccataggcatgggcaaggactttatgtctaaaacaccaaaagcaatggcaacaaaagccaaaattgacaagtgggatctaattaaactaaagagcttctgcacagcaaaagaaactaccatcagagtgaacaagcaacctacagaatgggagaaaatttttgcaatctactcatctgtcaaagggctaatatccagaagctacaaagaactcagacaaatttacaagaaaaaaacaaacaaccccatcaaaaagtgggcaaagtatataaacagacacttctcaaaagaagacattcatgcagccaacagacacatgaaaaaatgcttgtcatcactggccatcagagaaatgcaaatcaaaaccacaatgagataccatctcacaccagttagaatggcgatcattaggccaggcgcagtggctcacgcctgaaatcccagtactttgggaggctgaggcaggcggatcacgaggtcaggagatcgagaccatcctggctaacatgatgaaaccctgtctctactaaaaatacaaaaaaattagctgggcgtggtggcaggtgcctgtagtcccagctactcaggaggctgagacaggagaatggcatgaacccaggaggcagagcttgcagtgagctgagatcgtgctactccactccagcctggggacagagcgagactccgtctcaaaaaaaaagaaaagaaaagaaaaaaagaatggcgatcattaaaaagtcaggaaacaacaggtgctggagaggatgtggagaaatacgaacatttttacgctgttgatgggactgtaaactggttcaaccattgtggaagacagtgtggcaattcctcaaggatctagaactagaaatatctcccatttcattcttaattgaacctatttggagctctcttcttttttttggttaacctcactaatggtctattgattttgtttatcttttcaaagaaccaccttttgtctcatttatcttctgtaattttttttgtttcaatttcatttagttctgctctgatctttgttctttcatttcttctgctgggcttgggtttgctttgtttttgtttctctagttcctttaggtgtgaccttagattgtctatttgtgctctttcagacttttcaatgtaggtatttaatgctatgaactttcctcttagcactgctttcgttgtatcccagagtttttggtaggttgtatcactattattgttcagttcaaggaattttaatttccatcttgatttcattgttgacccagagatcattcaggagcagattatttaatttctatgtatttgcatggttttaagggttccttttggagtcaatttccaattttattctgctttggtctgagagaatccttgatataatttcagttttcagaaatttgttgagacttgttttgtggcctattatatggtctgtcttagagaatgttccatgcactgatgaatagaatgtatatctgcagttgttgggtagaatgttctgtacatatctgttaagtttagttgctctagggtatagtttaagtccattgttactttgctgactttctgtcttgacttgtctagtgctatcagtggagtattgaagtcccccactattattgtgttgctgtctatctcatttcttaggtctagaggtaattgttttacaaacctaggagctccattgttagtacatatatatttagaattgtgatattttcctgttggactaatccttttaccattatataatgtccctctttgtcttttttaactattgttgctttaaagtctgttttgtctatagctactcctgctcgcttttgttgtccatttgcatagactgtctttttccacccctttaccttaagtttatgtgagtccttatgtgttaggtgagtctcttgaagacagcagatacttgtctgctgttggtgaattcttatccattctgatattctttctcttttaagtggagtacttaggccatttactttcaatgttagtattgagatgtgaggtcctattctgttcctcgtgctagttgttgcctgaataccttgtggggttctttttttcattgtgttactgttttataggccctgtgggatttatgctttttggaagttctattttggtgtatttcaaggtttttttttttcaaaatttagaactccttttagcagttgttgtaagtgctggcttggtagtggtgaattgtctcagcatttctttgtctaaaaaagactatctttccttcatttatggagcttagtttcactgggtacaggattcttggctgataattgttttgtttaatcaggctaaagctaggaccactcccttctagcctgcagggtttctgctgagaaatccgccgttaatctgataggttttcctttataggttacctgatgcttttgcctcacagctgttaagattatttccttcatcttgacttcagataacctgttgactatgtgtctaggtgattatctttttgtgatgaatttcccaggtgttctttgagcttcttctctttcaatgtctaggtctctagcaaggccagggaagttttcctcagttattccctcaaatacgttttccaaaattctggatttctcttcttactcaggaataccaattactcttaggtttggtggtttaacataatcccaaacttcttgggggctttgttcaattttttttttcttttttctttgtctttgtcagattgggttaatttgaaagccttgtcttcgagctctgaagttctttcctctacttgtttgattctattgttgaaaatttccagtttattttgcatttctctgagtgtgtcttttatttccagaagttgtaattgtttttcattgatgatatttacttctaaggagacttttttcattcatatcctatattactttttaaatttctttaaattggttttcacctttctctggtgcctccatgagtagctaaacaattgagcttcttagatctttttctggcagtttagtgatttcttcttgatttggatccattgctggtgagctagtgtgatcttttgtggatgataaagaaccttgctttgtcatattaccagaattgtttttctggttccttctcatttgggtagactctgtcagaggaaggattgggggttcaagggctgctgttcagattcttttgtcccacagggtggtcccttgatgtggtgctctccctcttcccctagggatggggcttcctgagagccagactgcatgattgttattgctcttctgggtctagccacccagtggagctactggactccaggctggtgctagggagtgcctgcagagagtcaaagagtcctgtaatgtgatccatcttcacgtctctcagccgtggataccagcacctgctcaggtggaggtagcaggggagtgaagtggactctgtccttggttgtaattttgtatagtccgctggttttcacaaatgctgcttgtgctcccgattggttggactccagcaaggaggtgatgctttcaagagagcatcagctgatacaacctaaggtcgcctggataagtatttgggtttctcaggccataggcagtgccatagagctcctaagagattatgtcttttgtctgaattcagagtttttgttttttggctgtctcatggagtttgcagtggcaagccacttccttcaaagattctgtgaaatcttgtggctttcctgctgtgttcctgtggtggtttttggagctaaagttcacgatgtgagtttctacatgctgttctgtccttctgagtgggagctgcaagttagtcctgcctcctcaccaccatttttccctattttcagttttttgatgctaccacagttttataccactttgttctcaatccctcagtctcatcctgcagaagcccttgcctccaactctatggagaagaattaaggcctcccagtgagagtttcttcaacctcctctccagcccaggatttcagtttcccactgttcccctccccgccgccagcccaactgctgagggttctctcctggaacctgccacacttctttgacctccatggttcatctgcccagtggtcttcccacctcctcattccgtcgtacgccaaatccatcctacactcagtgtcatatttgtttttctcagttgttacctctcccactcaaaccccttccaaatgccccttttgagtaagctcctcaccatggcattcagagccgtgcatttgagtccagtggacatataccccacctctatgccccatcaaaactggattgttgatcattacccaaaaagatcttgcagtttctctccttccactgaccagcgctaattcccttcacatgaaatattctgtctccatctccacttgctaaagttgtttccatccttcaagactcaaataccacctacctgatgaatcatgagctgattttcacttctgtgccagagaccctcccatccctcctgcctttgaacatccatagcatgtaatttatactgcttttccatcacttatggtggagaacttgtattcctgacacttgcctaccttgatttgtccaccaatttgattgtaagtgtcttgaggtcatagaagtaaaagcatgccttgttacccagagtatgggctgtctgcctttgctatcagaagccgtccttaattgtgaactgcattgaattctcaacagagcaggacctgtctctgtaatttaatcttttccctgacttgaacaacaatgaagcagggagacagaatgctctggctgacatgggaatcccagggtgttcactaagtacacattcttgttctgcatccctggagattccgaatgaaaaggtagagcccagataggccaggtatggtggctcatgcctgtaatcccagcactttgagaggctgaggcggatggatcacttgaggtcaggagttagagaccagcctggctaacatggtgaaaccccatctctactaaaaatacaaaaattagctgggagtggtagcaggtgcctgtaattccagctacttgagaggctgaggtaggagaatcacttgaacccaggaggtggtggttgcagtgagccaagattgtgccactgcactccagcctgggtaacagagtgagactctgtctcagaaaaaaaaggttagagcccagaaacctgtattttttacaagcgtctcagctcagaagttcattgctactaaaacaccttgtgagaaccactggggcagtggaccaaataaagttgagtttgaatccagttcttcagttccctagttgtgcagacctaagcagcctcctcatctgtaaaatgggataatacttgcctttttaggccactgcagggagtgaataaaacaacggatgtagctgagctcggtggctcatgcctataattccagcactttgggaggctgaggcaggaggatggcttgaacccaggagtttgatgccagcctgggcaacacagggagacccccatctgtacaaaaaaataaaaaattagccggacatggtagcctgtgcttgcctgtggtcctagctacttgggaggctgaggtcggaggcttgcttgaacccagatcgaggccatagtaagccgtgatcacaccaccgcactctagcctagacaacagagcaaaaccctgtctcaaaaaaataaataatcaaaacaaacaaaaaacaacatatgtaaaatggccagcccaacgcacagatcagggtagatgctgtgtcagttttcttcccaaagtgccacattcagttctgcatcctggttccagggggttcctacctgcctcggtacactatcatttttcctcatcctcagcattagttgaaggtctcttccatcctaagtcagcagctcttcttcagctgggatttgtctgcctcttcactctcttctgcttgtggcccagaggacctgagttgcagaggtcacaactgctgtgctggctttcttagaacacctttctgttgggccatttactcaacatacacttgttgagtgtctgccctgtggcagattctgtcttagagactggttgtacagcagtgaatacaatgagcccaaatccctgtcttcatggacgtatagtctagaggcactgtacatgtagaagtaagtaggaaggtgctcaaggaggcctgcgaggagagtggcgggagctggggacagctgaagacaggaggcgtgtgccagacagtgaagccttatgaggcattgaagggacttttgcctctactctgggtgacacggagcgcatggacagttttgagtggaggagtaccctcatgtggctcatattttgacaggatcatctggctgctgtgttgagaatagactgcagagggtagtggtggacatgaggaagcagatgggagactctggctgtaataaggggtaggtgggggttgggggtggggtgcggatggtggccaaggccagcgtgtgccaattggtgtggtaagaacggtcagtgcgggccatgcttggaaagtagagaccattggaattgcttgtggatttgatgtagagtgtgagagaatcgctaaggatggcaccaaggtttttggcctaaagaaatggaaggacggagctaccagtaacagagatggggcaggggcacacattgcagaaagaacacatcaggaactcagctagggatatattacctcctgaaattcagtgtggccttgggtagctgatctcgggcagagattggtgactcttgtccccgtgtgtggctcaatgttaactttttaacgatcagatgctgacctctcccaataaaatgtattaactgctggcaccacttcaaaactctggctagtctttaaaataactagttagctttcattacaaaagtaatacctacacatggtaaaaaaaaaaaaaaaaatctaagaattacaggactaaggtgaaaaaataagccttcctcactacccctgcttattgttctctgtctttttgcagctatttttccacaaattactgtgtcctgagccctgagctaattaagtgctggataagcatcacctcccagtaatcctgttatcagcctttgaaatgtaggtagctttattatccacattttgcagatgaggaaacagagtcaggtgaagtgtcttttccaaggccaagctcctgagggcaggggctcaagcttaggccttcagactccaaagtccagaccgtccctgggaacaagcaccctaggttttcacatggagcctccgaaacgcctctggcatctcctgctgtggggttggatatgagctgtcttatatagaccctacctaaattaaattaaaatcgactaattaaatgtggcctctttgaatacactgccgtatttctaattacagctttccttctctcctgagaaggcagcccaacattgtttctgaaaaggtcctcaattactaatggttggataacattttgaaaatgtaagtgtcattaaattgttagttagaaggccctgagtggggatgagaggatggaagtcagttgtcaaccgtctcctctctctctctgtttctgtctctgtctctcacactttctctctctcactgtttctctctctgtaatacacatatgcacatccttatctcacaattgacccaaagcatcagaaataaaaagtcagactgagtgaccttagctgctaggaagcatcttattgtgccttccctccctctctgactttggccttgacactgatctgagcctgcagataacagaaaggaggagcttatctagacaggagtggtggaagtagccagtaacaaatcattgaagtgaggagaatgaaggtaaagaaattgatcagctttaaataggaggtgactccgcattcctcttgcttggaaatgatccccaggatggaattgtgtccagggtgtgaggttgtttgtgaatcagtcctttccagatagaatatatgaggcttgaaactacatagtgcttatcaccaagaggtatataggtttgtcagagcaagaagaccactctcccctccacctgcccccgcaaaaaaaaagaaaggtagtatagagacttagaaagtagagaaatataggtagaagtacagtacctttgagtgaccttcagaattcggtcctcttggctcaaaattttggcatcatttcaacaaactattttttttctctcctcatttgatttccccttcaagaagacagggagtgagtgggctccaatcttggcaacgttggctgcttattagagcatttgcaggcctaggagatttgctcctcctcttggtatctgaagttccacaagccccttgttcacttcccctggagtagggattgtggaatgttgccactcaccttcagttccctgttgaagctcttgcagacccctaatagtgcatgctaccgttctgcagagaagaccatgatgacaaaccacagacatcccccttcatctattgtcttctgtgtctttgggaaggcattcctggaatgactgggggctgtgtgtctcagtttaataatgcaagcttttggtttttgttaaacacatgcagagcctgatattaagcattaaaccaaggagctaggctaagacagttgtgtcaagaagttgttgtctttgaagaagcacaaggaatttaaagggatgaggaaacaagaagggggcctatccagttgggaccacaatacaaaattgaatttatcatttatgaataatggcttctagtttttgagtacttacagggtcccaggcactgtagatggtgggacgtagacggtgggatggtgggaaggtgggagacccagagagcttaagtgatccagccctagacacacggtgttagttaacttttgggagacacttcacaagctggtgtgaatgaaagaaaagcagcatgtacttttacaaaccttaatttaagcaaaggtaataaatttcaacctactcaaagcagaactagggtgtgattacttgctttgtaaaagattttttgctttggaaagttagaaatactggttttcaaaatatgttttgattttcctatctaaacctctattggattaaagtaaaacatgttgaccatattacgtggagaaatattgcacactctgtccagctatgctggatgaaaaggttgcagtcagtgaagggtgaaaaacttagtctagtttggacaagaagaaaaaattaacttctgaactttaccacctagatgtcactactctaatacttctcaaagtatagatggacaccacacctgctaatattgcatgttcctgggactcaacctagtctgaagaatcaaaagagtggtattagagccccagaatccatgttttaataagctccaaaggtgattctgcaccataatttgaatttcctttagatcacctcaatccatatctgttaacctctcgtccatattttctctttttgtgtctctttctgctgcgttctgaataattcttcttgagctatcattcagttcatttattcttttttcatctgtgtctaatctacggttaagtgggtccattgagtttttaattttagctacagtatttttcacttctagatgttctatttggttctttttccaaatatatttcatctttttttttttttttttcccgagatggagtttcgctcttgttgcccagcctggaatgcagtggcacatctcggctcaccgcaacctccaccttccgggttcaagtgattctcctgcctcagcctcccgagtagctgggattacaggcatgcgctaccacacccagctaattttgtatttttaatagagacagggtttctccatgttggtcagtctggtctcaaactcccgagctcaggtgatccacccaccttggcctcccaaagtgctgggattgcaaatgtgagccactgtgtccagtcttccatcattttttaatagtttactcttccctgcagatggacatattcaagctttgcttttatttcttaataatttactaatatgttcatgaaatttagtaatatgtttatgattaggtctgataattttaatatctgaagtctttacatgtctatttctgatatctgctgtttttactggtctactcatggtatcctggatcctccagtacttagtatttttgactgtatattactcattgtctttgaaaaattatttttggaaattcattgaagactgtgataaaagatgcctttctccagagagatttaggttggcttctgacaggttcctaggagtactaccagttcaggaccatttcaaaccaagtttttgaggttccctggaccatctgagtaatgcaaggccaaggtatacaatccatgagaaggccatccatggtgaataaatccttccacatctcccttgttgaatttgttgcaaagacagccttctccacagtcctctgatctggagaaggtttatttctggctcatcctcaccttaaaaattagcactttggagtccaagcataacagagggtctcctttagactctccactttggccctggatcttgacttaatgttcctctcaatttttggcaaaactgaaactcaagttggtctagctcaccattgcccttggaagaaaatttgcctcaattttccagatgcttaccttttccttttttttacttttttgatgatattaagaatcttaaaaaatatattttactctagaattaggttttttccccagtaggggagatggtttgcatatatagctcgccatattactagaactggaagtctctgcgctagaattatagaaccattcctctgtttattccagcccatgatgttggagagacaaaactgaagctgtcctctggcctgtagttgggtagaatattttactgacctttgcccagatctttcacctttgttctccctagagtgtttccaggtatctcaaatgagatggaccaagtcttaaagcaccagtaactttaatgcaataaaaagatcaaatagtacttttagaaggagacaaaggggattccataaaaggtaaaaatctttagatgctgagaatttagggtataggaaccacagctgttcagatgaacttgggctagtcttccctgtcacgatcaccatgtgcctctagacaataaatgcagtttgaggaatgcagtggcacaagatggcttgtgttcaccactgagactgataaatgagagctggaaagagtgctccagtgtctgtcattgaaaagtggggagatagcctgtacctgggctccctcactgtcgagttcattattccctcacatggattaattggcctctcgaggtgagattgccactggttctgaaggatgcctctctttaccacattattgctctcccttcactctgcttctgaaagtcacccttgaaaacacacattcttctctactggtgaagtctgatttatcagccaactcctcagagaagaaataacaagataaaaacctctggctataaagcactgttatgcattatgctctgttggctttatgtctagacagagctaagagacgcctttgtgaccctagcaatacctagagatgactgtatatttacctctttttagaagaaagatggacttgacatttttatatattagaggccacagaggcaaagaaagctctagccagggagacaggaggtgacactttaaaaccctggtctgcctgtccttccctgaatgagagaaagtgtagtatagccttgcagataaaaacagaccctggagtcaccaactgcctgggttcccattcctcacactatcactttttaattctatgacctcgagcaagttactcacatctctgtgcctgagttccccatctatgaagtggaaataatggtggtacctatctcatggtggtgttatacagatcaatcatgtaaggtacttagagtataatgcttgacatgtaataagcactcagtaaatatgagatatcatggttattatgctagcccagagaaactacggtatatgcagttgccggcaatgtctataaaatagtcttctcttgcagtgagtcacaggagctaacagctcccattttgaaaggggaaattgacaatggtagctggcttatttgagagagttggtccacatccaaaaatcttttcaggccagtacattcttgccagactgattgcatgtgtggtctagggttaccatgttcattgccaagagacatgtgagttactgagctaggagaaacccaaattaggagtacaaggaatcaggagatctctgggaaatgcagtcagaagactagatagcactaccaggcaggtccagattcagaattagtgagacggatggggtatgaatcccatactcaccacctattcctgtgactgatcgtggctgagtgagctcatctcctacagattcatgcacttgcatatggctatgagattttgtttaaaatgagcccccctgtgggttacgtgggcatatgcatttttcagaagtcatagcctgtatactcaagatgtgtgcattttgctgtatggaaattacacagtttttaaaaaatgagttattcctccccttaagttgatagtggagcttgcataaatgtgcaggtggttgccatggcccacaggggatccatttgtgattaccagctgggaggagatacacctgcttgcacgtctctagcagatgtgtgtgacctgcccccaactcctgctaattctggcccctttcttagcctcttctcctatatccatctttccttggcttcctattacctttacttcttttctcagatcctagggttttttttactcttttaatttacatttagtctttccttttttatgatcagaagtaacctatgcatattatgagaaagagcaaactgcttagaactatataaagtaaaaagcaaaagttgttttcagttccccagaagtgaccagcatgatttggtgaaaatgcaaccagacttttctatatatgcatgtcgtgtatctatgtgcctatataatacaaatatatagatgtgtagatagaaaaatacctacacatatatagggttatgttgttttattataggaacggaatcctacaaaacatctttcatggcactacatagagcactgccaccccattctttttcagtggctatcatatatccactgtttggatatattaaccactcttttttccgtatttctaactttagtcaaggtggacatacagctcagctgagaagcagacacattgtgaaatggactcccccaaaagagtttcatctgacttatcccttctccgcaataaaatcttggattctgggtgtgtttgttttagatgctgtggtaccggctggttttagcaacaaggacagtgttggtagggtgagaaacactatcccaagtcatatgtctgtgtgactacaggacatttcttttgaatgccacaaggatgatttatatgattactggagacaagcctctgtctcctgaagacaggccaagataacgttagattgaatttcaagagatgaaagtgaggtttttaagtaatagcaaagccttgtgtttctgtagtactttgtgctttttgaagtgctttcacagtcattatcctgtttgatcctactaagaaccctgaaagtacataggttggtggtttttatcctgagactacaaatgataccaaggataacgatgagtaggaatcagagctagaattaacccctattttcttactattgacccagcatgctttctatgttgaaaagtgcaccacatcgagaagagattggtcaccgcagcacagggcacgcagaattccattagtatcacttacctgggaagtccaggtgccttcaatagttgaggggagtaaatgatatgactacctaccttcaaaacttgtagtttaaagtggtaacttgaatactcacatttacctctgtttccttcctctaaaagaatggttttttaaagggtaaatccacagggacaaagaaaaggagaggaaaaccagcaaaaaaaaaaaaaaaaaaaaaaaaaaaattgtggaagctggagaacaaatgggtgagctatgactggattagtgaactcagaaaatggaattctaagctggcactcaggagaaccaagaggcaaccagatatacttccagaaggcctgggaattggcaacttgagataactctggaaacagaagagatgggctaaaaatgggaagattagttgaaatttcgttaggaagctatgacactttcatattccttccctatgctacacagcctagcgactgcccctctcacacccaggcagaagactggagcttactctctgctgagggtagaacaggtctctggaataccagatatgaagcacagctgagaatgggggtccgtttctgaaaacagggatttagcataagtcaacataatgaacattgaaactactagcccttttcctcaagtcaggtcccagaacacagccagccaggctcatattccttctaagcaggagtttataaaagtcttctttgggaaaactcaccagtttaagagattggatgtcaatgaagtggcgcaactgaatcatctaatggtgaagcccacaaccaagagctttttttttttttccattttttaaaataaaagctttattaagacattcacatagcatgctttcactcattgaaattgtacaatttgggtttttcatagaatttgcaaccatcatcacattaaacatatttatagaatttgcaaccatcactgcattgtctacttgcagaatttgcaagcatcatcactataaacttcagaacatttttatcacctcaaaaagaaaacccctaggctggatgcagtggctcacacctgtaatcccaacactttgggaggctgaggtgagtgaatcacttgaggtgaggagttcaagaccagcctggccaacatggtgaaaccccgtctctactaaaaatacaaaaattagctgggcgtggtggcacacatgtgatcccagctacatgagaggctgaggcaggagaattgcttgaacccgagaggcggaggttgcagtgagccgagattgtgccactgcactccagcttgggtgacagagcgagactccatctcaaaaaatgaagaagaaaaaaaaaacccttgtcctttagctatcaccccctgcacccccatctacaccctaggcctacgtaaccacgaatttactttttttttattattattatactttaagttctagggtacatgtgcacaacatgcaggtttgttacatatgtatacatgtgccatgttggtgtgctgcacccattaactcgtcatttacattaggtatatctcctaatgctttccctccccccttcccccaccccacaacaggccccactgtgtgatgttccatttcctgtgtccaaatgttctcattgttcagttcccacctatgagtgagaacatgtggtgtttggttttttgttcttgcgatagtttgctgagaatgatgacttccagcttcatccatgtccctacaaaggacatgaactcatccttttttatggctgcatagtattccatggtgtatatgtgccacatagctttttagtgtcccacacttaaaaatgagtgtcagccaaggatcaccagacatttgacacttgacagaaaccttgaatatgaaagacagaacactcacacatctagggggaggggggaggggaggaggaggagaaagaggagaaaagcattttggagggaaacaggctatatcaagagaaggaaacttaaaacagaaaaacctaaaagatgactgaagatacagaatccttgaaataaaaataagatgcctcccctcttttaaaggactaaacaggaaaggactcatagaaatttaacttgaaaaagttgggattgtttaaggtcaggaaatcaagactagtgtgggcaacatagtgagaccccatcttcacaaacaatttaaaaaatatattagttgggtgtggcggcacatgcctgtagtcctagctactcagttggctgaggtgggaggattgcttgatcccaggagttaaagtctgccgtgagttatgattgcaccactgcattccagcctgggcaacagagtgagaccttgtctctaaaaaaacataataatggaaaaagttaggtcataaatttgaaggtatatcccagaaggtagaaaaacacaaggaaattgaaaataagaaaaactgaagaccgggttaggagatatatatccaaatcgtaggaattctagagagaagagagaaaaaaaatgagaaattgaagaaaatgctccctgaaccaaagaacagtggttttcagacagaaaagagcccacctaatgctcagattggtgaatgacagtaaaccacaccaaacacatcattatgaaatttcagaacattgggcaaaaagaagatcctacaagtttctagagagggcattacaaaaataaatacataaatgaaagtaagtgtttttacaaaggttcaagaatcaaaatggtgtcagtcttctcaataacattggacatgagaagacagttctgaaacaaatcgtttcaactcaagttctgtactataaagacattttcagaaatgattaaaaagttagtctcatacagtcctttcaagaagctgctaataaatacggtctaccaaaaccaagggagtaaaccaagaaaaagaaagacacaggatatgggaaattggggatccaaccttagagagtgaaaaggagcctctggaatgacactgaagggccatcacagggtggcggctgtgtatcaggcctgggagccctttgtccagacagtggtggatccgaaggtgtggggagagatttctataggaagaacttgataggccaagtagtatggtggctcactcaggcctgtaatcccaacactttgggaggctgaggaaagaggatcacttgatgccaggaatacaagaccagcctgaacaacatactgagaccccatatctacagaaaaattaaaaattattatagctgggcgtggtggtgctcgcttacaatcccagctactccagaggctgagattggaggattgcttgaacccaggagtttgaggctgtggtgagctatgagcgcgccactgcactctagcctgggtgacagagcaagaccctgtctctctctctctctctctctctctctctctctctctctatatatatatatatatatatatacacacacacacacacacacacacgcacgcacgcacgcacaaagaagaaattgatagaatacttaatgtatttgaattcgttgagaagagatttatgaatctgggaaagactttgtgtttgaattattgagaaatatatggaatgctaaacaaatggggagggggaaacttttgttttcccaggaagaaaagtgttcaaatcatagtatacctgtgttgttcatctgtagcattttcttgatcaagataataaaaacagtgattatctgtaattactgtctaactaaggggcttgaaaatgggcatatgtgtggcagtggcagagatggtaataaactagaactaaatcctcaccttttagagtgggaagacaatagataattcctcaaactaaagaatcacaaagtagcatacaagcatgctatttagagataaggcagtaagctttcaaaagagctaaccaaaatagtagaaaatgactacttctggaagatgagggtcaaagaatgcgatcgcttttatcaagcctcttacaactatttgactctttaaattgtgtgcacatgttactttgatagaaataaaagtggaatttcaagaatgcgctggtaggaacaattggtctgtgacagtacttgcactttaaacgtgagctatcaaacaaaaacctctttcaagcatctctagcctcgcaacagatgatctgggcatgcagaagaccactgcacccccacttgtctcccaatcttggatccaccttaatgatggaagcacagatgctgtgggaacatttcagaagcctgtgacctgacttttttctctgcaggtaactgcaggatgagtggttttttgaaaaacccaattctgagcattttggtctaccacaaactagaggagaaggcagaagtgccatctaaatgggtttgggtcacacacaaagcatcacaaggccgctttgtggggtaagttataatgctgccctgctcttcaaagcaaagccacatgcatatatctggcatatgtgcaggataagaattcattctctttttctctcacactcctaggcaacctggattaggtccagggcatgaattgtgacaccttccattacaaactccaaatgcagaatgtgttaccggagttgtctccctggaaccttttagggtgaatgatggagactcctttcctgagatgagatcttgccacttgctccccggccaaaccagccaaagcctcaggggccaaatgcacatgctcgtgagtatagcaattcagagcatggactttggagccaaactcaacggagttcaaatctggaccttgctacttactagctgggtgcaactcagaggaagttacttcacttccctgatcctccattttctcttctgtaaaatgggaataatagtagtgtctatgttgtaacattaaagaagacctaggatatgcttttagcacctatcatacattagctattaactcagtattatatttgctgtatcattgtgggaaaatcacggaatctctccgagccccagtttcctcatctgtaaaatgggggtaatgctgcatcctcgagagtgttgggaacattctgtgagccaatgtatacaaattgcttagcccaaaatatggcaactagtgagagctcaattcatgaaggtgattattactttcctgccttttcctttccacagcttctctcctaattcaggcctactttccttttgtctggccaccaaaatagcttatctggccaccctgagtctctctccctctttctgctgtagctcatcctgcatacagtcgccagaacaattttacatcaacacggcttttatcacttcccacacctgctgaggagcccactgcggttagaagatcgaaacaccccagcctgttatttaaagctttgcacgctgagatgtgtgctttgcatcttttctgtccagccagtcaccttattcctcatctacctttgtgcctactgcctctgtgtgctagatgttgtcgcatgcccctcccagctctcctgttaagagcaccacttagttttaataattgatttgaaatgaaacccacttctttcaaaaattcgccctgacacctttaccctcctcattcctttatgccttgtcttagcagcctttggggctatagccagcactggtctcatgcagctttgagtaaatttccttgtcctgaaaagccaccgagtgtagtggaaagggcttgaggctttggaggtctgacagatttggattcagatcttagctctgccacttactagctgagacatcttgggaatgttattttacttctcaatgttctcaccaaataggaatttataaactgggaatactgtcattattcccagtttacaaatggggacattgagaggtgagataacacatgagattattattacataaagttcttagtatcacatctggcatttagctgcttacatattacagttcccttccccttgttgtttcatttgtgcatggttttttgctttgccagaatacaggctccttaggtgcagggcccggatgttttgtctgtgtaccttagccccctgagttggtatatgctaggtggtgctttggtaacttacaggcccaagtctcagcagtttcaaacaatagaggtttgtttcccacttgctttgtaggtccatgatggattagtagggcaggcgtctctcatcttagttacccagggagctaggccactcacatttcactggccaaagcccatcacctagccagatcagaacttctaaggggccagggaagtgtaatcctattgtgtatctggaaggagagaaattcaggaacattttcaaccacctagtgaccaccatatcctccaggtcctatctcaggtttcctgtgtggagatgtctgttggcaagcctggtgccaccactgggcatatggtttactcccaggacttggagtcttggtgattagatacagtcctattctccatgggttcatggttgcccaactgtaattcacaatctctgccagaaacccagtgtgaatccacttgtcttagaactcaaccatacccctaccagtaaggacacaatgaagacaatagctttgtcccatctgaaaaaataagcaatgttcagggattcccagttctctaaaactctgtcatccttgactcattcattcagtccacaatactagatttgtggagatttgctgtgtgtcaagcacaattttatttacaacaatacggtgatactaagacagatgtggtccctgcctgttcagacctgacaattaggcggagaaggcagtagtctaaaataattaacagaatgggctctggagtcagacagctcatcactgggcttgcatttcttccaatcaaccttgggaaagttcctaaacctctctgtacctcagtcttaccatgtgcaaagtgggagtgaggaccatacttctgttatagagctttttaaaagaggaaatgaggttggtaatccatatagaacatttcataaagacatcagcttctagaaagcccttggtaaatgttagccacggctgctatcatcatcttcatcatcatcattaccatcattagtagtaacagtaggagtatttaggatgaatagtggtaggatgaggaagatgttgagccagcagggaaagttgtgcatttttctagaagcatagaagcatcgtactatgttggcattgcacataagtccatgaaaacctatttcttatggaccagaagcacactgtgaacaccaccattctagttacacctaaccactgtttataacattgtgcagggtccagctcatcccctgttattggccatttatgttgttccaactgattctctgttgttggcccctgaagtcccaccgtctaattccttttgaacattcaagtagcttttcatgattaaggctcagagtatagaaagaacagctgaataggaattgaacattttaaaatagggagaaaggactcataattctaaaagccagactaaagggctgcaaaacagcccttcgatgcatcagacttgtgcctgtgtatatttgttcatggcctgactttgagtcactgttcttaaggaaaaatatattctaaatccctctgtggctcccctcctcagtcacccaagacacttgacccagcagtgacatggtgaatttggcattgaagcaggaaagacaggagagccagagacatgccactgttaattccccatatgtgcataaaattcagatacctctgggtctatatttacttgtgtttagcatctgcacgtaaagaaagggaagttaccccctgctacctcccatcagtcaagcatcacctgattcaaggacatactaagccacagtcagcccatcccaactttttgccaaaatgcctaccccaaaagacaaaaaaaaaaaaaagcataccccatccaaaaagctggcctaattaaatcctgacagactgctgctctatttcacagctgcctagtagctgggtctgtttctgagctctggcaggaataggatacatctggctttactgagttatctaatatctttggcatgagccagaaaatggtggaaatggtagaaaatgtgttcttttcttactctaagacacaagggagttggaaaaagcacacttttttcctccacatttaaaaatgactagaaggtgagagagaaagagagaaagctcacctgcagcccgtgaagtcacgcttttgcattccgtttgtaggacaagttgtcagtgtgcgatgatttccataggctttgaaatggggtagcagtttaaacatatcaaatgcttaatgaagtgaggccccatctcatcggtattcagtgtggcactaacattacatacgctaatcctgaaacaataagctataaggagagcctcgctttctgggtttgaaatgaatggagcagtctgaattcttccagttttatctcctgctttaacctggaatgatgccagcatgttgggttttaccctggagaattcatatcatgtgaaaaacttaaatcaggtctgtctgctggtacacgcagtcctaatccgttaaatatttctagctaacaatgcacgtggggctcttcagctctgcatacagtcatgttctgctaagtccatgcaaatataaccacttctgcctgcttttttgagggagggatcagtaatgcctacatggttttacccaaatccctcatgcgacatacaaggctcttggcatatcttaaccctggtggtagctccctatccattctctaggacctggctctcttactgtgagcttgggaaggtttcaaatgagagattgcttcactttcattggtcatttaaaaggaaccacaactcttgactttatcaagttatagaaacttgagcccagagtcccggctgtagaatgtctaaagagaatgccactgaaccccatcattccctacgcccttctgcattcagaaaaattaaaaacattaggacttgtgtgaaccatgtatggggcatttttcttcagagtcaagcactgctgtctgaaaaagaacacttctttccagaaaactctgttttttcagaacgacctctttcattctgctgcctcattcccagaggagtgattttgtatttcccctcatccaaacacggagatgactttttcaggattgtaaaaaggaatgtgtgatcaatcttttatttaatacatatttatgaggtgcctctgtgtgtgaagttaagtgctgggtaaaagggcagtgtagcatcacagtcgcaagcatggattcgagagtccaactgcccgggttgataactgtgtgaggttgtgctgggtacacagtctttctgtgctgtggtttccccttcaggaaaatggggctgttgaccatactgacctcataacgaagtccttggggtctgacacctagcaggtactaagcaagtgttagctgccactgctgccatttctgctcctgctgctctgctgttgatctcattactgttaccttcatctttactattattaggtgctgggaacaaagttgtccaccaaaacaaagcgaaactatacccaccatggttcctgtccttatggagcaccaagtttcctgagggaggcatacactgaataaaagactatagaccaggtatagtggctcatgcttgtaatcccaacgcttttggaagctaagcaggaggatggcttgaggccagctgttcaagaccagcctgggcaacagagcaagtccccatgtcttaaaaaaaaaaaaaaagaaattaactgggcgtggtggcacacacctgtagtcccagctactcaggaggctgaggcaagaggattgctccatcccagaagttcaaggctgcagtgagctatgtttgtactgctgcaccccagcctgggcaacagagggagaccctgtctctaaaaaataccaaacaaacagaagattgtagtaaatgtataactctagcatgtgctatgatgaaagagagataactagatttaggtgaacatgaataaggggatctgtcataagcatgaaggtcatcaaatgcttttctgaagagcagatgattgacctgagatgaaggagaggtcttaattcaatacaagatcattaactcagaaaatatagaaaaataataccccctttcacattgcatataatttatccatccaatcatagccattattaacattttgctatatatagccctctacaccttctttatgaatggttagaaatacacacacacacacacactttctcatcaacataaatggcatcctgctctcgtaaaagatatactgtccactaatgtgctgtctttaccaagcagcatgctgaggatacctttctgtgtcagccagcaggaccaacatcctgagagccaagagccactgcagaccttccagctcagttccgtgcctggtttgcttcccccccatcccactcctgcctctgcatgaagcagggtggttctgcttctagagccagccttcttcactctcacctgacagctcttggcacacacctagctctggacttccatctatttgcaaggctacctcctggcacctgcttagagcctccaggtaccttacagtgtattctcctgatgtgcaaattggatccagaggctttatggctgtgtctgaacacttcatttaggtttgtgatcaacatcaacatttatgggcttatctggaatgaaagcctctgtttacacatttggaggaaaaatgtatccacaggcacagcaccttatttcttgttttgtttttttttggagatggagtctcactctgtcgcccaggctggaatggaatggcgcgatcttggctcactgcaagctccgcctccggggttcaccccattctcctgcctcagcctcccaagtagctgggactacaggcgcctgccacctcgcccggctaattttttatatttttagtagagacggggtttcaccttattagccaggatggtcttgatctcctaacctcgtgatccgcccaccttggcctaccaaagagctgggattacaggcgtgagccactgcgcccggccacagcaccttatttcttaaaatacctttcatattcctggagccagagcactaaaggatcctgttaaagaatttgctcctagggtcttaagagactcccgaatcttaggagcctcttagaggatggattgtttcttctgaaattgttgaaggctcagatcacaaaagtcacctttatagaagatacttctatgggcttaaaaagaaatcaatttctttgtgctatgttaatttgctttccacctctttctcctcctcatctactcaatacaagttgattcattcatctcctctgtggtacgatcgaagacatctctcaatgagggtccctgttatataatgttaggagtagcaggaagctgtggttctacacacacacacacacacacacgcacgcacgcgtgcgcgcacacgctttctggctcattccaggtggattgacagccgctgcttagcatgtcacaggcctcaaccttctaacagtagcccgtccagcttcctttgtgtcataaagagttgtcttctccctcttgagttgatttttctcttatattttcctttatattctcacagcttaaccctgagtcagtccaaaatgaataaagtgagtaaccaaggtcatctaataaaactgtggaatgatctcacagtctgcttaggctgccataacaaaataccatagactggagccaggtgtggtggctcatgcctgtaatctcagcactttaggaggctgaggtgggcagatctcttgaggtcaggagttcaagaacaggccggccaacatggtgaaaccccatctctactaaaaatacaaaaattagctgggtgtggtggcatgcacctgtagtcctagctacttgggagtctgaggcaggagaatcacttgaaccagaaaggcggatgtgtagtgagccaagatcgtgccactgcatttcagcctgggtgacacagcaagactccatctaaaaaaaataataaattaaaaattaaaaaaacagaccaggtggcttaaacaacagaaattttcagttttggaggctgaaagtccaagatcaaggcccgccaattcagttcctagtaagggccctcctggcttatagacagccagcttttcatggcgtcctcctcagcacgcactccggtgttccctcttcactggggcgctaatcctagcatgggggtcccactctcaggacctcattactccctaacctcccaaaggcttcatcttaaccaccatcacactgggggttaggacctcaacatatgaattgagggggatacatacattcagtccataacaatccgttttcaggactcagggtcaagaaaggcatggccaagataccacagctggcaaaagctaaaatctgaactgccaagatggcaggccatcaggaaaaggatggagaggcaacatggtgatggggtgggggaagacagtgttggcaccaaatgcctgctctgccacttgctggctgtgtgaacttaggagcatacttaatttctctgaacttgcctttccttctctctcaaagtggggccgatggtgctcaacccatgggcttgcagtaagtgttcttctatcaatcagccagtcaagaaataatgatagatttatatgtcaggaactcttaggtgatgaaattaaatgaaactcttgcttatgctgaaagctcagtgcaggacatggtagacacatgatcaatgtctccttcctggtcccacgcagaagggatccccaaaacaggattagtgggagtaactcaaataaaagacctgatgggaacagagtgcagtaacagagggggagaaagaaatgttttctgttggtttgctgagcatgaaagtgaagtttcttgcatgccagattgcagttgggtcctgaaaatggggaccagtagagttatttgaaggtagaagtgtgatggagtgacaatggaaaccacatgctggtcttctttgaaggctggagatgtaatttctgaaggacaacatgataaaccagcaaccagaagacagctggaccactgacagccctccccactcaatacaagtctttgttgctgtatggtagaaaaaatagagatgtgagttctgagacatttatgggactggccttttattatagcttgacaagtacaacactgcactcaagttagaagtaatcacatcacatttttagtgcccattgtaagtctgaaaaaccagatttgccataatgcctggtagtgggatttttttgttgtgggtttttgtggggttttttgtatcttttaaattaattttcaattaagttttgaaaggacaaagtgtaaaattaactaacttgcaattaatttcaacagtcattatgcaaaaattctaggcatgtgaaagatggggagcacggaataattaggcgtggattttttcacttccataattacaacgatgaatatgcatgaaaccatttgggaaaggaacacacagcaagcaattgtatttaattaaacttctagctggcttagccaggcaagcctgccttgtgttgtgttgtagtctcctcaaactattagcaaagtctttccaaacaaatagtaccccaaaatataaaagaggcagttgctggaaaggaggcagtcgcggatgtggtttttctcaactcttcctttaattttcagatttctagcttccttggaccttaggcatagcatgcatcattgtccaggtgtgacctgaacagcaataccttggaatagatttttatggcaaataagcacagctcagccttatgcaaatgccactttgtttcatttccaccttgtgtcaaagacccctccttgggtacttcctggggacatctttttttttttttttttaagacggagtttcactcttctcgcctaggctgtagtgcaatggcaggatctcagcccactgcaacctccacctcccaggttcaagcaattctgcctcagcctccggagtagccagaataaaaggtgtgcaccaccacgcccagctaatttttgtatttttagtagagaaggctactatgttggccatgctggtctcaaactcctgacctcaggtgatccacccgcctcagcctcccaaagtgctggtattacaggtgtgagccactgcgcctggcaggggacatctttatctataatgcaggatgtaggaattggactatagcaggaatacccaataataatagtaacagcacctctcacggttgagccattcctacaggccagagatgctgaccacttgacatgcatctttcatcttcctagtcaccgaagtttgagacttgaggaacttgttcagagtcacttgcgtagcaaatggcagagggagatttgaaccacagatcctgagatctgtgtgctgtgtgccactcattcactatcatttttctccaacttgagaaaaagaaggaaattattgtaagtccccacttttcatttttcttcaacttgagaaaaagaaggaaattattataagtccccagtttaggctgtagatggaattcatgcatctcccttgtttttccaaggtcaccttcatactacagatagatgtcccaggggcacctaagtcagtaaagtcagaccctgacagggagctaggaagaaggacacggcagagggggatgtgatggtggcactggcagcagcagctgcaaatatttaatgaccccttagactgtttgccaggcactgtgctacatacttatttaattatgtgtttttatttgtcttaagagacagagtcttgctctgtcgcccaggctggagtgcaatggtgccgtcatagcacactgtgacctcaaactcctgggctcaagcgatcctccctccttagcctcctgagtagctaggtttacaggagcatgccaccatgcccagcaaatttttaaattttttatagagacagtgtctcactgtgttgcccaggctggagtacggtagtgcaatcatagttcaccgtgaccttgaactcttggcctcaagcgatcctcccatctcagcctccaaaagtgctgagattacaggtgtgagcccccgcgtccagccctgtgctacatactttataacgaccatgtctgatcttcacaaacacctcatgagatgcatgctcttatccttcattttacagatgaggaaaacaggctcaggagtttaagtaacttgccacagttgcaaagccaataaatcgtagagccaggattcagacatgggtctgtcagcctccagagtctgtggtctgtgttggatgtcagtgcatcatcgtctcaactcctttttaatgtccatgggcacccatccaacaggtaggaaaacctggcccaacaaaggcagtctttaattttgctcactggtggtaagagccggagtgcgagtgttggacatcttggaaaatttccccaggcggcacatgagatgatatttggatacttgcaaagaactttctagaatctccacagcaaagagttaaagaagtgtagattgtccctcactgtaatgattacggggtcttgtttttatttaacatggagcactttgtctgagcttctcatttccaaatgcataaccccagaaggcttctccacccttgccccttcactgttaggtcacaacatctcagctagtgactttctttggtttgggaagcacactttttgaggtcagctgttactttctggaatagtgtgtgatttctgaaggcagttacagctcaccagaggggccaggatgggccccagtgaatgctggttccacggcacttttccaattctcattaagcacaatggcttttagtttaaaaaaaaaaaaatccatcacagacgtacataccagactgccattagctgacccggggagaaccttttgccaagtgaagcaatttccttcttctgtagttaaagcaatttgggggctgaatgtatttatgggcaaacttggtgaagtgagacagaagcattttacaatgtgcatgtcagaggaaaatcggaggctctgggcagaacatcctgggtatccccttgtcataaatatggcatagcaagggggtcaggtccaagccatctcttcctgctatatccggggcagcataaagagaccaggaaactgaggtacaaagaaggtaagtagttggcccaaagtggaaaaacgagccaaccagtggccaaacagttccaggcttggtccttcttctcctcccatgtccctcctacacttagacaactcgtgctcttctttggcatgttgggtttttcttgatgtcattggagtttctctctctttcttttttttttttttgagatgaagtcttgctcttgtcatccaggttggagtgcaatggctgctcattgcaacctccacctcccgggtttaagcgattctgctgcctcagcctcctgagtagctgagattacaggcacccaccaccacgccctgctaattttttgtatttttagtagagacagggtttcactatgttggccaggctggtcttgaactcctgacttcaggtaatccacctgcctcggcttcccagagtgctgggattacaggcgtgagccacagtgccggcctggagtttcttctttaatggtttcagttttcctctggttcttaagtttgcaaagttttcctaagctatcatttcagtatttggacattcctgtctcctgccagacagtcacttgggttgtcacattggcacttgttctgcagaagtcccttgagcacctatgacaacaggctggagccgcctattcttgcccccgccctaatgcacagcccccatcttcccctcaggttcccaggttcttcctcctcttcatttataagtgacttgaaactaagaggaaactaagatttatagtttccaagctcagctgggactccagcgccatgttctgttcattttggttttgccttattcttaatggtaacagaaacctacgaatttaggacagattaaggcaacaaagccattctgtgttctccgtggggccgggggattcctgcctttagctgagcttaccccacatttgactgtcatcattatgaatgccccaaggcagcttacagctttctcttcctagaggaaaagcccagtattgtggctcttttcgtgctcccctctgcgtcttgaaaagtgaattccaaggagtaggacagtcaccggcttcacacagccctgtcattgtcttggtgtccctgatgaagggctgttgaaggacttttatccacagagagaattgataatggtggagatgccacagatgacagtatctttagctgaaggtgtgaagttgagggatgtaagcagaaggaagcaagaaggtccacagcatctcctgttattcccccaaagtctttacagatcaaaaaagggtttaagagctgttgtctgccatcaagcaagatgcctcagaatagctccatttggggcctgtgctgctgagaccacaagggaagtttgtaattatgactgattatgggtttttctcctcggaagccaatgaaaaaatacaattagctgagtctccctttatctccctcatttgtgtgttcaattagtgcaattggacatagatactgttacaagaggagctttgccggcaatgatagggtggccagcaaatgctcagaagcgatgagtagaatattaattgacatgaatcttgtttatgctcctgcctggaagttcctgctccctgggtctccagtacagattttccgttggtgttaacagcggtgtctccttgttgctctgggtggaagtatcaccagaagaagcacttgatgtatgaaaatagcagaattaagctagaggccctcaacttttggtctggagttatttcttatttcttctcaacttagaaattcaaaaattggagaggaaaatcatgaagagtcgagaaaattacatccttgttagagaagcaaacattcattcttgaaatatcgagtggtgataataatgcttctaagagttaatactgtatgcggtaggtgctggggctgcctgttggtcctgaacccatcatttaaggcttattactacatattagctttacagatattttagaatactaatatatatgtgcaaggctgagctaagtgcttagcagtgagagggatgggttataaacatgactgagaggagaatccagcccttgacaagtttaatgtttgctttacggaagactagctatgtccgtaactctacaacgtgggagagagtaagatgtgccatgacatgggtcaggtaaagcacagtgggaggcagaggcagagcgtggttatttctagttagggaactcaggggagaagtcaaggagaaagtggcttagtggccatttgaatcttgaaggctggccagatgtgaacaggaggtcatgttggccaagagagcatcaggctcttatacgaggtcaagagagcgtcagtcctaggaaggaagcacctctagaatgatttacctgtacagccctgtcactagcaagacttgttgattttactttttttttttttttttttgagatggagtcctgctctgtcacccaggctagagtacagtagtgcgatcttggctcacttcaacctctgcctcctgggttcaagcaattctcctgcctcagcctcacgagtagctggattacaggcgcccccgccaccaagcccgggtaatttctgtatttttagtagagacgggttttcaccatgttggccaggctggtctcaaactcttgacctcgtgatacacccaccttggcctcccaaagtgctgggattacaggcatgaaccactgcacccgaccctgattctactttttgtacacgagtttctctggcttaagatctctcatgtgattgcacttcttctgtctgctggaactgtggtctcatctgaagtttcaactagggggtttccgttccttgtgggttgctggaatgagagcctcagtccctcactggctatctgtttgctggaggcctccctctgttcctgggcacgtggacttctccatagggcagctcacatcatggttcttagagcaagcaaacgagaaaatgatcaagagcaggtagctaagatggaacggaaaccacagtcctttgataacctggtattggaagtgacatcttatttccatcatctttcattaattagaaatgagaaatggctgggtgtggtttttcccacctataaacccaacactttgggaaacagagggagttcaagatcagcctgggcagcataaggagaccctgtctctaaaaataatttttaaaattagccggcatggtggcatgcacctggggtcccagctactcaggaggctgaggcaggaggatcacctaaggctggaaggctgaagctgcagtaagccatgattgtgccactgcactccagcctgggtgttggagtgtgaagggctattgaagggcttgtatccacagtgagatcatgtctcaaaaaaaaaagtgagaaataagtccaaccacaactcacgggaaagggatcacaaaagggcatgaatctcaaaaggcaggcattggaggagctgcctcagaggttgtccaccacactggggaagggaatagaacatctggagcgagggcagagagagaacacgggggctgctcagagagggcctcctaggtctttgtaaatgcttaggttttactttaacaactgcttatgtatgaaacagcccacctacgaggatttttatcataaaagattataatagaaaagtttggaaatagatagatcctggttataaataaatcatttctacatctccacaaatggcacactcactgtgcagctattaagaagagttagagttgattctaggcctggggctgggaaatacaagatgagcccgaagcatcttctcccagaaagtaaacaagtagcccccaaaccaaacaacaaaaaaataagaacatggaggtgcattgaaaggatgcgggagccaacctgaaagtgttccccgtggccaaaggtgaaacaacctgagcaacaaaataaataataatgcctttgttttgtgctggtgtgacaaaatacctgagactgaatcatctataaagaacagaaatttgtttcacacagttctggagcctgggaagttcaagatcaaggcgcgagcaggttcagccatctagcgagggctgctctctgcttctaagatactaccctattgctgcatcctctagcgatgacaatcactgtgtccccaggtggccgaagggcagctagccaaacattgcatgatgccccttccgtaagtgccccaatcccattcctgaggagagagccttcctggcctgatcgcccttaaatgcctcacccttcagtaccattacattggcagtacttgtattttggagggaacccattcaaataatattgggttttataactcagagagtagcttaaataacaagtccatctgaagtaaataaataattaataaataaattggagaaagcaaatcttccttatagaaaaattgtaattattgaaatgtagaaggaatcaaggaaataggggggaaaaaacaccatgagaacaacacagtaatatttgctgcaggcagcaggcaaagtccatgatgaatgctaaaattagtgggtgaaagtttaagcagaaacaggatatttgcatagtttcaaagaatctcccccaaaatatttattgactacaaagacagaaatagtaactttgcagtgaagaatcctggcagataaagtgatcaaagttaacatcatcagtgaatgcatttcaggtatcccctgatgggatacactgaatatgctctgatactcttttcaataatatatattctcacaattgtgaaactacatcagaaaaacccaaattgagggacattctacaaaataacttctcgatcctcttcacagtattaaagtcatgaagaacaaggaaagactgagaaactgtcaccgattagaggagatcaatgccatgtgggatcctggcaaaatttgaatcaattctattaacttagttaatacagttgttccaaggttaactcagttttagcagttgttctgtggttaggaaagggatcatcactaggggaacctagatgaaggatttgcagaaactgtacttttttttttttttttttttttttgagactgagtctcgctctgtcacccaggctggagtgcaatggtgtgatctcggctcactgcaaccttcgcctcccgggttcaagcaattctcttgcctcagcctcctgagtagctgggattacaggcgcatgccagcatgcctggctaatttttgtatttttagtagagacagggtttcaccatgttggtcaggctggtctcgaactactgacctcgtgatccacctgcctcggcctcccaaagtgctgggattacaggtgtgaaccaccatgcctggccaaactgtactatttttgcaactcttgtgtatgtctaaacttatctccaaataaaaaattaaattttaaaaaaggagaacctagcatatagaaagtgctgtataggtatttattaaatagacaaaatggtaattggttaaaagtatgtattgatgtgcttaattaagtaaaaaaatcagggtgtaaccatgcatgttaaaaccatagatatgtgctaatatatgcctgtactattcctggaaggcttcacaaaaaagaaactgaacaaaataaatgggtgccaagggttgcctctggggaggggaagcccatggctaggagagagatacatgaaacagacttatttttgtctgcaaatcctttcttactttttgaattttgaatcatgcatattttgcctattcaaaaaatatattttaaataatcttagccatggtaatcctgaggttcccagagctccccatccattccccaataactcatgccccataacagtggctcagaatcttctggcaccctggctggcccttagtaggtgctaggaaatgtaggatgaatgagtgaattcattctgctgcctgccctccgtgggattcatctttgtatcacatcagacggtgtaggtccttttattcctcttcctaaggaggccagcttgggccctctgttggcaacagaagactttgatttcttcactttcttgttttaaacacagccccattaatgtttaaaatgcttgtctgagctctccagtctgtcttaggtgtttcgagggctttcaacagggattctaaagcggcccagggatacttggttattatttcctctttatagaattgaatgagtaactttgaatcctccacagcccgagaccctgtagttattcatctattatggaacaaccgggttcagtgacccactgcccaggaggcccactggtgttggaatagagcctccagcaccttgtcttaaagaacattcaaatgctccaccaagacttcatttcaagaagtataaatatgagacatccaagtacctctcagaagacaggattgcacaggcaggcagtattgctcaaccacccagggaggtggtggtggcaagaacagatagatttttaactgttcaggtatttcatagccaagattgagaccaagtttgccatttcctgtaggaacatttcagtagcttacttctacagataacaaaaagcaaaagagctaatggagggatagcgggagaggggtgtgcttgatttcttccttgatttcttcatttctccatttattttctacagcagttatagttacctcatgctgattgccgcattttgtgtattagagtaacttcccaaagagactataagctgaataaaagctgtgcatctctaagctcatggttcattgtagtattggtctcctcaaggaattaacattagcccttcttgggtcagtttgtattttaggcttgatgggccctagagtcactgtctcaactatgcaactctgccattgtagcatgaaagcagccatagatgatacataatgaatgggaatggctgtgtaccaataaaactttatctatgaaagcagacagtaggctggactgacccctgagctagaacacaggatgctaacaggcaggttgtagaagagccaagggcctcttgtagagatcatatgtctaaaccattgctaggagtttgtatttccagtacagtgagcaatgcttggtgggaatataaagcaggaaacataccatggtcttatttatttcctaaaacgagctttgtaggtgctgtgtggaaaatggattggagaggggcaagatcagaaattgggagaccaagtagaggttcacatggtaatccatgcaacagatgatggtaacttgtcccatattatggaagcagaatcagcaggacctgcccctgagttggacatgaatggaaaaggaaaggaaggaaccaggtttaacactgaggcctgcagctccagtgactgcctggggtccctggcccaggattgtaattgctatttaatgatgatacttgctttcccaactcccacaagtgaggttttatttgcaacaatggcctgcctgaagtagatttttctctctccagtttttagggtttgcttttccctgcaatgctatttgtgtgtgattacaccacactcacaaactgatcaaagcatctccgctccctgcatcctgcttgagttagcagtattcgctctggctgctgactcggcaggctcaataaactattgtattgtaattggccaagccttattactggaccagaaaccaactgaccattgagttcaaagaatgtctgctaagcatttaattttgcggcttccaccaaacactacaggtaaatagctacagtaagcaatagaaatagtagttctttagagccttccttattcagcaaattccagaggcatggatagtcatttccagatgtggcctgcaggagcagcccaggatatcatatataggaatctggatctggcgaagccactcgatgcagaggaggcagatgcctcagaggtttccctttggatgggtagaatgattagattgatcccggtgcaggtgcatgagctcattaccaagtcccacccccttcccgtgctgtctctcattggcttctgctgcttttgtggcctgcagtaggagaggtagcaaagaactcctacccctcattttcactgcattcttctgttgacatttctgaagcaatgacacaattgagcagagttctaaaaaggccacctgggccctagctcccaattaccctctcactgagttttagtggcaatctgaattcctacttaaaaaatgccattgcactctagcctgggcaacagagtgagaccctgtctcaaaaaaaaaaaaaagcccttttctatcttaaacagccaattaaatgccttaccctccaaccagttctgcaactgccctgagtctgtgtcttagcaaagaggccattagccacccgactccctggcttatcactgggcccttcctcatcagacacagagatcaaattctgagggtgtacagcagctcttagcaggcttcaaagagctctgggactgctgggggctttcctccattctaagaaactctctggggtgaacagcttagaaattaggggccattgataccagttggctgttcagtagcacttattgaaaggatggaatgcagctttcagggagactccctgctcccatttgcccaaaggatggcagtggttaggcagatagaaaacctctgcagtcttttggaataagaatgactgaaaatttccagggaagtgtctacttcattcggtcttcagtttagaactttcttctctctctgtctctctctcccccacccctctctttctctccccctcgctccctccctctctccctccctgttcctcttccactccccctccccttgctttccctccctctcattttgaatttaatcctcgggcacttgtctcccagctctcaatggtcctggttcccagcatcctggcagatgggtctcctctctcatttccctctggcttggggccaggatggcccctgctgtggccggtctgaggttgcgcagctccagttttcccatcaccctcttttcagttaattttagcaacttgagttgccatggtaatggttcagcggggttttcatggctctcttttgattcagtcatttgctggtctgccctttaaattaaactttttcaatccgcatctaaattgggatgggtgatgtgcttggaatagggatccgcaaaggcgctccagccccatgggatgctttttttagacaggaaagtcagggtggatgtggggatgcccttggtttacagtggcccagacaatcccttgatgcttccaggcttgagaaagtgtggctgccactgtggcagaggccatggtaggaggcatgcaggagtgaaatgggacccccagggccgctcccaccctgggagtgccattggggtcaggcctgctccccgcacctgagcacagggcccagccaggatctgggctctccaagtggacgaatgaattgtggacccagccagactcccctccatcgcatcacagcttggaggctctgtgcccctgtgaatcccaactgttctccctgcctccctctcagcagcgttttctcttctctgccattcagcactcccaaggcccgttttaatctagtgtgaagggtcagactcttcgtccaggtaaaaggaaactacagaagcaagctcacagtcgcttcactcggctcaaatttaaaacagtcttcagtgttcatctaaactttgtggcaggtacaagttgttcatcctgattttacagtcccaattttaatcccgctgtcccttcattaaatgctttcagttgcctcttttaaaccagaaggctgtggggcccagcgttgacaggatttaggcactagtcaggcaagttgttctaggcgtggctggctagagaaggaggcagtgagagagaggagagtggggagaaagtgggggtgaagagctttgaccttcatgatgagggcgtgggacttgacccttggcaaataagaagtcctggaagggctgtgagtgggggcagacccaggtccagtctgcagggttggcctggagtgactatgtcaaggcaccatcttggccactttgggagaggagtctgcctgcactggccccacacttttggtcctgcgagttggtggatctctagatgattctgggaaagggttacattgatcccacctcatttgtgagaaggaagattctagaaggatgagactgtttttgtacagtgaacatgtgttttctctataaatcttgagctcagccagtgcccatcaataacagtgtgaatatttcagccacaagggtggttttcccttccccaaaacagatcaccgggaaaactggttgagtgggacctgccctcataccatgtgtcatctctgggtgttggccagacagacctgggctcgtgtctcagctcaatcacttcctggctgtgtgacctggggcaaatgacctcacttctctcagtcttctttttctcacctgtgaggctgaatggaatgatggccatgaaggcatggagtctcataggaaagatgcacaagccaagacttcacagggccacagagttagagacactctgccggcttctcccagcaaatttttactatttggagctttggggattcagggatgagcaagcagaattcagttctgccctcagggagttctattccagtaggaaagagagacaattaaatacaaatagaatgtacaatgacaggcagtaacagtgctgtgaaggtagacgaggtgggtggggggatggagagtgatgtcggtgggccagaaaggagtagagtcttgaatggaattgtgagtgatgcggatgccctggaaggtcgtgctaagcagacggcaagggccctgtagcaggtgcatgctgggtgtgttccagaaccacatcaaggaggccaacgggtctgcagcagcagccagggaggagcaggagtggaagtcagagtagcaacggggatgagattattcagggcctggaggccatgttaaggactttggactttattctgagtacatgagaagccactggaaggttttgagctgaggagtgacatgaacagatgaatgtttttagaaggagcaccctgcagccatgtggaaaagacactacggggagccagagtggaggcaggtggaagggacagtggctgggaacagggagattatgaagcacaggcaccaggactggggattggttgaggctggtgtgcagagtcccgtttggcatcggatatgtcttgtgctcccctttcgggcatgctcatcctgcctgcactgggactggagcccaagagcccagtgtctggagaacaagaacccagtgtgtgcaaaacgaacagccctgccctccaagatgctggagcttgttgggtcagggtcgttgtgttcagatctgaaatctcaagaagccatgaatttgttcatggtggataaagctcccccttgggagccctgcttacagtgattctgtatcagcccgttcccctaaattactcagaaagttttctgcactctgaagctccaagtgtgcacactcagcatttccccgggtaataaagtttcacaggcaggagtagcaccgatgaactgattatgcaaggggccgtgacaaactcgcagatcccaagaacagaaccagggcagcctttggactccttgtgaatttctgcagcatcagctcctgcatgctcagttcttgacaaatgtaagacgcggcagagtgtcatacagcccccacagtggcatctctcacttcatgctcaggagctgctcccagtgcttggccatcagtgatgatgatgccgaaccttaactgatgtggcctgggacctgggcctcactgtatcacgagaagagaggatggggctaagatagttgtctctcagcttcatcttcttccatcggcagctgcaacccagagcttcctccaacagcctgcccaaaggccagggattcccctttctgatttgtgagaagatatcttctagaatgttgggaatgcacatatttggaatatggtgtatgttctgtccatctcagcctagcactgaggttgaggaaataatcacatcctttcatgaagagtcacagtggacatttgcctagtaaaggctctgacaagtcttgtaataatagctattgataataactaaaagttttgtcaaatgctactttgtgccagacaccactttaaacatttctatacatattttccctttttatccaaaaaataaccctagggggtgggttctattatcccattttaaaggtgaggattttgagacacagagaggcaaagtaacttttcctagtccatacagctagtgagtgacacggctgaggtttgaatctagacagtttgatctctgtaccttccctccaaacagctacaaaaaaggaggggggaaggggtttaacttgtctaatccagtcgttgtcacacctgtttgaccaaggtactctttttcatgaaatacctcttgccatcccacagaagacacttccagtatattgatcagactctaagattgagtattcattgaagttactggaaagggaccccattgcaagaacagtacagtgaggtgacagatgttcaggataaatgggacagaggagaggagggagcagagagaagtattcaggatagcgcaatggattctgacttcagactcctgcacccaaagactagttgtaccacttgtttgctctatgaccttctgtaagttacttaacctctctgttaataaaatggcacacttcacaggattgttgtaaagaagaagggaaattgtgtatatcaaaggaagagtagaagaaagaggttcagtgctcactgctcagcatctaggttatcctcattttcttcttgaaatgtttgctttcctgtagttttgactctgtctgtaagtgaagaaattgtgaattaccatgttgacatgtttcagagttagtttaccaatatcaaaaaacactgtggagtacctgttgtatttcccagattgtggtgagccctgagtggggttccaagaaggagcaagcctggtctttgcccaccgagaacttaatggtaagatagccacatatgtaaaatgaaataaagctttgggctaagagtacagatgctggaactagacttcctgggttcctcttggtttctctactagctagctctgataatagctattaataattcctcaggtatagggagtatttgggcaagttccttaacctgtgttcccatttcctcacctgtgaaacggtctacttcataggagggtgtattcgtttgctagggctgccataacaaatgaccacaaacttggctttgaaacaacagaaatttattctctcacagttctggaggccagaagtgcaaattgaaggtactggcagggtttgttctttctggaggctctgagggagagtctgttccatgcctcattcctagcttctggggccgctggcaattcttggtgttccttggcttggttggggctgcatgattccagtttctgccttcaacttcgcatggcctttgcccttgtctgtttctgtgtcatctccttctctgtctctcataaagacactcatcattggatctaaagctctctctaattcagaatgagctcatcttgaaactcttaccttaattatatctgcaaagaccctttttccaaataaggtcacattctgaggttctgggtggacatacctttggagggacactactcaactcaatacagatggtgcaaggattaaaagtgttagaatgtgtaaaacacatcagatattaatgagaatagggtaagagctgccaggataattatggtgatgatattatgtttactcttgtttttgagttcaaagtaaatatgcatggtggtgatggttgttagtattattagtatcattatttagttcaaatcaggaatgaggacatgtcacaaggcaaatggtgttcctcattccaactctggacttttccccatgcccttctgggggttgatgctgggaaattaatcacagggaacagtgctgtctgtgaacgacaggccaaacagggtgatgtgagccactgaggttccttgatctgaagaattctacaagaattacacagcaacacagtcctgggtaatgttcagacttgtgggagtattgcaaaaagactagagtccgaagaggctacaggtggcaagactctcacggaggttttcttcctggcctgggcctggatgtggccatgagaatggacgtgaggttaagaggctggagaaacacagcacagtagaaattgaccatacttggttgcttgatgtggacagagaaaaaggagaatgttcaagacaaccccaagttttcaaacctggcagaccagatggccaggtaaacatccagcatctaggaattcatccaaagaaataattgcatcagtgaccaaagatcactggcccctcccctcatgaccctcactgtctgcctgaatggtattgtagcattgtttgtaatagcaaaaatggggagcaacctaaaggtacttcaatagaggtttggctaaataaactgtagtttatctctatagtgggatactatgtggctgttctttcacaaaggtgtgggagccaaggaaagatgcccacatgctgaagtatccatataacatgaagaaaagtacgtgtgtgtacaagcatagggagcagttttcaaagatctatgctgtgggtagacagcaaactatggccagtgggccaaatctgacctgctacctgtttttgtaaataaagtttgtctgggacacggccacattcattcattgacatattgtccatgacagcttttatctacttgtgtagctcacaaagcataaaatatttactatctggtccttgacagtaaaagtttgccagctcatggtctataccaaactgtaaaccatgtctagtagaatcctaataggtttaggggagaggaggggacattttgtctgccttgaatatttctatattatttttttttaaataatgaacatggatttttataatcagaaataaagttcattttggaagggggaaaaaggcgtgcaagacacactacctcatttcgagacttaactataaagctgtagttaacaacacccttattggcataaagatagttgtatagctcaatcatacaaaatagatagtctaagaatagactcagacttgtatggtcaattgattttcaacaaaggtgccaaggtaattcaataagagaggataggcttttcaacaaatggtgttagaaaaattggaaagctaaatggggagatgaaaagaaccttgacctttaccttgcaccataaacaaaaattaatttgctgtggatcatagacataaatgtagaagctaaagctataagacttcttctaaacaatgatttaggggaagattccttgaatcgaatatagaaaaacacaaaccattaagaaggaattgatgcaaatgactatataaaaatttgttttgaaacgttttcttcattgactagtcttaaaaaagaaaataccaaaaagctctttttaagacactgtaaagaaaatgaaaagataagccatagactaggagaaaatatttgcaaaacacatttgtgataaaatactatgtcacagaacatataaaatgctcttactatccaataataatgtcaaaccaatttaaaaatgggcaaaagatttgaataaacacttcattaaagaagataagctgtggcaaatcagtacatgaacagatgctcacatcattagtcattaggaaatgctaattaaaacctcaataagaggttttaagtggtatcaataagataccactaaatacctattaagatggctaaaattaaaaagactggtattactaagtgctggtgaggacacaggatgactgacagtttcatacattgctgctggtggggatgggaaatgctatagcaactttggagaacagtgggacaatttcttctaaagttaaacatatgcttcccatatgacccagaaatctctcagccctatgtatgcccaagaaatatgaaaatatatgttagcacaaagaccagcattcctgaaactgggaacagcccagtaccctccctcatctggggaatcaaattgtgatacatccatgcaactgaatactactcagggacaaaaaggaatgaaatattaacactcaaagaaacatggatgaatctcaaaagcagtgtgctgagtgaaagaagtcagatggaatagaatataaaaaacacaaaccattaagaaagaattgatgcaaaggactatgtaaaaatttgtttttacatactgtaggatactgcatactgtaggattccacttatatggctttccggaaaaaagtgaatctatttggacagaaaacagacccctggtttccagaggcttggaatgaggggagaagattgaccacaagaagcacaaaatacctttcgtggggatggaaagggtctatatcttgattgtggaagaggacatgtgactgtttcattttgtcagaattcatctaatggcacatttttaaagggcaaattttattatgcctaaggtgtacctcaataaatctaacttttaaaatatataatctggaggaagaacaaactgaaaaaaaatacttctaaaaaaattgcaaggtaggagtttttcaaagggatgaggaagagtcagtttgaagggcaatgaatattccagaacaggaattctggacttaggaggtcaggctgggccaggcacggtggctcacacctgtagtcccagcactttgggatgctgaggtgggtggatcacttgaggtcaggagttcaagactggcctggccatcatagtgaaaccccatctctactaagtatataaaattagccaggcatggtgggtgtcatgcgcttataatcccagttactcgtgaggctgaggcaggagaatcacttgaacccaggaggtggaggttgcagtgagccaagatcgtgcagtagccaagattgtgccactgcactccagcctgggagacagagtgagactccatctcaaaaaaaaaaaagaggtcaggctggaggcattggaagctgtcctcagggactcatgagtcagtaaggggtctccaagtgagcatgaaacagtgaggcctgaaccccaagaagcacctacagggagagaaggacaggaaacaataaaggaactgagccaggtgcagtggcacatgctgcaatcccagctactcagaggcttaggtggcaggatcgcttgagcctaagagttcaagaccagcctgggcagcatagcaagaccttatgtctaaaaataaaaataaagaaactgagatgcaccatcagcctgggcaagtcttaaaggaagaagacagagtgcttatttttttaatagataatacagaacaaatgctacaaagtaggaaggagtaaacaataaaaagtaaatctccctctccacaagcatctattccccttcctggaagctcccagtgttactggttatattgtgtctttccagatatattctatacattctctactgaactttgcttttttccccttatttatatatccttctcatggttccatatcagtatatgtagaggttccctaattttaaaaataggtacaagattgtacggatacaccataatttatttagccaggctgcaactgataaacatttggattgtttctgatatatcttgctgttatgaaccatgctttcatgaatgctcattttgtttgttggttttttagagacagggtctcgctctgtcactcaggctggagcatagtggcatggtcatagctcgctgcagcctcaaactcctgggttcaagagatcttccttcttagcctcctgagtagctgggactacaggcacatgccactacgcccagctaatttactaaattattacatttttattttttgcagagacagggtctccctatgttgcccaggctggtctcgagctcctggactcaagccatcccccctactttcacctcccaaagagctgggtttacagatatgagtcaccatgcctggccaatctcaaagaatatgcacatttttatattaatatatattattagctcctccaccaccctgggttggtactgacttaccctcccactagccatgcctgcatatataccaggcacgaatatacctgtttgcctgagacctggccagcagtatatgagctcaaactttgcttctgccaatctgataggcgaaaaatggtatccggtaggaaatttaatttgcatctggaggaggggatttttttggaagtgaaagaacaccaagtcacaagtgtcagctgcttgagtgcctttgctggtccagacagcacctctgagtgaattagttaaaggtactcctcctcaagacacttggctgccatctgctagaaggctgtcgtgataactaaacaaatatgtaatgactttgaggtgaagagcacccctggagttgtacaaaacacagcctgcttctccacaggcagctgtggagctactggcagtcttgatagaacagcagtttctaggtagtgaccagattgcctggaattagtacagtcgaagcggcacgtacaggacaagaattcaagatgcttgacagtggagcacaagggcattagcttgagggacagccagaataaatggaaacttcattatccatggattatgcacttggaacttaggtcctaggcaactctgatattagtaatttggccagcaggctcattaagctcttaagaaaagtgggcctagttaatgaattaacacaagatgacattttacacacagcaaaaacgagagcaggcaccactgagttatgcaacatcataatttctcaggcaaatgtgatcgctgcgtctcgcctgccaaagtgaagagaggtctgaagagagcctgctttcggagacataagtgagcccattaagttccacaggcattttatatcccatgcattttaaagggctcccacttgtattcttaaaacctcacgtgtttacacagaagtcagcgttttaaaatctctggaccatttgttttctgtgtgacagtttacccactttcctcctttaagaaatacatttcactggccaggagtggtgactcacgcctgtaatcccaacactttggaaggcagagatggatagattacttgagcccaggagttcaagaccagcctgggcaacatagggagactccgtctttacaaaatatgcaaacattagctaggttgtgtgacgcacccttgtagtcccagccactgagacgggaaggtggctcgagcccaggaggttgaagctgttgaaccaagatcgcgccactgcactccagcttgggcaacagagtgataccttgtctcaaaaaatacatattaaacattaaaaaggaataaaaaataaaaaaaatacatctcactggaatggaactcagtctgttcatatcttctccccagccccatcccccagaggtggctcccccagctttctacccccagttgcgagaagttggtgaggataatggtaagaacagcaacactaaaatctagtgttcattagtgagggatgatgaaaaattctggagctggatagtggtgatggatgcactataacatgtgtgaacgttaataatgtgtatgaatgttaagcgccactgaactgtgcactttaaaatggttacagtggtaaattttatgttatgtctattttatcattattatataattatatattatataattatataataataattattattttgttgtagtggtggttgttacaagaaagaactagcatgactgaggcaaacccttgccaggcactgtgctcagcacttgtgtatatgttatactctaccatctggatagtccagggagacacggatactgttgtttacccaggaccaccaccatttcacagacgaggagggtgaggcttctaagagttaagtgactcacttgagctcaaacagctagaagcagtggctccaggattcccccaaggctcctaactctacagctctccctgctagataataaaataaagaagttattttagtttaagccagaattctgaaacatacacatacacaagcctccacccagcttctaattgtctcactgagaacagacaaaactccagtagaatccttgaatgacagctaattgtctccagaaaaaatccaaaattgcctccctcccttaattgtagtgcagcatgattctgtttttctgctgggcccctatttgcttctttctgtgcaatgaatcattgaaagagtgaccaccacggacttggagaatctttgtagcttttagtctgtgtttgggtgtggctggagagacaaattaacacacagagccggaccttgaaggggaaggtcctcatttgtctcagattgggatcatttggggaatcagaaaatgtttatatcagaaaagaagagaagtcaatgtgtttcgcaggtttgtggttttttgaaggagaaacatctagattctagtcctgttcctctgcctccttcttaggtgatgttagacaaaataattcacctctctgagtcaatttgcttatctgaaaaatagcaataacaacagcactcattttactagggcatgtgaataaacagatttttttcccattgagtggcaggtatttattgagtgcctactatgtgccaggcaccatcctactctctggggatacagcagtgaacaaaacagacgcacacctagtgatgagggatggagtaaagcccttagccgatgccaggacagaggacatgagtcacctgtagtcgctgccactgctgctatttcatggctacattttgacccctgtggacccactgaaacctcctcactgcctcacaggcagaacaaggacagggtcttggccaccaagtttactcacttgagctgcatttagattattcttccagctaggccatgacagtaggtagtggcagctctctgtaaagatgaggggtccccagctcggacccctggtttcctccacctgcctggaccttacagtggtagccaggtgtgtcctgctgactgggaagctccttacctgggtgcttgaagtatggctccttagcatgtgtggagagaaggctattatgatagcaacctgcaggggtgggatgtgtaccagaccttcaccctggaactcccgaggaagtgcctgcagattgcctggcaggtcttattcgggtgatgtagagcagaacgctggggccaggttctgaagtcagacccctggactcaactcacgcacaactccttacctccaaactgtgtggccttggtcaggggaactgacttctctgagcttcattttcttcatcttaaaaaaaaaaggagaatcacaccacctaccccatggagttgttatgaggcagagagatgtgatataaagcatgtacttggccaggcacagtggctcacgcctgtaatcccagcactttgggaggccgaggcagttggatcacttgaggtcaagagttcgagaccagcctggccaacatggttgaaaccccatctctaaaacactaaaagtagctgagcatggtggcacacacctgtagtcccagctacttgggaggctgaggtgagagaattgcttgaacccaggaggcggaggttgagtgcaccgagattgtgccactgcactccagcctgggtgacagagcgagaccctgtctcaaataaataaataaataaataaataaataatgaatcatgtacttgtatgtaccgaacacatgcacttacagagcataacgtatagctatgttcaggggcctgatgagtattgactcatttcaggctcacagaagccccaagaactgggcactattacatctccattttgcagcccagagagggtaacacttccaaagggcacacagcaagcaagttttgaggggctgggatttgagcccaggagttcctgctgttagcctgggctgtgctggctctccatcccaaaagctccatgtgaagcctggcttgaaataaatgatttgcaggtatgaggaccccagaggtactacctgtgttcctgaggtgtgttatacatttctactaaagaacggatttctgctacaagaactctcactcctgttccctggatagcatatgatactttttaaaacaacttaattgagatattatttgcagtacttaaaatttgcccattttaagtttacagttcagtgattttgcgggggggaaatttaccaatttgtgcaaccatcaccataaaccagtttcgggacattcccgtcaccccaacaagattcctcatacccattgactgttaatccccattctctttcccactccaggcaaccactaatctactttctgtctctgtaaaattgcctttcctggaaattttgtatatacagaatcttacaatatgtgatcttttgtgtctggcttagttcactgcatcatgtttttgaggtccatccatgcagtagcatgtatcagtatttattaactttttatggctgaataatattcctttgggtggatgtaccacgttttgtttatccgttcatcggttggtggacatttgggcggtttccactttttggctattgtgaatagggctactgtgaacattcgcatgcaagttctggggctgatgttgaaacacaaagattagccaaactggtaaccttctctcttttctctcctctcttgggtttctcagaacccggcagtgggcaggtgtttgtgacttcagagaaccaacttgtgtattaccccagcatcacctatgccatcatcggcagctccgtcatttttgtgctggtggtggccctgctggcactggtcttgcaccaccagcggaagcggaacaacctcatgacgctgcccgtgcaccggctgcagcaccctgtgctgctgtcccgcctggtggtcctggaccacccccaccactgcaacgtcacctacaacgtcaataatggcatccagtatgtggccagccaggcggagcagaatgcgtcggaagtaggctccccaccctcctactccgaggccttgctggaccagaggtgtgtgctggatggaagagattgaggcgggagaggtcatccattgcggggaggggaataggtgcacacactgaggttcttaggtcttgccaagagcctggcttcagctgctataggcagtggcagcatctgacatttgccgagtcctcgcaaaattctctacatgtatcacctcatttaatcctcttagcacctcgctgagggaggaaactgataggaatgttccaaaactggattatggtgatagttgcacaaatcaggaaatttccaaattctacagatgaggaaactgaggctctgggatgttaaatgacttgtctgaggaacatacagttaggatcctggcctgctcctcctgggaatgtcacgctggtccatgttctggccacagactagctctgagcctcacctgctactgcagagcagtgcccagtacatgtgagaggtttggttaatatctgtcaaatgaatggataaatgaagaagtgaatgaatgagagaatcagtgagttccttaactttgcttggcttcatctataaaataaaggaggtggaaaggagcactttcaagcttttttaagcagtaccacattgcaaatggaattgtacaagaactcccagtatgtataaagccaggaagcagagttctgtagttgaagcaagcagtgggcccgtttcctgatcagcatccctcttcctcaagctctgccgtgtatggcattagacattttgctggccgtgttctgatggtgactgggctcttccttggaccctcttccatggcagctcttacattattgaatcttcgttttccttcctcatagaaggtgaataaagtttcagaggtcaggggagaggatggcgcttaaggatctctttgcaaataagtgtaagaattcaggaccttcctcacctaataaagttcccactcataacctcttcatttggaccacccagcatagggtaaggttaaaattgctgaatctggaaacagaatgcgtgggttcaaatcccagcattgctgtttaccagttatttctgatgctgggccagacattgaatgtccctgtgcctcagtttcctcaccagagcaacaggcatgaaagtaatgcccacctcccagcattcttgtgagcattaaataaggtaaggaatgtaaggggcatggcaaagtgcctggctcatgagaagccttcagtaaatgagagctagaaaataaaatgtcttttctgttaaattcattccttttaagccccttctgccgatacagaccgaggtgttgagaggatgtcctctcaccccagttcatagccaggaagagttggctttcaatagaaatgccaattccatgttcccatcagaggcccagtcaagataccagcccagcctcttggccacagggcttttggctgatggagcagagtggcaatgccaaaccacccaggttgagccgagggacttggtgggcgacctcattctggttctacccagaggatgtggttttggcaccgtccggtcaacaccaaccagccagaacacactggccttttctgttccgatgtggttcctggtccttgaattaattgtctttgtacttggagggaaaaatctcatttcgcactggaaacactgtctcagaaatgggctgaagttggcttatcttggccctaatgtgttctcttctcttcctgtctccattgcccctgcccccctgctgtccccatcacaggcctgcgtggtatgaccttcctccaccgccctactcttctgacacggaatctctgaaccaagccgacctgcccccctaccgctcccggtccgggagtgccaacagtgccagctcccaggcagccagcagcctcctgagcgtggaagacaccagccacagcccggggcagcctggcccccaggagggcactgctgagcccagggactctgagcccagccagggcactgaagaagtataagtcccagttattccaaagtccatatgggttaatctgctctgacttgttgccattctaacaatttgtgctcatgggaagctctttaagcacctgtaagggtgtctcaagttacagtttgggatattaactatctctgcattcccctcctcccccagacttcagagatgtttttctggcgtctcagttgacatgatctgttgtgcgtcttttctgtcaggtcactcttcccttgggacccgagatcacaccctcatttttcacattattctgtttctgttggagagacagcatataaaacagtattgaaataggctgggagagagcaatgtttctgtgctatattggatgctcagaagtgcaggagacgctggacccaattctctctgctgggtagttaccttatagcatttggggatttgggttagatgatctaaccaggaggccatcactggatggtcacccccccaaaaaaattccatttgagcatcaaaacctgctttgcacaatcctatttgatgcccccagttcagcagagtcagtggccaaagaaaactttggacgtgagtaacacccttcagcagtcgcaacgttattttggttttgtgaaggactctgaaaccatctaccctgtataaattctggctttagaaatttgcccaagaatgctcattctgagagctttcctcagcagcatatatcatcagcctcatcctaaaataggcagggagcccctcccatgagtttatccaagttctcagctcctaaaatgcaggctgccaagaccctacacctgccctggctctacagccacttacctggtttctggactgtcaccctcccagctgacctgcccgtagccaaggaatgaggacctaacttgagttggcccaaagtctgacctggctgtatgtccctgtggcccacacccagcctgtcttgctcattcatgcagcctcaacactggcctccaaagttcccttaacacttgcaaagtcctttttacctgtgcatttggacttgaggacactggtttctatcacaggtgagagccatgttcaatacctccagcaagctctcctggctccctgcactgtgcacgctcctcttcccaaggtcccaataccagcacctctagttagagttagggtcagggtcaggcctctcccaacatcccagtagtttctcctctgagacacatgggcaagagacaatttggagtcaagattttccatttggatctattttaaatcttttagaaatgcatttgaaacagtgtgtttgttttttcccttctagttaagggactatttatatgtgtataggaaagctgtctctttttttgtttttcctttaacaaggtccaaagaaagatgcaaaaggagatcacacccttgccccgctgagccccgtgataacaagtcactccagactaacctgtgtgccagacatttgtgcattgttgcactttgaggttattatttatcaagttcttgaaggaagcagaaagagggactcctctctccctccgtgtatagtctctatgtttgtgctagtttttcttttttttctctgtgtccagtcagccacagggcccgcctccctgcaggaataaggggtaaaacgttaggtgttgtttggcaagaaaccacactgactgatgaggggtaaaatggaaccaggtagagccactccgggcagctgtcacccattcagaacttctttccgcagctgaagaaatgttcagtaacctgtttgacgctaattaaaacagagcctgcaggaagtggggctaaagtggcattcagtgatcctgttctgtagacttttctttctttttttaaccaaatccaaaggatgttacagaaaagctagccactggtattttgttttgtttaaaaaaaaaaagaaagaaagaaagaaagaaaaacggaaaggaacctagctgcctgtatctttcatttttaaaatagcacttgagttattttctgagtaatccaataaagaacttttgatgacagccagaatgtgttagaactctggctgaacatttcatctcctgtgagtcagaagggctttatttctccctttgatggggccccttcttctttctggtgctctggaagttgtttagaggaaagaattctaattttaattaattgcgcagtgagttaatctcactcgcttttctgcttccaggcatcttaggaaaaacaaatggttttagtagataagggatgcctactaatgcttttttaaaacaaacagggacatttttattatagatttgatttttttaatgaatgtttttaaaaatatataaataggacaccaaagcggcagggtttttttgggggggagggggtttgttttccaactcaagatggcacattagtggccagcaatattttttaactcattccaaccaggaagcttttttatacattgcctaaatctacgccaaccagaaaatagtctcatctctttttttctcaaatgagatccgtgttttattttagcattaaattagttacactgtgatgactggcctattacctgactcagctccctctaccttgaaattgacatttttaaaaaatgcaactaagtggttaatagtgtgtgacgctcaaagttaatgtaaactggaaaggttgtgtgtcgttgctttttgtgttttggttaggcttggttttgttttttaatttttatactttctaataaatttgcagtttcattctt

SEQ ID NO: 318 - DNA, 83301 bp, Homo sapiens
  source 1..83301: mol_type = genomic DNA; note = NC_000009.12:132161234-132244534 NTNG2 [organism=Homo sapiens] [GeneID=84628] [chromosome=9]
gggtggcagcacttcacagagagagaccgaggagcagccctgagcccttggctgtggggggtgggggaactgactcacttggcccccctccctcgtgccgatggggcagcccccacacccatgggcgctggcaccccggcaggcccccgggttttggaagaggaagctgcagcccggctgcgcctgaccggagccggctgaggatgcgctctgggcgcagggacccgctggcccccgggccgggaggcgatgtttaggcagcgaccccccagaggctgccggggccaccctggccacgggcccgccgggacgcccctgctcgccgcgcccctccccgggccgtggcgcgtcccccgagccgcgcaatatttccttcctgcacctttaagaagaccgttgctccgtggtgggatggtgtgttaaagccacacagaggaagttacgcagcccggatcagaccgagagataaaagccccgatggtgatcgtgagtgatggcaagaggatttagcctcggcattaacttggagcggagtgcaggggggcagtgaagcgcccgccatctggcccgcgccgcgccggggggatgccccggctccccgacgagacgccgcgaagcccacccgggccgggggctgcccggcgcccgagcgcgggtcctccccgggccgcccaggggggccaaaaagtttgcacttgttagcggcgacctcccgctcagcccgggcgggcgatgcgggcggcgcgggcggccccctcccccggcccgcgtctccgggacggctgcgggcggcccccccggcggccggagggctccctggccccgatctgacggcggcggcggcggcggccacagcggcgggagcggcgcggggaaggagcagcggctcgcagccctcggcccgcgcccccacccagcgccagcccgaggggggaggcgcagcgccggagggtggcggtcctcggccctcccaggtctccgcgccgggaagccgctccgagccggggtaaggcgggcggggagagcccgggaggcgggcggggggagaggctgcagcttggccaggccggtttcatttttaaagggcttcggtgaccatgcaggcttgcccgggcccgggagccacttacagcggcccggcaaaggctcggatgcaaaagttgtttggtggcggctgctacgagctgagaactggagtcgccccagaggggtgtgtgagggtgcgttcttagcagcatcttaaaggggtagcttgtctttctggccagcttcccccgggtcctttccgtcgtgtgtgtgagagtgtgtgtgtgtgtgtgtgtgagagagagacagagtgtgtgtgtgtgtgtgtgtgtgtgtgtgtgtgtgtgtgtgtgtgtgtcggggagggatgttgcaaggatgctcggatgtgtctcggaaaaggaaactaaccctgctcccgcgcctctcccccaccccaattccaccgccaccgcttagagccacccccatcccgtgccctcccatctctctgcaaactgggagcctgtgagttgcacagagaaactcccggccagtccggctggaaacttctcccggcgccgggagggggtcgggaggtgagggggcgcaggcactggtttggggccggcgtggagtcgaacctggaactgagcggcgcgcaggtggggggagcagaggcggcgggaaggcgggaagagaggaccgcgggctcgcggggtccgcccgctccggagtaagttggccgtctgggctgggggcggcggcggccgggtcgccacaggcggcagcgccggggcaaaggatacagccagttcctgggcgccctgctctgtgtcttttaattaagagaggcagtgccgaaaaagggggcgcctcagtcccggccgggcctttattacgggcttaattattaattgctgccgtggcttgcacgcaactttgggaagacgaaaagcagctgcggggctgccgggtcgtcggtgtcctaggcacagggctcgcagccggcccgaagcactgactcgaccctggccccggcctcgaccccgcccgcggcccgccgggacccacccgggagctgctgctcgcgccccgcctcccgcgcccaactttccagggctcccgcgggcggggacccaggggccggataaagggcccgctccggagcggggggacacccgggccgccggaattaagaggcccgccgaggctacagtgagcgcggggcgcccgctggaccccgcccggggcagaggacgggaaggtgaccccgccggccaagctccctttccctcccggcaaccgccactctcccctgaaagcagatttcacccccctctgccgcccctgccgaggagggagagggaaccccggggtgggctgagtatcccccctagccccgggagcccccagcgccctccctcccgtgcccccaggggccccgcgcccgccgcggcaagtttcccacacggcgagggcgcagcaggcaactccaagaggaacctgctggcgagcccagccagctcgggaggcgctaattcaataagacagagaaatctgagttcagaaatcctgataaaatctaattttcgagttttaataccctggctatcagccccccttggttcctgaggactcttaaaagaaaataaagcacattgattctatttgtttctgggagctgcagtttcttaataatatcaggtgaagataaattttccacggagaaaacgatcctccgggatgcagcttcttactctgaaaatttccctgccgactcctcactctctgcgctcctcctcgttatccggggactcctgcctctcttcccccttctcttttttctttttggcagaacccgcctgcaatattcgtgtgctgagctcgtaattccccctgcgatgccagcaacgcccaattgattgactagttgtaaacacatttttcccctggcagattttgttgttgttagggttttttaaatttatttattttccagggaatgcgtggcatttaaaccaacaggactgcaattaatagatttgcgagttgcgccgcgcgcgccgctcgccccagcctcccggcctccgggcctcgctgcctccccgcgcccggcggcgtccagcgccctgcaagccccgagcagccgcgggtcctgcagctgaaggaaggttgcagctgcgccctccttgcaagccgcagcccggcgtcctggttgtcccagcagccaggagatccctacctgttagtgaacagttaggagtcgactgctggaagaattaattaggaacgtgctgtgctctgggcagcgcgagctcgggtagaggcatccaaacctttgccggcggcgctattttatttttactacattttctcaggttgcaaaaatagacaccgggcacgttctgtcttagagttttctagcaaggagcgccttcaaggccaggcaggctctgtaacaggttcccctttaaacagccagaggtgagacggggaaaatggtcctggctgggttctcgttcatctccatcagcagtccttcacccagagagaggggcaggggtcgccctaactcagatgaatgagtcccatgcctggagccctggggccctggctgggggctgctccgagcctgaggtgctcagggcgctcagggcagcaagtgtccgccacttcggtttgtcatttttggcaggagcgtttttctgtctgggtggagaatggagtttcacggaaacacagttaactcttcaggggccttgcaagtacaggaggtgaagaggatgtcaggggagagccaggtccagactggacatttggggtggtttgggaaatcaaatgcaatcatcgaagacatattaaccagaataattaatcatgcaggcacttttttactgcagtaacctttgccctattggccaatatttttggccagaatcccatgctggctggacttggattctccgggtgacgtatccagtgtctggaacacaccacagtactgcagtcgtgttatttcccaatgtaacattcatgtaactggtatctattttgatataatatattaattatatctattttgattttaaataattaacagaagcttaaaatagcacagcaataatcgtaattgtaacccatttatagacctaccctctaagaatgatttgcaaaatgctggccttgatcagaaaaatctgaactcacaaagcattgttacctctttggcagtcttcaatatccctagtttcttacagttaaaaaaaattaaatttgccatttcagattgtgcctatgattggggggctgtttctcagtgcctggctcttcatggttggccagcacgtggagcactctgttcatctgtacatataggtatgggtccatctgcacctatagttacatgctcatctttgcctttaacaactttgacattctgacttgacagtcatggtattttaaagcaaccattaaatcttggctcctggggatgcttttgaaagtctctgacccccaagccggggcacttctgctgaactaacactcccataaatgagaaaaaaatgcatcaccttttaaataacatgcccgatctccaaatgtgcaactctgatattaataaaaataacccagttttctcgggagactttgctaatgcagcctcattttttgcacattttgccggagagcttttgttcttatacgtctctattctccccctctttaatttgttgcaggtgttgttgctaatgagctctctctctctcctcccctcttacaatgaaagacaagtcagaccccaggtacctggatggattgagagctgagatctcagaaacttcataataagttgccgatggctaccagccaaggtcagctgggccccattagtgccggcccccaccaaagcagaaccaaatagccttctccccagtgaacacctcagtagcttttcattctagtccagtcacacagctgttgccaccttaagctcatatgaaagaaatctcttttattggtctgagaacccaagtccagtcccaaagagggaacatgtttccagctaacatgcccacctcctgattttattttatctttacaacgcaggctggagggttgttttgccgttgtgttgagcacgtcacccattaagagccctttaaagacctggattgattggaaggacaaaaattaaaagcaatctgatccagcctcatgcaggatccctgcggattttctccttatcccatttccatccactgtcacaatttgagaatctgcctgatttgatcagattcacctccaggggaggtgtgataccagggttaggaggacgtgaagttatgggcaactttctgatctgtccatcagcagtctgagaaacgctggctctgaattttccgtgtcggccttttggaaacaacaagttcctcgctgtttgcaaagcttcagtgctcgggtccctgggacaccccggccaccctcgcctggtagatgtggcatttccatgctgaggccgcgagtcccgcctgaccccgtcgctgcctctccagggcttctctgggccgcgcctctgcagactgcgcagccatgctgcatctgctggcgctcttcctgcactgcctccctctggcctctggggactatgacatctgcaaatcctgggtgaccacagatgagggccccacctgggagttctacgcctgccagcccaaggtgatgcgcctgaaggactacgtcaaggtgaaggtggagccctcaggcatcacatgtggagacccccctgagaggttctgctcccatgtaagtccacttactgctcttttgtttgcccaggccaagtgggaggaggtctggaggagatccttggggtggacgagcagagctggaggactgagatgcaaggctgactttcctgcctcttgaccaggtctggaccagacctggaccaggtctttgtcccaccttggaaatgtgtcaaaacagaggacaccctgaggacactggggtcatgtgacattgttctctggggtaggggcattctcggccagctggccactagttcagttccctcgggaagcctatagtattcagctccgcagccttcaggctaagccccacctcctgtgtaggaagtcagcattctgggcgagtgagcaagatgctacctgcaacatgatactgtaagctccctctgttcatcctttctgtggtgcaacctcttagcccactcaatccaatccagcagacggtaccatgaagctagagcatgccaagcactgagctggccctttgcatggggaggtttgacggaggctcagaggggattcacgcaggatgaagttgggggttaagctgggacagacagtgcagcttgggtccccttccacttccattcctacatgcaatgatggcagcccctgggtaagtcgggggaaggcagacattcaggcgttgtcccttgcctccctagctagagaaggaggggtcctaggggcacggagtacttcagtactcaagtaatgttaacagcaacaacaacagcagagatggttgcgtgcgagctgtctgagtgtgtgggccgagcctgatgccattgcgaggagtcctcccctcagctagccaggtggattctgtgttgtataaagcaggagcgtcaggggagggctctggcccagtgacgtctgtgggcttctgttctgtcatctgcaaaatgggcacactaagagcacacactcctagggtcattgtgaggagtttgtggtttaattaacgtaggtaaagtgttcggaataggacctggcacagagtaagtgcacgcagatgttagccgttgtcattctggtcatacaggtggggtaactgaggcagcccaggggtgacgggtaaaggcatctggccaaggtcacactccaggaggtggcgaagctgtgattccagcttagagtggctccaatgtctctgagctaagctgcttcccactgggcagtgctccggaggccgtccctggcagggcagggcagagctgggtagggcagccaggctgcagaagctcacaggaggggcttgatgccatcccccaggcagctggtacctctgcgtgtccttggaggagcctccaggtctctgggtttgtggtggggctgacccggtgcccccacctcagagtcctgaggacttgatctcatgggccggctctgctcacatcacagggcagtcagcctgagaaggtagcttcttactcaggcttgtcagtggtgatgaggctgtcactgtgggtggtggctgggccagggccagctggggagagagagagggagggagagagggaaggagaaggcggcacgaagccaggagctggggctggatagtctgtggccataactgccccggggaccgcagggccaagcaagggggctgggctctggaagccaggaggaaggccaggataggggctggtactcagtccacatctcaaagccggtgggagggttctccacacgctctcgggcacggtcaacctctgtctctcgtattagagtctcgactgtattttctctcttaaatattaatcactgccttaacgtgcttgggggagcagctaaatcataattctaggaccagctttgggtcgagggcttgaggtggggagatgaccctcagagtcaagtccgaggccctctccttgccaaagctgtctagggtgtcattggccctggacctctgccctgcccccaccctcagacagagaacccagtgcagtgggcggctgttctggggaggtggtcacccctcccagtcccagtgccggcagagcctcatcccaggcagccagcctcaagccctggggtctagaagagtgctctctcccatccccatcccctgctcctctcctgggcagacaggtggggaaggcaggggagaaagaacagtccctccacaatctcccacatgggcaagtcctcggcgtctcgccacctgtgtgatggacttaaatatttcatcatgggctgccatccagctctgctttgattacaaatgtgtgtccgatgaggacggggaggccgccgtggcaggtggacggcagccttttgcagggctggcttttggagggctggctttggagggctggcttttggaggggtggtttttggagggggtggttacttctagatagatctgggttcaaaccctgatgccacagtttattgtggcttcccctgggagggtccgggcagtaggatgctctgaggtaggtcctactctaatctcatttttgggaatagaaagtgttgcctaaatcctgccaacatcactccgttgagaaggcaggctgggaactgcctgtagccaaggcccatgcccacccaccaggcggcacagcctcccctctctccacttctgacctctctgagtttcactgtcttcctctgcccagtagaaaccataatgtaggagtgtcacggtgctggcgggacggcacagcccggccgtgctgccgtggtacgtgcggacacatagtaggtactcagtgtgcaatactagtcaccagcttatcactgttgtgattatggcctcggtgattttcctggctttgcttcttccccgggctcctttgcctctccccagccttggggacgccacgccttgtattgctagtctctggcagcatgtggaagatgcaggctgggggagcttcctcgcctgcagccccagcagctgttgttaaccagccaccagggggcgccctaatggcggccagatgcccactgcccccttagccttgccatcgcccatgggtccttgctccccttcgccccttcagtggcaggtgctacgtgtgtcccaacatccagcccacgggagcgcaagcccggctgcactccgagggtacaggagggacccaggggcggacggccttttcagatgcggggtgcagaccctctctctttcccaggcttcctgtccttcagcaaggccacctgagaactgaattgtaaattccagccttgcaaggaaggggaggaggctgaaagacaagataaatgaataaataaaaacctattggctctaaatgcacaatgagaattaatagggatgagctctcaacagaggattcttgggcgaggacaaaattgcaatgagggctgtgggagaagagaggcggcccccacccacattcccagggcctgcccctgaggtcagcccagcaaggctgcaggccgagaaggaggcaggaagggcgacgggcaaaggcatctcagcccctcacagggcaactgctgcttgcaggacccttggagatggggagggcgtgactggcattgggaggtgccccttagcgctctgcaagacacgtctcccgccagccacctgtggtccccgtgagaggaagggggaaacccttcctttgtgccttggagacaaaaactagccacccgagactcaggggtgagctgacgagcaggtgagagagagagagagaactactgcccaggcagcagggtgccaagggaatcctgccactcccactcagagcaatcgcctcagtgcagcagcgctgacctcaccttgatagaggtgcagaatcccagaccctgccccacaactgccgagccagactctgccttttaacaggaagtctctggagcgctggggtggggttggtccaggatggtggatgaagcctgccgttgacgaaggggccagaggtctgtgggtcccatggggtctgtgcaggttaagaggagaggcattgctgaggggagacaggagccaacaggagagcactagggggtcctgggaatggagggatggagctgggagccgagattcccagatgcgggccttgcttgccaaggcggggggtctgtgcttctgagcaggagccagtggaaggttccagagagaggcagcactacctcctgacaagagctacaggcctagaatctgaagccctgagctcacatcccagtgttgtcacttgggggctgggtggtctgaggtgagtcattcaaattctccaagcctcagtttccctatctgtaaaaggggtatgatcttcactgccttgcccacctcaccgacttcctgggagaggaaacgcctctcacaacataacagaaggtgcttggcagagactgtaagttcttttctagtgtgaggcttgaatattattgtttatccaatcttgataagcttgacatttctacattgacatgggtgaacattcaaatttcagccatgttggagtctccagcatacagaggcaccttggctttggtggacaggaaagccaagggcaggctgtgaacgtgcatctttgaacacacatcttactcagttagaacctgctttagcttctctgtgcctcagtttacccagctgcagagcaaatggttccattcctcccccagggggtctgctgggctgttgaatgcagacagcaggcaggtcctggagtccttgagccactcctcactgtgacattgaacaccacatgcagaatcaaggtcacagacactctgcctcctgccagaccttgaggatcatgaaatgtttccatccaacaatgcagagctgaccggcccgatggctctggcctccttccccctctgtgtttctggccccagcctccctcctctcgccgtcacaaccctccagtcggcagatgtttccaggtatgacctcatgccaggcacagttgtgatgggaaagtgagatgactagagataaattaagtgaaaaacaagagaaaaacactacagacattgaagacaatacccagctaaccacaaatggtgacaccggggcctgatatgataggagctggggaaggaggagggcgtgcccctccccatgaactctccgggcgctccagccttggcccgtgctgtctcctccacccgaatgcctgccccctccttcctttcttttcaaggcttccgcttctacctggataaccctggctcctttttcaaggttcaggttggaccctacctcctcctccaggaggccttctctgactcctttgcccagtggggtgaggaggccctcatttggtcatcatcctgcttactgactggcctatcagtgaagagttctggccctaggaatggagagtttagaatcccgtgctgtgtgatctctgatgtgagacctaacctctctgaaccttagtttctcaatgggagctattaatagaacgtgcataggagactgtcatgagcacggtgcttggcacatagtagttgctcactgcgtgctggctgttgggaccaattctgtaactttagatgtctgcttttcccctggactgtgagctcctcaaaggcagggctgtctcgctatctttgcatccccagcacctccctctggacttgatcagtgcccagtaagcatttcctgaatgaatggatgcatgggaggaagcatggtgtgatccaggaacgcttctcagaggaggcaggatcagggctgtattttttttttttttttttttttttggagtcaaagtctcgctctgtcgcccaggctggagtgcagcggcgcaatctcggctcgctgcaagctctgcctcctgggttcacgccattctcctgcctcagcctccccagtagctgggactacaggcacctgccaccacgccaggctaattttttgtatttttagtagagacggggtttcactgtgttagccaggatggtctcgatctcctgacctcgtgatccacccacctcagcctcccaaagtgctgggattacaggagtgagccactgcacttggccagggctgagtcttgaaggaaaaactggggtttgggtcaggacagaggagaccctggaagcccctgcttctctccactgcagtccctgttctgtgggatttgcgattggatgaagccgggaggtttgcacaactctgtccttaagtcagttgcaagtgacttcggcacctgagctgcaccagccgttaaagccactcagtctcttgaaatgcccgaggcagggcccagcctaggacaagaatagttctgtgaaatgacatcttgttgcacagtgaagtctccctcctgggcagtagacaatgagaagaccgaggcccggggcccagggagtgagacccttgcttctgacttcccttgagggaatgaggttgggtccagacaccccgtggaaggcaggcagctgtgtgaaagggcccagatgggacatctttccaaagaatgtcagagacttagagacccccagacctttccggtctgcgcatccccaccttcccaggctgtcttcctctatgcttcctaactctgatgtttaatccatttccctttttctcatttactgtgggtataatgacaagctgcctccaatcccacctgcgatggggcaggcagtggatggatggacagacgaacggacagacaggcaggccgcaccatgctgcggatgagacggatggatggacagacggacagacaggcaggagcaccatgctgcggatgagatggatggacggacgaacggagaggcaggcaggtcgaaccatactgcggatgagacggacggacggacagacaggcaggccacaccatgctgcggatgagatggatggatggacagacggacagacaggcaggccgcaccatgctgcggatgagatggacggacggacggacagatggacagacaggcaggagcaccatgctgcggatgagatggatggacagacgaacagacaggcaggcaggtcgaaccatgctacggatgagacggacggatggacggacaggcaggcaggccacaccatgctgcggatgagatggacagacggacagacggacagataggcaggccgcaccatgctgcggatgagatggacagacggacagataggcaggccgcaccatgctgcggatgagacggacggacggacaggcaggtcgaaccatgctgcagattagacggacagatggacggacggacagacaggcaggccgcaccatgctgtggatgagatggatggatggacagacggacagacaggcaggccgcaccatgctgcggatgagacggacggacggacggacagacagacaggtcgaaccatgctgcagattagacggacagatggacggacggacagacaggcaggccgcaccatgctgcggatgagaacttgggcttctggagggaggagatggggcccgggggcatcccgcacttctgggatgtgggacttgggataagtcccttgtgaccctgagccttggttttctcatctgaaactgggcatggcgctggacacaacctcgaaggacgtgtgtacaaataagacgagaccaggcgtgtgatgacctcagctgggagccagcacaaaaggaatgctcaaaaaaagggccgggtgcacggtggctcaagcctgtaatcccagctctgtgagaggctgaggtgggcggatcacctgaggtcaggagttcaagaacagcctggccaacatggggaaaccccgtctctactaaaaatacaaaaattagccgggtgtggtggcgcgcgcctgtaatcccagctacttgggagtctgaggcaagagaatcacttgaacctgggaggtggggtttgtagtgaactgagatcgtcccactgcactccagcctgggcgacagagcaagactctgtctcaaaaaaaaaaagtgtatttttatttttatcctttttaattctagaatttagcttgagggacagaagaggaccccataggccaaacccacagccagaggcacaggctgtgggctcagaagtgggtcttgcaggatgggaagggtcaggagagtgaggatgtgggcagaaggaatggttcgtgcagagacgcagggaagggggccaggtgattcgaggggaaagtgtgtgggtgacagagaggagacagtccactccccctgcccacctcatccaagcccctgtaggtctgttactgtgcatctgaccggtgaatattctgagacttctcagagcccactgagtgtaggagctggggttcagccttcctgtgtctggctcctgaccgctcgctagggttaggaaggattaggccacaggctctgaaggagcaagaggggcaggagggcaattgaggggcaattgagaggaacccagaacatggaagccctgtgccgtggggctggtccagagctcaccaggctggaccacgtggttgctgagccatggcccctgaccggggctgacctggccagagtccctgtggccagcactgatgcagggctccttcctagaggggccgggccatgaggaacaggagaaacggcagatgatgcgggaaccggtctgttcggctttggtttgcaggatccgatttgtttttcatcagcagcagatttgcttaagtatatgaaaatgtgtttctaattccccgagcacacaccaactgctggcgggggagggagcagtgcataggagcagagtgaatgccaccgggagtcagagtgctaggccctggctgctgagagagcgagaatacgcccccagcctcagtttccccaactgagcagccggggaagatttggctagattaaccagttcattcaatgttccctgctgattgccaggtacattctgggagtttagggaaatccagattggtcagagacaaaaccacacaaaacagtggactccagtgcagacagaggggtcctagatgtataccccgggctcagcatagcaataatcattttaaaaaagattttaaaacatttttaaaactcaggtgaagttcacataacataaaattaaccagttaaacaacgttttggtgggtgcagtggctcacacctataaccccagcactttgggaggccgaggcaggaggatcacttgaggccaagagtttgagaccagcctgggcaatgtagtgagaccccatctctcaaaaaaaaaaagtcttattgtgtctaacataaaacttgccttttaaactattttacaatatacaattcagtacattcacaatgttgtgcaaccagcatctctacttagtcccaacacgtttccatcgccccaatagaaaaccctgcacccgttagttactccccatctccttcccctgcccctgaaaaccacgcgtctactttttgtctccatgaatttagctatgctagacatttcatacgaatggaatcagacaatatgaggctctttgtgatggccttccttcactggcaaaatgtttccaaggtttgtccacattgtcgcatgactcagtgcttcattcctgtttatggctgcataatatgccatcctgtggacacaccatattttgtgtatccgtttcctaactgatggacatttgagctgcttctgctttctggctattaggagtgatactgctgtggacatttgggtctcagtttttgcatgtgtgtatgtcttcatttctcttggctgtctacctaaaagtggagtttctgggtcacaaggtaattctatgtgtaactttttggggagccaccaaactgttttctacaggtgctgcacctcttacgttcccaccagcaatgtacgagaatgccagtttctccgaatccttgtcaacacttgttattttctggttttgttttgtcttattaggatgagcctagtgggtgtggggcagtatcccattatggtcttgatttgcatttccccgatagctaatgatgtcagtgtgcttcttagtcatttttttgtttttgtttttgttgtgtgttgttttgagacagagtctcattctgtcacctgggctggagtgcagtgttgtgatcttggctcactgcaaccttcacctcctgggttcaaatcattcctgcctcagctcccaagtagctgggattacaggtacacaccaccacacccacctaatttttgtgtttttagtagagacagggtttcaccatgttgcccaggctggtctcgaactcctggcctcaaacgatctgcccgcctgggcctcccgaagtgctgggaccacaggcgtgagccaccacgcccagcctattttaaatttaatgaactccaatgtgtgtatttttttcttttgttgcttgtgcttttggtgtcatatctaagaaaccactgctaaatccaaggtcagcagtatttacccccatattttcttctaagacttttatagttttagctcttatatctaggtctttgatccattttgagttaatttttgtatctggtgtaagggaaaaggtctatctttattcttttgcatgtggagatccagtttccccaacactatttgttgaagagcctattcttcccccactaaatgttcttggcaaccttgtcgaaaatcaattgagcataatctatgcacttacttctggactctcaaatctctgggtttttttgtttgtttgtttgtttgttttggagtcagagtcttgctctgtcacccaggctggagtgcagtggtgcgatctcagctcactgcaacctccccctcccgggttcaagcgattctcctgcctcagcctcccaagcagctgggattacaggcactagccagcacgcccagctaatttttgtatttttagtagagatggggtttcactatttggccaggctgatctcgaactcctggactcaagtgatctgcccacctcggcctcccaaagtgctgggattacaggcgtgagccacagcgcctggcctcaaatctattcctctgaagcatcaagcattctatgtgcactacttcatgaaaccctcctggatattctgcactgtagaaacgattactctcctgttgtgcccattttatagatgaggaaactgagactccaaaactgagtgaagtcaaggctcaaactcagatcccagtcatttgatgactaggccacagtgaggcctgaggaggggaaaaatcccaatggttaccctccccttcccctccccaccctcattttcttctccctctttcaggctgggatgtggacttggattctcagagcagggtccttggaaggagatgctgtgacttctctctggcctccaaatacctcctcagcctccagtccacctccgtccctctcccacgcagccaggcactgttctgtcctcttccttgtcccacagtcagtgcttgcatgtagcaggtacttaataaatgctgaagataattatccatcatttcaaatagagacacacaacttagaaggcatgctgggattgtctaaggccagaaaaaccccaatgtcgataagcatgttacagtgaaattgactgcgcccaggaaaggggaccccagaagcaggtggctggtgtccccctaccctgccccaggccccgagttccccaatccaccactaggaagtcctgggctcctgtgaagacaatataaaaccactgattaggccaagtgtggtggctcacacctgtaaatcctagcactctgggaggctgaggcgggcggattgtctgagctcaggagtttgaaaccagccagggtgacatggtgaaaccccatctctactaaaaatacaaaaaaaaaaaaaaaaaaaattagctgggtgtggtggtgcacacctgtagtcccagctactcgggagactgaggcagaagaatttcttgaacctgggaggcggaggcagaggttgcagtgagccgagactgtgccactgcactccagcctgcacaacagagtgagactcggtctcaaaaaaaaaaaaaaaaaaaaactactgatgaggcacatccccccctctcatttcctatgaaggagaaactgaggcccagagggttggagtgacttccttgagccccccatgaggagcttcagaccctggaggctccaccccaggccaagggctctcccagaggtagactggagccatgaggacaggggccctccccaaccaggtctctgtccatctacacgtgccctggatctgacttcacgtgatggcatctggtgggggacacaggatgcctgcccggatgccacctgcagccagtgggggccggagctgcctcttcagggtcagtgagggtgatacatctacttcccagcctgcttaggtgagctcccgcctatgtgtcactactggtgactggcatggctcagagccagatcttgggggccctgaggggatcaagagcgtcccctaagcccatctgccagctgcggtcttctctgtggtggcagcatcacagaaagtggacagaaagagtgctctgtgccaggagggcaaggccgggtaggatggtggctggaatgctggcgatcgcagcaatgccggcgatcatggtgctgggttttggtggtgtgctggacgcctgggagcctcatgagtgagagactggggcacacgtgcttccgtagtgccatgcaccggtggcaattcagagaaagacgctgtgcaaagcaccccatgtgtgcagctttttgccctctcgtaacaggacggagccaggtcagagtgcagatgaggagaggaaggtgcagggaggtggagatgctgacccaagtttgcacagccaaaactaggatcggtctccagggcctccgtcactgtcctgtcctgccttctgtcacacaggagttcgaatggtcgttctgaaattgagagctagcggggctgggatctcactgggcggccacagaggggtcccctgacctcttggggtctcgttggcaggagggaattgtattggaatatccaggtgtgtggatccctgtgaatctaaccctggagtgttccagaactgcccaccctgtggaaagggactcaggcctgtcttcaaggacctggcatccttctgtcccagggcagtttgtcttgggtctctcagggaccgtttgggcctcttcagcccctcattccacttccctcctgctgcccaagtcattcgtccacttgactccaagagtcggctggggaaataaaaggaaatgaaacacgaccaggcattttcccttggccgaagcagaagtctgctgtcgggcaaaaggtgaagaagagaccaatgagagatgagcccacggtgctcctgccctccaccaaggcaggccatcctctgctgccagcctgcaacagggcagtgtccttctgggaggtgtccctccctctgggggatcaagagatggccaaaagcaggtggcagcaagtggagaaggctgttaatccagaacgcaccttgtctctgcccctgtccccacccaggcaacatccaaaacctttgcccacagttctggggctggcaccgtcctggggctcagctcctagggacggggctcccccaggcactggctgccaggaactgggtggccccgggcaagtctcttcccatttcggggtatagacttcctgcctgtaaaatgagggggtctgcaggtcaacctcagagtcccactgtacccccagattctgcttcagggagacggagagagagagaaagagaaagaacgatagagagatgcaataacctcccagcatccaggaagacccagaggggagaaatgcagggaacctacccagaaaaccctggagcgggagcttctcacttttaatggtcatggccccacttgagaatccatggtgctcttcctagaaccacgcatgtgcacacgtgtgtgcaaacactgggctcatgcacaggcacacacacacacatataaggttgcaaacactttcagggacttcccagatttctctgagtccatccgtggtcactttcggtcaatcatctggcctgagcaggttctgccttctgggggctcttctaccctcagggaaatcagggtttggttccctgtaattgtctggtccaattgtctgaggactttctcttttttttgagacagggtctcactctgtcacccaggctggagtgcagtgaagcagtcttggctcactgcagcctcgacctcctgggctccagtgatcctcccacttcagcctcctgagcacctgggatcacaggcatgcaccaccatgcctggctaatttttgtatttttgtagagatggggttttgccatgttgcccaggctggtcttaaactcctgggctcactttcttttttttttttttttgagacggagtcttgctctgtcacccaggctggagggcagtggcatgatcttggctcactgcaacctccacctcccaagttcaagcaatcctccttcctcagcctcccaagtagctgggattacaggcacctgccaccatgcctggctaatttttgtatttttagtagagacaaagtttcaccatgttggccaggctgatctcctgaccttaagtgatccgcccacctcagcctcccaaagtgtcgggattacaggcgtgagccaccgtgcctggccatagccagactttcttgattctatatccttctcctcagagcagaaacatcgagcatttgttgagtgcctcatgtataccaagcccttaacctaagctatagctcattgaactctcacagaagtcttaaggtagagcttgtatttagatccgttttgaatatgaggaatctcaggttcagagaatttaagccacttgccgaaggccacacagcttctaagtagaggaggctggcacctccagcctgggccgcccggcccggcatccaggttcctaaacaggctgctcagctgacacgagtcgctctggatctcagaaagcgcctgatagacggaggcggctgtcatctgtgtgtgtgtgtgcgtgcgtgcagccatgtgtgctggtgagcatactgtccctgtcagcctctcctcccccagcacaccccggcagcccagagaagggagggcccggaggagtgacggtgttccccaccccctgccctttgagacacaatggagtccgctaatccagttacttgataattcacttatttcatgtctatttggcagcgagcgtgctcccacgcaccagctctggggaaggcgagatggctttgcctggaggaacctgattgtttttctggggaaggagtgggggaaaaaattgcacccaacaatggacaataatgggcctaaaaatagagggtggagggtgcagggggtggaggagtgtgctgtctgccaagggagggctccaggcctgtctgcttggcacggggcagccctaccctcctgcccagttcccctcccctgcactgggttggccgcctctcagcctagaggaggggcactggaaggaggaggcccaagtgggtggggggctgggtggccttccttgctgtctctgcccgctccaaaatggaaaattgtcccacccagggggtcctggaggcagcagccacgaccttgggtggacgctgcgcctcatcagccctgactagccgtgatgcccaggaccttcccccaaggggctcaggcatcagctgagaactgcagccttgggtacagagtacgggttgtctcccagcaggaaagggaggtttcaggttttgtggctcttttccatctcccaacacttggggcagtcttctcgaaggcctcaagcccagcgggcagctatgaccccaccaggagcggagcgggcagggaccaggctgccctctaagccactcggctggctctcagccggggtgcacactggacttgcctgggagcttttcattccccccctgccgcagctgccccccagaccagcttcagcagcctctctgggcggcccagcaggaggaggcattaaacctccccaggtggtcccagtgcacagccaagtttgagaagcaccgattgaaacctctcccaggcctgccctggagcccttccagcctgaagcatcttgtcgtcttaaaactgaaagaccaggaggaagagaattccatggcctgcctcggctctctcagagcctctctcacatctgagctgcaggtgctccatcctccttctggcttcctgggtgccgaggggtgccagctctccaggcttgggagagggccacttaagccctcacactttgttcccaggctcttcacctgtcttcctggaaggagggggccggccagcattagggctgtcacgggcgctgcttaatgtcaagctgcccatctggctcctggcctccctttggccttctctcctgcgctccccaccaagctcctggctcagcagcgtgcatgcgttaacccattgcccccctgcagtgttttgtgtgtccagcctggccctttgctcagtcgacctagagcaccatcctcccagactagtcgagtgtccctccacctgtcctgagtccagatgaaatcccacctcccccaggaagccttctgactgccccagcccgtcacctccagggcttgtcatctgtgccactcatggggaccaggacacaggtgacttctctggtggacacagcagaacggtcaacattcccaaaagggagcaaattgcccgagtcaccagaagtgtgaccttgagcaagcatctggctcaggggctcttggcttccccacctgtaggtaaaataacaggaacagtgtcatcgtgtgggggcccttccctggaccacctggaccagcctctcaaacctggccacacatctgagtcacctgctgagggttttggttagttggttggttaattactcgattggttagtttgttggtttgtttgttagctttcaatttggagtagaatttctgaccttagggcccaggaatgttgccacacccctcccgtccccaggtattgtcatgttttcatgggtggccaaatctaagagctgcttctctggggcacgaaggatgttcacaaatagttgatgaataagtgaatgaataaatcaatgaaacttaccagcccagcctcactactcgcacccacccccaacgacgagccagggttcatccacagaggggtgtacctgtccaggtgtccccaggtgtgggcagacccagtaactttactctttcatcggccccaccgcctcttaactcctcagagaccagcaggaagaaaccctcggaggtcgcagcttctggctgttctcaggggcaggccccgtccatcgggtgctgtgtctactcctaagacctggttctgagtatggaacacctggagagggaaggggccgaggagggggagtcactcggctgtgtcaggctccgcccctgccttcctgaagcacacagtggggaggggacacacccgtcattaaccgaagaagccactggggaaaactgtgacccagtgctcccttgggactggggggcagtggccaggggtgttttccctgaggaaaagaaatttaagcagacacctgccaaaggctggagggagagctgtagacagaagatggctcaacctgaaagctccgcggggtggagggggcatccaaagggcgggagagactggccagtagaaaacgaggccagaagccggacatggtggctcacgcctgtaatcccagcactttgggaggccgaggcgggtggatcacctgaggtcaggagttcgagaccagcctgaccaacatggggaaacccagtctctactaaaaatacaaaattagccaggtgtggaggcacatccggtaatcccagctacttgggaggctgaggtaggagaatcacttgaacccgggaggccgaggttgcagtgagccaagatcgtaccagtgcactccagcctggacaacaagagcgaaactctgtctcaaagaaaacaaggctggaaagacaagggagagaggcagagctggtggcagagccaggcccagggtttggacttaagaaggggaaggcgctggggctctgaggaggagctggagacaaagggaagggtgtctggctgcaggctgagaatgggctgggggtggggaggctagaggggtcggtggaggccccaaccaaggcggggcaggggagaacagagtgagcctttaggagaaaccactgctggggaccaggcttcactctcagcccatccggaaacctctttcagctgatgcttcccccgacccccttccccaccctgggcctctgttggaagctggctgaggccctgttgatcagcaagaaagcccagggcagctctcagagaagaggagagggggcccagaaaaggcccccaggatctggggaggggatccgaggagaggcagctaccaagcgccccagccaggggggcctgtccctcaccccaccccggcactgaaaccctcacagccacttttttcctccctccgtgataaaatattcatggcggcagagtgggccctctttgggaaggctgcctgggtctagcttatgctctgcacaagcttttaaagagcagggcgctgttcctactctctaagcattttctaagtcctgaatcaataatgcactttcctgggcttctccggatgtagccctcttcctctcggtgcctttcccccgcccgcccccttatctttctttcccttttcttctctcccgttctttcatccttccatctctcctttcatttactttttaaaaaagtatgaaagtgttgagctgtttgggtggccagtgaagccctgagtagggagtgggcaggaagggaggcgccagactgagcccctgtgtgtgcagggaggaggaggaggagtgggaggaggaggaggagtgggaggaggaggaggagtgggaggaggaggaggagggaaaggaggaggagcagcagcggctgagcgctcccgctggccctgctagggaagtgtttgaggatcactgagctcctggtgtggggaaggaggagggcttagcctcacccggcctccctctctcctttttctaatcaattagaaagtgtttacagcatagccagagaaaaatagggaacctgggaccaagaaaaaatgcaaagcaccggccaaatttcagccccacactcgaaggagggagcagtggggtttcacctatctgccttctgtggtaatgaaacccctgtcgctagaggtatgcaagagaaggggagccttaccctgtctgagacagacgcccatgtgtctggtccattctgtcagtcgcctgtggggtgccccagggatgcacgggcactcttcaactgggatagaatttcctgccccaaacattcctggaaatctggctgtgggaagaatccacatatgcccagggcaaagcagaatgtgtcctttaagaaaacaataatacatttttaagttcctggagagattaacccttgtctagccagagccatggcaatgcctccccgcccaccacactctggtggttcggctgacggaggagatcagtcattcaggggtctgcggtcctgatgagcagtgggtgcccacaccaggcctggcatttcatccttgctttctgaccttggcttcccagttgaccctctcccgggcagctcgtccatcagggcagcccaatgccctcaggtcctccgaaaggatctcagggtgttctgtgggggcaacccgaattggtgtaagaagactaagcagtcgatctgctggaacagcatccccaaagcggagcgaagcccgcggatgcccaccgcctctcccccaggcagcgtcctacctggatagaactgcctggagccactgcagagggtcctcgctcagttagggaatgtttgtcatataccgctgtgtgcaaacagctgttgggagtgtggcacaaaggtgggtaaggcccctgctctcccagagttcacactcacagaaggttctggaaggaggaacactgtgggcagggttgaaaggcctaaagtgctccctttcctcccaaataatgcggggtgaggggcggtgaggagagccgctctgagcaaccaaggaactgagatgcattttctgggtctccttttgagccgaggcaggttcgagaggcagccagagactctgggttcaaggtggacctgtgcccaggccatgcccactgtggcccccctgggggaggagcaggggcggtcgccgtggctttgggaggctcattgctgggacaagcgagtccctggggaggcagcgcttggaggctcgcttgcctgcccctgcctgagtaattgcttggagctgggaggaaaattgctccaaccagaaaacaaaacagaaaagccgccttggccagctgcagctccagccctaaaatgccaggttggtttacgctgattcacgagcggggagggtgaccttgctgtctgttgtccagggcctgtgcacgaagagaatctggaaagggaaggagagagacacctgcacgctggggaaggaattagcagcacagagagcaagagggacagcgatcaatgaaaccatagaaggagaatgagaaacacacacacagagagcgagagggagcaagagagagagagagagagagagagagagggacagaaaacaagagggagggagggagggagagctcagagagttagagaccgtcagggccgctagaattagaatcagctctgaacagaatctccgtttccgctttgttaataatttattccctctgcaacttttcttaccaataaataggaagtaatctgttaaggagaattcccctagcaccccggctttctccctggagtcaggggaggaggatgtgtctctgtgcccttcctccctagcagcatgggggcctgaggaacacgcagaacttgagactttaggatgtcagggtcagaggcggacagcccactcctgcccggtcattttgtgaacggggaaaccaaggcacagatagggcaaggccctggccaaggtcacacatggtgttaggggcagtcccctgagtcctaattccatggccccacgggtcagggcacctattgatttatgcacctgcccaagccatagggtttcccccgaaatggcagaggccacatccaaggaggagggtggggctagctcggctgcctttccttgccttcccccacgattgcttcccccgtgctcgagtcctggccctctacctgggcacccacacccagggcctctcctgggcagcctccagccttccaccttgtatgcggcagcagcctcccgtcctggtgaggctgaggggctgaggatgagaagggttccgttggcaaatcagcaacagcagtcaagagacgtgccgcctgcctccccgtggaacccgagtctgcgggagcacagtgcggcccaggcaacagcgtcctttcccttttgggtgaagggcaccatttcccaatttgtctcagggcccagctcagtgggccatcccctggcttcttatcccacctcagctgctgccgagccgcatgaccctgcgacattgctcagcctctctgagtctcggtttcctgaggatcgcactctccaggatccctgggagcgtgggaggtggggttgaggcacacagggcgcccagcacagggccgaggtggaagacatgctccctaacggcggggcctgctgtttgctgaagcaccaggccagacagtggccatgaatgtgctcccagcatccttcacccatgagctggcaccaccgaggcacttgccatggtgcacctggcatcattcctatgacaaccctgtgaagccagtgctagtaacctcattgagcgttcattcattctccgaagatttcccgagtccctgaggagggccgggggctggggctggagtggggacaggatcagatgtggtcgctgcccgcatgaagcctcccctccaacagagaagctgaggctctcgggcaggagaaagatcttttcctcacccattctatgttagtggctgagggcccatcataacagacagattaataccaccaaagcataccagtggatttaatataagttttatgtgaaaaaggctttaagcctttctttttttttttttttttttttttttttagacagggtctcactctgtcactcaggctggagtgcagtggcacagttacggctcactacagcctcgacctcctgggcccaagggatcttcctatctcagccacccaagtagctgggaccactggtgtgtgccaccatgcccggctagttttcttttttgttttttgaggtttttttctgtagagatggcatctccctgtgttgcctggcctcatgggagctttcataaggaatgaagacccaaaacattggtgaacatctattttgtatgctaggtttaatggagaaatagtcatggagaagtacgattggcttaaaaaaaaggtatcatctcctggtgataaactggcgggaattttgcaagacctgtgtgtccaggtccctctctgtgaccctgcatctttggagatgagaatgttccttcctccgggcattgggagggcacctctcgaatgagcctcatgtcctgcttcagggaagaagggcaggggaaggtcaaagagtaaccttccgcttctgtggttttctcaaatcccttcagcttaaaaaaaattttttttttgagacggagtctcactctgtcacccaggctggagtgcagtggtgtgatctcagctcactgcaacctctgcctcccaggttcaaatgattctcgtgcctcagcctcctgagtagctgggactacaggcacgaaacgctatgcccaactaattatttattttttttaatttttagtagagacagggtttcaccatgttggccagactggtcttgaactcctgacctcaggtggtcggcccgcctcagcctcccaaagtgctgggattacaggcgtgagcaactgtgcccagcctaaaatattttaagaaggttttagcctgtaatcccagcactttgggaggccgaggcgggcggctcatgaggtcaggagatcgagaccatcctggctaacacggtgaaaccccgtctctactaaaaatacaaaaacttagctgggcgtggtggcgggcacctgtaatcccagctacttgggaggctgaggcaggagaatggtgtgaacccgggaggcagagcttgcagtgacccgagatagcgccactgcactccagactgggcgaaagagagagactccatctcaaaaaaaaaaaaaaaaaaaaaaaaaaaaagaaggttttagggtagcatgtcctgggcttcattgggctcaaggaaattgggggactcgcccaagcctgtggagctggggagctgctgagggagtgagccagtgcatccctccacaaaccacagagccctgcccgggacaccctggcgatttcatcccaactctgagatttcatcccagcgcaggcttgggtgcaaggccagctgcatgacgttgtctgttcttcttcctgagacttggtgaccattccagtgaccgcccctccacggcctccttagtcaggggcctggaagttcaaatggctgggcttcccacaggcacatttacctccattcttgctaacagttcactttcccattcaattatgttttttgcctgcagcttgcctatgatgtttacaacctggcctctgactttgactgtaccctttgcacagaaaataacataaaaggaaaagcatttaagtgcccatgacgaggcttgaaaagcatggcatgaaatggtttctccatagaatatttcatgccaggagctcaggcttggcatctgtgtaggaggctcctcctcacccggttctctggtgctatgggcctggctggctgccttcccttccctctgcccaccctcctttgacttctagccacactgcctgacctttcaggtgacttgcctatgtgtgtccagagagataggaaagctgtagacatgatgggcttggtttccccaagattcctcaaggttgggtcccgtggagtccaggggatgggtaagtgatgtgcggccatgggtacttagtgtcttatctgagacgtggagctgactgtagcacctgcctcctgtgggttgctgagagggtgcagggaggagcggctgtgaagtgcccaacccagcccgggcacagggctggcactcagtgaatgttacaatcatcacactcttctgagtcagccgttcccgggacagtccacgccatgaagttccagggtttctcatgcacaagcctggtggtctcagcctcatcccttcctcctgtggaaggttgctgggagtggagtgtccctgagttaatacgaagctgctgtttcaaaataatcgctcccatttggagacatttcctagggattctaggtaatgtgagacacagaccatctcacatggcaatcaataagaaaatagagactcagagaagtcaagtgactttgtcaaggtcacagagcctcaaaggagagagctgagagggaactcagggctttcagacgccagggcccaaaactgtatggaaaatgggtatgttaactcatctttctttttttttttcttttagacagagtcttgctctgtcgcccaggctggagtgctggagtgcagtggcgcgatctcggctcactgcaagctccacctcctgggttcacgccattctcctgcctcagcttcctgagtagctgggactacaggcgcccgccgctacacccggctaattttttgtattttttagtagagacggggtttcactgtgttagccaggatggtctcgatctccttacctcatatccacccgcctcagcctcccagagtgcttggattacgggcgtgagccaccgcgcccggccattaccgcatctttctagagaaaatcccaagactctttttaaaaatcagcggtatgatttttgttgttgttttaattttcatgaaatatttaaagaggcagctactacttctgatactatcaaagggcggctttggagccatgctgaaaggctagaggtgtgcctaacagtctctccctatattaggccactttgttctgactgctgtttttgtgattagttgatctgctgtcctggagatgggtggaaacgcgcagacccagaggaggctggcaaaccttcacccccactcagaggagacactcccagtctcagccccacccccatgacattatcagctgtcagatgctgactggggactggggtggggggactggggtaaactggtcttctaataccccggtgggtccccagaattcccccagtgaagaatagaaggtccaggtgcaatggctcacgcctgtaatcccagcactttgggaggccgaggtgggcggatcacctgaggtcaggagttcgagaccagccttgccaacatggtgaaaccctgtctctactaaaaatacaaaaattagccaggcgtggtggcgcacgcctgtagtcccagctacctgggagactgaggcaggagtatcgcttgaacccaggaagtggaggttgcagtgagccgagattgtgccactgcattccagcctgggccatggagcaagattctgtctcaaaaaacaaaacaaaacaaaacaagaatagaaggaaagtgagaggaagcaatactgtgtttgtagaggaaaaggaaggtcaggtcagcgccaacagtgcctttgctgggatgctccacactcctgaccagctcagtggaattctgagaccttggggagcaaaatcagagggggacaaggagaaagacagaaagagaaagagggagagagaaaattgtgttggccgcggctcgggatttatttattgtacttgctgttgactgagctcgctccacagcaggcgaggggcctgtaaacacacaggctgattcattagtttctgaccatctgcttcccgggccggggcgggggccggagtgccccataggttggagcagccagcttagagcccccatctccagccagagccagctgtgtcagtcttcccagtgacagacaggccgggtgcaactgggggctttgagggataccctgtcccccgccacaatgcccccaccccatagaacccatcaggggcctgggcagggcagggctaagtaaggcaggaagatgaagagagaccagggaaaaggtgaagtgtgggtggctcagcagttggggatgacgggaatactatcaacactcaataggagatatgtcaatatcactgtcattttattaatagcttattaatatgatgataataataataagtataattgagtgagtggttactgaggtccaggcccaatatgcaggcctcactacactgtccccaataagcacattaacaactctatgatggatgatgagagaactgggttcaaagattgattcaagtcaggagggcctcctggaggaggcacatgtgggagggctctgaaaaccaggaggacagacagtggccaaaggagcacaggctctgaggtgggaggggacgaagtggcctgggaaatggcacagcttcagtgctgggttgataagagctttctgggtaggtgacgcagtgtgacgccacttggtgccagcgtactgagaaaccaggctggtggaggagaccccagagacatcctctggggaaataggatgaaaaactcccaattcgtctctacccctctgagccattcctcccggcctgttccctctttgctcacctggcatgaggcttgtcttagtcagctccggccaccataacaaagtagcacacgagacccaggtggcttaaacaacaaaaatgtctttccttgttctggaggctgaaagtccaagatgaagttgttggcaggtttggtttctggagaggcctctctccctggcttggagccagccgccttctcactgtgccttcaaacggccttttctctgtgcacatgggccccagcgtctcatccggcagccaaacttcttcttcttccaaggccaccagtcagattggactagggccaacctgagggtcccatttaacctcaatcacctcttgaaagagaatctgtctccaaatacagtcccattctcagatactagggttagggcttcaacatagaaatctgggggacaccattcagcccctaggaagtccccaggggcagcagaagcagcactgggacttcaggaagggagtgatggctgggctgggggaaggggggcatgtgcctgggtgccagagcccaggtgcaagttcttggagcatctgcccatcactcctcctcccgagcggcacagacagagcccattctgcatccaggctcacagcacccttcccggctgctggctccctcacgggtcaagcctgcctcctccagcccagcacctgctacccactcaggccattgggccatccccacagcctctcagtccctcaccattccaggcaacagcacaggacagggtgtgtcttgcccagagtcacccggccagtgagtgaggaagctgggaacccccccgccccatgtccctctgctgtcctggcatggtgggcttgccagtggtgtggatatctctgatgataacagcagactcctcctcagaggtgccatctgctctcgagaaggctggggccagtcctaccctggcccgggcctcagtccccccatctgcttaaggagatattggactctatggtgagctcctgccaccctgaggttgcataggggcctgaggacagagctattttggtcaaagagggatttgtggaacctgcctcaatgaaccgagggtcagccctgccaccgaggagccccaggcagccaggggacctgtccttcaccctagaggatagaagcccaaaggctgcggctgctgcagtggcacctggtgggggccgcggggctgtggctcagcccctcagaaggcggtgggccccatttcccccatgggggccaaacagctcatttgagagtgagaggttttaacttagatccaagccattttgtgtctgagcaaaccagacacctgaaacatgcatcagaaagggccacaagtggtccggagcactgggtggttgttagtgacagtgttcgtttttttctttctttctctttctttctttctttcattcattaatagactttatattttaaagcagttttagatttacagaaaattgagcagatagtacagaaagtacctaaaaccccatgccaccctcccccacccaccatctttccctgcctattatccacatcttgcattagtgggggatatttgaggttttgggggatttctcttttttttgttttcgtttttgtttttgttttttgagacaaagtctcgctctgtcgcccaggctggagcgcagtggcgcgatctcggcttactgcaagctcctcctcccgggttcatgccattctcctgcctcagcctcccgagtagctgggactacaggcgcccaccaccacgcctggctattttttttttttttttttttttttttgtatttttagtagagacggggtttcactgtgttagccaggatggtgttgatctcctgacctcgtgatccacccgcctcggcctcccaaagtgctgggattacaggcgtgagccaccgcgcctggcctttgttttggggaatttctttagagacagggtctccctctgtgatccaggctacagtgcagtggtgctgcatagctcactgcagcctcaaactcctgggctcaagcaatctccagccccagcctcccaagtagctaggaccacaggtgtgcaccactatgcccagctaatttttaaatttttttttgtagatacagggtcttgctgtgttgcctaggctgatcttgaactcctggcctcaagtgatcctcccacttctgccccccgagtagctgggactagaggtgcatgccaccacaccacacccagtttattttttattgtttgtagagacagggtctctctgtgttgcctgggccgatctcaaactcctgggctcaagtgaccctcctgcctcggcctcccggagtgttggaattccaggtgtgagccaccatattagtcatgtctgatgaaccattgttgatacattattattaactaaagtccataatttacatgagagttcacttactgtgttgtacaggtctatgggtttttttgtttgttttgttttgtttttgtttgtttttgtttttgtttgatacggagtttcactcttgttgcccaggctggagtgcaatggcacgatctcggctcactgcaacctacgcctccagggttcaagtgattctcttgcctcagcctccccagtaactgggattacaggcatgcaccaccacgcccgggtaatttttttgtatttttagtagagacggggtttctccatgttggtcaggcttgtcttgaactcctgacctcaggtgatctgcccgcctcggcctcccaaagtgctggattacaggtgtgagccaccgcgcccagcctgggtctatgggttttgactcattcataatggcatgcatccaccactgcagtattatacggcatagcctcactgtcctaaaaatgccctgtgctcggcctagtcatccctctgaccctggggaccactacgttagtgacattttcagatccctctggcctgtttccatcagtgacacttctcacaccaaatgtatgggttttccacaccaacaacctagtctccagctctctggacaccactgggtgtccgatgattccgttcaattgtaacactgcccagagctggcgtcagaaccctcaggtgaagggctcagtcgcaccacactgcccccacctctgacgcaattgcaagttcctgcctcccgtacttctgtccaattggctgtaaattgggggttcccacgacccctccctcaggtttgatagtttgctagaacagctcacggaactcagaaaggcattttccctacatttacctgtttatcaagttcaggaacagccagatagaagagactcacagagtaagggatcggggagagacccagagcttccaggccctctttgagcacctcaatgtgttcaccaatcctaagggtacaggtaaaaaggctcaggggccgggcgcagtggctcacgtctgcaatcccagcactttgggagggcaagccaggtggatcaacggaggtcagagttcgagaccagcctggccaacatggcgaaaccctgtctctactaaaaacacaaaaattagccgggcgtggtggtgcatgcctgtaatcccagctacttgggaggctgaggcaggagaatcgctggaacctgggaggtggaggttgctgtgagccgagatcgccccactgcactccatcctgggaaacatagcaagactccatctcaataaaaaaataaaattaaaattaaaaaataaaaggctcaggaaggtgactcagctaaggagatatttagagagtcgagaatgtgaatgggaatttttgaggcggacagagtggaagggcacatgaaggagacagaatgccatctgcaaaggctcagaggtacaaccaggcaggggcaggaggacagctgtcccggggaggcccaggcacactgtcaccaggtgtgggagggcaggttggggttggtatattacagagtcaggactctgtattccaggcaacggggagccatggagggcttcaaagcaggggactaacacccagccttcttggttgtctgtatttagagcaaggacaagtatgcattttttctttggaagccatgggattgcacacctctgcacgcattgaggaaatgggcacaaatctcccagctgtgtctgggcaccggagcacaggccctgtagccacagagcaggtttctcggttcgcaggcaggggctaggccgcgcagaggcttcccaggccatcccgagcatccagcacccacccttcccttctcctctccccgctgcaggagaatccctacctatgcagcaacgagtgtgacgcctccaacccggacctggcccacccgcccaggctcatgttcgacaaggaggaggagggcctggccacctactggcagagcatcacctggagccgctaccccagcccgctggaagccaacatcaccctttcgtggaacaagaccgtggagctgaccgacgacgtggtgatgaccttcgagtacggccggcccacggtcatggtcctggagaagtccctggacaacgggcgcacctggcagccctaccagttctacgccgaggactgcatggaggccttcggtatgtccgcccgccgggcccgcgacatgtcatcctccagcgcgcaccgcgtgctctgcaccgaggagtactcgcgctgggcaggctccaagaaggagaagcacgtgcgcttcgaggtgcgggaccgcttcgccatctttgccggccccgacctgcgcaacatggacaacctctacacgcggctggagagcgccaagggcctcaaggagttcttcaccctcaccgacctgcgcatgcggctgctgcgcccggcgctgggcggcacctatgtgcagcgggagaacctctacaagtacttctacgccatctccaacatcgaggtcatcggcaggtaaggccgggggaagccctggatgtcacctgcaacctgggatgctatctgttacctgggacgttattggatacctgggatgttacctggtatgtggaacatgaccgggttcttgggatgttacctggttccctgggcgttacctggtatgtgatacatcgttacctggttccccgggggttacctggtatgtgatacatcgttacctggttccctgggggttacctggtatgtgacacatcccctggttcttgggatgttacctggtacctgggacatgacctggttcttgggatgttatctggtacctgggacatgacctggttcttggaatgttacctggtacctgggacactatctacttcttgagatgttacttggtttccaggaggttacctagcacctgggacattacctggttctcaggacattacctgatattacatcatagggactgcctaggatggctggggctgcacagacccaatgcctgagcttttccacggaagaaggtgcacatgtcggaggaaggaagtgcatgtgttggaggtgtggagggcaggagtggagcctgtctgggcagagctgggctaactcctggtgctgactgtgagaagtgctctgaggctgtccactgactcagtgaatgggctctcatgttcaggggtttccgagaccgccctcaggctccatgattcactagaaaatctcacagaactcagcaaagctgctatattcacagttatggtttattacaatgaaggatacagattaaaatcagcaacaggaaaaggtgcacagggctgggtccaggagataccaggtgcaagcttctcattgtcctctcccagtggggttgtgcaggcagcacttgattctcccagcagtgacatgggacaatgcttgtgaactatcaccaggcagggatgcttactgaagcctcagtgttcagagtttttactgggagatgatggtataggcattgctgatgatctggctggcctttggctccaatccctccagaggtcgagctgatactacatggcccaaggcataggctctctgatgtggcccaagacccgcaggcaaacatggacactcttcctagacaggacagtccaacggcttatggattagaggtcacctagcagaaaccaggccggagtcagatctttctttggaatgtgcagggtgtggacaacccaggcctgctgtggcagctctttcttgcccagctctggagaggaatgtgttttgaggaaactttgaggaaggcaaaagactgtcataggagatgaaagcagcctttacctcccaaaaactgtttagactgtggatgattaaatggttctgtgttgtcctgggtcatttgtacttttggcagataatatgccagtctgtgggggcaatgccatctaccctgggccatctgtagaatggggatggtaacaagcataagtctcttgctggattgtggtgagggttaaatgagttaaagttgatgaagcacaccgaacagtgcctggcacataatacgcactaaaaaaaagtgtttaataaaaaaattggacaaaataatggagtgagagggctggggcgggctgagggaggagagagttgagacccaagggtgctggggcagtccgggccaggagcctggcttaggcaggtgcaggcaggggctgcacctggggagcccagctgggatgatcactgtgggcatctctccactgcaggctttcaatgtccacccaaatctgtaattcctgacaagtggaaaaagtgatttgccgtatggcaggtagagcataatcctgtttttgtaaaatatataatatgccttgtatatcatttctgcgtcttgaacagacattggctgtaagtgtgtacaggaccgggaaaaacatcatgggttggggagaaaggctggaagcccgtttgccagccatgtgctgtggtgatgcctgtgccgtgaggctgggcaggccgctgtggtgctgctgtttccagcttgtatttgcattttgtttcactttgacggtgtgtgtggattccaggtgggcaaaggcaaaggcaggtcgttcatgaagctggagtcagcttcaagtctggcagatgggagtgaagcaggtgcagacaggggcccgtggttctgacacccgtgatctctaacccacctccaattgggacaggatattcaaaatcaggaatgttctggaaaccaccccatatataggcactgttgtggaactggtgtccagactttcagcccctgggcatctccgtgacctctgccctcgggatgcaattgtctggttgttactagacacctgccaatccctgcagtcccactgggcttagcagctcagggctgggaaccagctccccaggccctgcaggctcctggcttgtcttctgaccttggactgctcagggaaaccctcatcttcaggcaactgttcaaggaccctgccttacctttcataaggtggctcatgtggggccctcatgtctgggccagctgtaggatccagactgggactgtgatgctcagggcctggtggtgccccttcaaccccagcagggtgacctggggttcaaaccctgcctctctgcatcctgccttgatttcccatctgtgacaagaggcctgaggctgcctggagcccatgtctccctggaggtggttccgcttggcacccagcctctgcgggcggcggggaggagccgaggtggtggcgagagtgtacaatcaattcagagagagagtaaacactcttcaggcggcagcttggcttgtcgttgaactcggttgggttagacggttcagcgaaggactgaggttacctccccttttccctcttcagttccgctgggaaagtccagccatgctgagaagccagagacacaggactggtggcaaagggggatgtgggacccgaagttcctgagtgggcaccagggacccctgggggttcccaggctctgggattttacaccgatcctgttctggggattccctcagaatttcgtgactgccatgttgcccagtggctccgctgtggcccactaacaagaacagcaaacgtttatcgagcatttgctacgggctcatttgctattgagcgctgttattaacggcttcatgtgtattttcttgtttaatcaatagccgtttaattccccaatggttattgaatggctcagatcccacaagccaaagacacggcactgagcaagccagacctgatccccaccccctggagcgctccccgcgggggcagcgctcccccagcctcgtgttttcagatgaagaagccaaggactctgaggtcagagaatagaaggagattgcacagcgccactacatggcagacagctaacatctagacacaagcatgtccaggctcaagacagactcagccaccgagctgtccctagccctggcccggtggctgcctcatttctggttccagctctgacttgagcccacctggagctcaggtagcctgtatgatggagcgatcccacgggactcccctttgaattgaaggttctttgatgggtggtggctccctgctctgccactcaagtcagtgatttccagctccaagggggaccccaatggcaggcagcaatgtaggcaggagggggaggacagaggcacctggctgcagaggaggagctggagcagctgcagcagctgcagccagcccagggccctgggaaggagggactggtacaaatggtgagggggacaagaggtggggacagactgagctgcagccccacagggggcaggtgggctgccggtggctctgagagaagcacaggcacccgcaagtcccagccacgccccctccctgcctcccgcggagcctgctccacgtgcccattcctggaaggcaggcagggggtgggagctattttctccttccacacatggggaaactcaggtgcggagcctggagagtggctggcttcagactgtgcagcaaatctggggcagaatctggatttgaggaggaatgagatcatccctttatggtgcttggagcgggaggggcctccgcccccaccctccacacaaccattaagagaagcggggcccaaacctgacccagcatctcacaggagaaccatttaagacagggttccccagccccaccactgagagctttgggaccgggaggcttggggtgaggtccagaaggctgtgtctttgcaaagctcctcaagtgagctggaaaggtggaagctgctgcatccatggagatggatgactgtaacctgttggaacctcagttttctcatctgcaaaatggagaaatagtaatgacttcagctgcctgttgtgaggagtcgatgaaatgctatattcaaagagcttatcccagtgtctcattcctctggttagacggtgggagagggaagtgggggaggcttggggtcagggctgcctagatatgaggccattcctgcacccaccccaggtactagaaggagtgtggaagcatgcctctgggttcacaggggttgcaatcccaaatgtctgcagaggctggaaacacaacttacgtggaagccaggcatggtggtgtgcgcctgtagtcctagctacttgggaggctgaggcagaaggattatttgagcctgggaggttgaggctgcagtgagttatgatggtaccacagcactccagcctgggtgacagagagagatcctgtctctaaaaaaataataataataaattcaaatgaataataaaaataatgagaagaagataatgtacatgggtacctatggtaccagcggaagcgatagggaagggtgtggcctggggagaaatggagacagcaggcgcctcacaagacagtggaccaaacattccagatcttctgcggttacaaaggaaggtgcacagaagtatctatgtaaagtctcttgctttcaaaaatattggcacctacttcaaaaagttgtttaaactctgtgcaaggaaaacaaaatacccctgcagcccagggcagctcacgagctgccagggagcacccctgctctgaaatgctcagtgtcctcctgcagccgtggtagcagctgcattcgatgggcccaaggcagggccaacacactggagccagggcaggggcaagatagcaaaacagcccagccagctctgcccactccagacctgggagtcagagggaagggggcatcatcccacgcaagttcctctgcccagaaaacccaggaagctccaggaaggcagcccagcgggtcctttgccagcaggaacaggaaaggaggaatgagttccccattcctggaggtattcaagcccagtgggtggtgtttgtgggagatgatgaagggaggtcctttgcaccaaattaaggtcttgtgtgcccattctgttcaaaaggaataaatgtggattaagggaacaggaaaggcaggtaccatttattgggaacccatgggttacgtgccaggcattgcatcctcaccccctttctgcccaggagcaggctgaagtccttgagcgagaggaaacccgtgagttccaagaggctgagctgggcctggacgggcagatctgagctccagactggccaagcccggctcctgcagacccagcttccccagaccctgtgggggtctagctgctctatgtccctgggcctcccccaacctgttttttcctcaacaccctcccctctttcttgccttcttgttttcttccataaacgtcctgtccctattgatcgccccgtaactggagatggacggacaccggactagaatagaaacagcagagggaagaaaaccatggagggtgggcaggtgggcgcggggaggggagtgcagagacaggcgatttcagccaccctattcctgtacccaccctccctgcatctctttctcagctgctctacaggaaaaacaggggcaagaagggaattctgtgatgttattctgcctgcactgactccttgaaactctgggaaggcagagacaactccctcagcaatattaactgtcattcactgagaattcccatagcccaggtagcatcccgagtcctttatgtgcatttcctcattaagtcctatcctgtgaggatcattgtccccatgacacagatgaggaaactgaggccaggaggttgagatatagatggaagggctgggtgtggtggctcgtgcctgtaatcctagcactttgggaggctgacgcaggaggatctcttgagtccaggagttcaagaccagcctgggcaatatagtgagacccccatctcaatgaaaacaaaatagatggaggtacccatgaggatggctattattggaaaagcaaaaaataacaagtgttggcaaggatgtggaaaaatcggaaccttcatgcattgctggtgggaacaaaaacggtgcagccacaggggagaacagtatggtggctcctgaacaagttacatgtagatttagcaattccgctcctaggtatagacccaacagaactgaaagaagggacttgaacagatacttgtacacccatgtttatagcagctttattcagagtagtcaaaaggtagaaacaacacaactgttcatcaacaaatgaagacataaaatgtgacccatccatataatggaatatgattcagccttaaaaaggagggagaacctgacacacgctgcgacacagatgaaccctgaggacatgatgctaagtgaaataagccagacacaaaaggacaagtaccatatgattctgcttacccgacgtccccagagtcgtcaaattcatagagacagaaagtagaatggtggctgccaggggctgggggaaggcggaatgggggttagtatttaatggagacagcttcagtttgcgatgatttaaagttctggagagggatggtaacggtgcttgcacagcactgtggatgtgctaatgccaccagactgtacacttaacaatggtaaggtggctgggcgcggtggctcatgcctgtaatctcagcactttgggaggccgaggcgggcggatcacttgaggtcaggagctcaagaccagcctggccaacatggcaaaaccccatctctactaaaaatacaaaaattacctaggtgtgggagcgggtgcctgtaatcccacctacttgggaagccgagacaggagaatcacttgaaccagggaagtggaggttgcagtgaactgagatcgcaccactgcactccagcctgggcaacagagagagactccatctcaaaagaaaaaaacatggtaaggtgataaatatatacgtatattttagcacactaaaaaatgaaggaaatagatgggtgggtggtctccatgtcagactgtccaggtgcaaattctggattaggtgtgaccctgggcaagttgtctaacctgtctttgcctccttcccacctccacaaaatggagacaatcaccctggagtttaagtgagaccatccagagagaggagccacaactgtcagggatacagagaaagaacagcagatcacagagggcctggaggttcttctactggggcctatgggctcttaggagcgcaaagggtgggtttcaatcatccatggactccctgaaatatatgctaagtgttgtgtgtgtgcagtcagttggtgagagcccctagtttttgttccattctcaaagggggtccatgatcccaaaatatttggagagtccctggaaaggcagctttgtgttctgcttttcattttttaaacccaactcttggccgggcgtggtggctcacgcctgtaatcccaacactttgggaggccgaggcaggtccatcacctgaggtcaggagttcaagaccagcctgaccaacatggtaaaaccctgtctctactaaagatacaaaatttatccaggcgtggtggcgtgcacctgtaatcccagctactcgggaggctgaggcaggagaatcacttgaacccagaaggcggaggttgcagtgagccgagatcgtgccattgcactccagcctgggtgacagagcaagactccgtctcaaaaaaataaataaataaataaaataaacccaactctttggggacacccagctctttggggacagacattttgttaagtacagttcacacaccttcaactgcatctcccaggccccctgagctactgcttcccaccaaaaagcgggcatgcacgattccagaccacatcagcctccactgagaagtgccggtgttgggaaggggccagactatgctgaagagttggggggtggtggggtccactgccaaggcaggtggttgacccctggacctgcggtctcctctggtctttggctctgctccactgctgggtggggcggagagggcaggaggggcatctcggccttggccagggtcacaggaggcttggggagccctgcaggtgcttgggagagagtcacgcacagcaacgccttcccagcagcactaggcagaatcggggttccctcttctcttgcctaagaaggcatttcctctgcgagctttctcgccatcatattaattcactcaacagatgttttttctcagaccttgcagggatgaattaacacatatttctaatgggcactgccttggtttcttggagcctccataactaagtaccactaactgggtggaggtcaggagtctgaaatcagggtgcagctggcttcgctgtggaacctgcagaggggaatctgtcccataccctccgccctccgctcgctcctggtggggccggcagcctctggcgttcctgggcttgcagctgcgtcactccagtctctgccttgtcttgcggctgtccgctccctgagcatctgtcttacacgctgtctccccgtgtctcttcctacagggacaccaatcacatcggataagggcccgccctcctgcagcatgacctcagcttaacttacatcctcatccacatccacaaaaccccgtttccatgtaaggtcacattcataggcactgggggtcaggatgtcaacatatcttttcgggagacacgatttggcccacagcaggcacctatgacatgctggacacaagcagggtgccagggtccaagagcatggaggggctgacgctcccgtagtgggagagcagaaatcaacaaacccagtacccccaagtgcccacaggtgcacggtgagaaagaaaccagggcaaggccaggcacggtggctcacgcctgtaaccccagcactttgggaggctgaggctggcggattgcttgagcgcaggagttcaagaccagcttgggccacatggtgaaaccccatcacgacaaaaaatacaaaaattagccaggcatggtggtgtgcgcctgtggtctcagatacctgggaggctgaggtgggaggattgcttgagcccaggaagtcaagcctgcagtgagttatgactgtgctactgcactccagcctgggcaacagagcgagaccctatctcaaaacccagggcaatatgggagtggagctgggaaccaacctgagacctggacccaggggtcagggaaggccctccagggaggggggctttgaaggagaaacctgaagggggaacgggggcacggcatttgtggcagggggacagcaggcaggacaggtgcagtgccttctaaggactcagtgtgatgtggctgtggtgggtgagtaagattccaaagaagagcaggcagggccagatcacgccagccctgcagccccgggaggaagttggttttggttgaagtttggtaggagggctacaggcaggggagaggtgtgatctgatttccggtgtttggaaatctgagttgggggtggcggtgctggaggcctgcaggagactgggcgggccctaccaagactgacagcagcctggccgggttctggcagggacaggggctgtgatgtgggccgcctggaggtggtctttggtggcagtgttgctgagtagctgatgggagcaggcggtgggaggcatcatggaggactcccaggcatctggctttgagacactgggtggatggaaattttgccttgtcaaatggggacagaggtgaggggattttctggaggggaattttttttttatttcttaattttttatttttatattttcatacagcaaagtggaccttttgggggtacaattctaggaattttagcacgtggatagagtcatgcaaccaccaccacagcctgggcccacaacagcccgtctctccaagaactcccgtcccgagacccctggaagcccccatcctgctccctgaaaatctgctgtaagtggagtcgtgcggcaggtggctttttcaaggggtctccttcgttctcactgtgcctctgaggcttatggcgtggccgcctgcgtggctcgggctcctcactcctgagtaggactgtgccgtgtgcactgcacaccgtggtctgtttacccattctccgtggaaggacgtttcggtggctcccagtctggggcgattatgagtagagctgctataaacattcgtggaaaggtttttgggtgaacataagttttcgcttctcttgggtaaacacccaggtgtggacggctgggtcgtctggtgagcgtgtttaactctatgagaaactgccaggccgtcttccagcgcggctgtgcactggaggaagcctgacttctattttggacctgttggttgtgagcgttttggaggcatccggagcatttgggcctctgagtgtgaagcgcaggcgagactgggcgcggggagtcctgagctccgcggtgacgatgacgcccgccgtgggggcgtgcgagacttccgagaggagagccggggagccgggcgggctgcagccctgagatcagagacagggggaatctggcagggcggtgccccaaagccacgcgggagcggttcctgcagggcagcggccacctgtgtccatgctgcggcgggtccaagtggaggaggccagcgtgggcccatggacctgggaagatggaggtcacagtagacgcacccagagcagagcccgggagtccgggatgaaggccgtcgtggggtggtttcaggggtgaatgccaacacttttaaaagagtgaaataggggtaaaaaagagggggtgtaggcaagcttttgaaaacgttttgctcggaaggggagcagagagatggggtgtgagctgctgggggaatggggaggggagagggctcttcctgaaaggcgggaggcgcggcagcgttggcgttgggatgggaagaatccaccaggactgaagatagctgtggggagggcgggagggacgctggggacaggagccgaggaagtgatcggggtgggcggagagctgacaggacagagggcccaccagcatgtgtaaggaggaaaggctgactgatttcatatttaggtcagaaaccctgcttctaacaccttctagagactccatgtccatcttgacaacccagggtggcccaccctggtggctcacagaagtccctttgtcctgagtaaagagtggcacatcacggtgccagcgagcagcctgcctgagattccagctctttccatttgctcttttctggcaagtctcttccatttctccaggcctcagtttccccacctgtaaaatgggatcccgctcttgtaaagattgtctgagacttgcccgctcaagtcccagtactcaggaggtgcctgaggaaggggagccattgatcccttgaaggagtcggtattttgtcacctgaacacacagaccatgttcctccgtcactcgcctggggctgagtggaattccttggctttatctccagctctgtcctctgtcccttcatcagtcaacagtcatgcaggaatgagaagctcagttcatagtaggtatagccaaaggtactttggaggagagtgctgctgccaacagcggacgggggactgagccccacccagttctgcctgggccactccctctgggtctgtggccatgacacccggcaggctcctgtccccccgaccccagctctgtggcttgctgggcctcaccagctgcgattgggcaggacagatggggttggagaggggaagttgagtggggagaggacaggccacatccaggctcatcctcaggccttgttctgcccctgggctgggctgcctccctccacatctcagcagagggagcgtggggtgggtcattgtagaggatccctggcccttcatcccatgtgaagcctgttttagactcacagatgctcccttagatgtacccgccaagtcacacacacacgcagccattcactcatctgtaacatgcccctgactcacacataaacacacacctgccccacccacacatgtgaatccgcttccagaagcacccagtcatagacacatcacactccacatggctgccttgcacccctgctcacagacgcggacccacagggtgagcggaggcctccgcagcagcccggggttcaccagaggccttggcttgactgccctgggctcagggcttctctgtgcttctcccccatgttgaggcacccacttcatgcttgggttcctggaggcctctttccactctgtgggacaaagccccctctgggcttctaaccatccctccatcccactctcagcctgaactaggtcccaaggtggaccccctatcagcagccttgccccctagaagagaggtgcaggctggcgtcaggatttggtttcgggacatgactggcctccctccctcccttcagtcttgccctttctgtagttttttgtccctaaacacaaacccagtcacttctctgcacaatatctctagtggtcttctactgaccttagactcaagtctgtgctctgtgaccacagactttccctctcacctccttctgtagcctgggctctgagactcccaagatcagccaccccaaaggctgggtctctcgggctggcctaggggctagtccttctgcctggaacatgacctagccctccccagccttcctgtctggcaaactcctcacccctcaggacttggctcagagagcacctctctggagctcctgaaggctggagacctgtgcaaccagcccctcggtccccttctccagccttggcggcttgtgacaattccacagccttgccatagctaccatagctatgcacgtacacgtctgacacccgcccccataggctctgagctccaagggagcagggatggggtctggcttgttctcaccttagcaccagcacccagaaccaggtaggcgtgctgtatatgtgtggaattcattcattcattcagtcagtcagtcattcatttattcattcatgaacaaatgaacttacatgaacaaagaagtcttactatctggaactctttccagagaagaaagagactggaatataggcgctaggaggcagagaggcaggaccagctgggcttgctagcacccacccttgtcgcctcccacccttccaccatcacaccctgctccttctcctgttttccttgtgtgagaaatgggcctctctgggctaccacctgggcctggtccttccctcgggggtgttgggccttcctgcaggggaagaagaaaccttgctgaagtcagctaggctgcttaggctgggggtgccttcgcaggccctggtcatacccaccgtgtcacccctaagccgcacacccaagcctcccagcacccgcccgtcagcctctgtgttgtgtgcaaggaagctgcctctggctttgtaatgggtaataggatttatcaatagactgaggaggtgaggtatgttaaagcacttaatagaaaagggcttcgcacagaagcccaaatttgatttagccaatgaactcaattgccggcctgattgcgttccaggaggcgcagcagccagcatttgtccatgttaccctggaaaagccaggctgcgccaggcgaccaacccagaccacccagacctcccctctgcccccacggctctgttgttggttcctcgctttctcaggatctcaggtttgaatggcagtcctttgacccaaacagtcccaagttctccagcatccaacagcctccttccctctagtgcccaaggcttccccatcccatgaattagctagaagtgcagtttgctaccatgttcctttcaccatgatcctcaaatccgtgtgtcccctggtcacttgtcacctcttactcaagctggcctctgcaggcttccctcctgaccatttgtttcttctctggctgctgcccatctccccacactgcttgcctgagccaaggacacatctctcccaaccccccaaagaagaccaagatccccaggccacagtgtttcatgacgtcttgactcaggcctgggcatagcagatgggaattaccatgtagaaaagaaggacttgaggccgggcacaatggctcatgcctgtaacctcaacaatttgggaaggcagatcacctgaggtcgggagctcaagaccagcctggccaacatagtaaaaccctcgtctctactaaaaatacaaaaataaattaaaaattagccaagcatagtggtgcatgcctataatcctggaaactcaagaggttgaggcaggagaatcacttgaacttgggaggcggaggttaaagtgagctgagatcgtgccactgcactccagcctccagcctgggcgatgacagagtaagactccatctcaaaaaaaaaaaaaaaaaaaaaaaaaaaaaagaaggacttgagaggatttccattagccatcaccaaccttgaggccgtccatcgtccatccattggccacggccacccaccggctggggaggagaaacctcttggccatgtaagcccgcagccccctcccagggcagcatcattcctcactgcagtccaggtccccaaccccagctctgtgagtcctcagaaagcgagggcccttgttgcttcagcctcctccttcatcctgcagaacacgccagcctcccttgtgagcatctccaagccaccgtaagatctgggatttgctttaggttattttgcccataacccagaggctcatgaaaaatgttttttcccaaaacaaaagaacactcttcacccaaagataaatgcgctatctggcaagagaaattggaaaacattgctggctgtgttaaaatagtagtctaactttagcccccaaggtaccagagctctgcgaggccagtctcagtatacacgacatgtaataatgtggggacgggtggtaacataccaggaaagaaggaccaggcaatgtgattaatgaccaggaacccccatggtcctgcaaagaggtgctttgagacaagttggggactagctctcccagcccagcacctgcccaccccagttcagagccattgccgtgaacactctgaaatccccgtggggctttgcctttgcagagagccagccctggggcctcctcctccctgcccagctccagcaccatccctggctcgctcacccaaactcaccgcttcctccgtcattccccgcaaggagtggatgacatcactctttccggcagccaggagttgacctacattccacccgccctcctgtctgggagactctccaaaccccccgctcctctctccctgggaggagggaagggccccgctcacgatttttgtggagtgacggtgccaggcccgggtccagatggtgcccccgcagcagctcccaggcactgcctgcccctccctgcagcgcagggcacgctcctgcctggcacgggccagggcccctgtcatccttcatgtggctgtcaggcccccagctgggcctgccacgtttcccagagaactggtgttatctgggctgggctctcccctggaggtgaggcccggtgctgcctactaacagttgtggtctccaggggcttactagggactcatccattcaagaaaaagggaaacttagctgaaaaggtggctgtggctctgtccttgctggcagcagggccagcttccagcaagcaagtgagtgcgccccatgtcaggccgtgagagaagtcagggtctgagcagaggggccagacagccacacgggtgagccgggtagcaggtgggcctgccagatgaaatacgggatacccagttaaacctgaatttcagataaacaagggaatcgttgttttttagggtaagtatgtcccaaatatttcatggaatatacttgtactaacaaaatcattagttatttatctaaaattcaaaaaaaattttttttttttttagagacagggtcttgctctgtcacccaggctgaagggcagtgcagtggcacaatcacggctcactgcagcctcaacctcctggactcaagcgatcctcctgcctcagcctccgaagtagctaagatgacaggtgctcaccaccatgccctgataaattttgtgttttttttaatttttttgtagagattgggggggggggtctcactttcttgcccaggctggtctcaaactcctgttctcaggtaatcctcctgcctgggcctcccagagtgcccagattacacgcatgagccactgcaccaggcctaaaattcaaatgtaactcagtgtcctgtatttttatttgggaaatctggcaaccattgtggcatggggctctgtggggaaatgactccaagaggccagtgggggccaggcatggtggcttatacctgtaatcccagcattttgggaggccgaggtgggcggatcatttgaggtcaggagtttgagaccagcctggccaacgtggtgaaaccccatctctactaaaatactaaaattagccgggtgtggtggcgggcgcctgtaatcccagctactcgggaggctgaggcaggataattgcttgaacccaggaggtggaggttgaagtgagccaagatcgaaccactgcactccggtctagatgacaaagcgagattccatctcaaaataagtaaataaataaaggataaatatctggcaatatgttactgaatcctccaagaggccagggggtgtgtcacctcttggggcgccccaggggcctggagaataggttgattatctctattttggggagctgcaggctctgagagaggctctggggtgggtgttggacgggacagcatgaataaggggccctgcccttggggtcaggcacctcagggctgccaggtaaggccgatcttggcacctgggagcccatgtactctcatctccgtccctccctctatcacctgttggctgttgacaatagcaacaataataatagctgacgtttccggagggcatgctctgtgccagacccagtgctgagccctcgagggtaccagctcagcttgcccttccctgacccttgacagtcctgccacatggaaacagccacttcctagggttacaggacaccgactgattccccaaggctggtcaccttcctgcctttgcctagcttgaggggtcagaggtttgaacccgactgtctggccaccgcgctacctggtgctgcagcccagccgtgacactcaccggcctttaacccagcaggtgctccatgccggttgctgcacacagagctcccatgcattatccccttcctcccttgcttctttctgcaaacattgagcacctactgtgtgccaggcagtgtgttagacatttaccaaaaattaaacccagagaagtgacttgctcaaggtcacctagccaatcagtagcaaaacctgggtaagaatctggctgctgactcagcctctctctctctctctctctctctctctctctctgtgtgtgtgtgtatgtgtgtgtgtgtgtgtgtgtgtgtgtgtgtgtgtgtgtgtcccatggagcgttcttgctgccgtctgaagagctaaagccgtaggattctgcagtggggcaggggtggagagggaacagccctggtggcctgggaggggtccgctggcctcatgggctggccagcatgccctatctctatgttcattattaaatcatcctttctgatggatgagctgaaaagtgctgtgtcgggggatcaggtggcccaggtgatggttttctggtgagattgatggttcctgagggtcaaattcagagagcgatcgcttgggaaaattgatcccacagaagaaggggaaatatctgggctggagtgcagcaggagcccagactgcccgcccaggtccagatccaggcagaggctggtgccaggagggcacgtggcaaagggggcttctttcttcttctgtggctgcatttccttggctgtggctgggccacagaattggtaagcagggccatgggcagcaggcatgggggcatctggcttagtggcccctttcctggccttctttgtccccatggaatggacgcgaagccagcactgagagagacgcaggcagcaggtggctgtgagatccagctctagtgccatgcagccccgagtgccaagcctgcttcttccacccacagccctggcccttgacccatctgagcctcgcattctcacctgtaaagtgggaaggacagtgccttctgcgttttcacgaggatttgtttaataatgcatggcgtctgtccacgtaggagcactcagcaaattatttctatgtgcttgcttatttatttcatttacttcatctcccgagggccttccagaatagggcagagaaatcacagaaggcaggcagcctgaggcagggaggggaagggtgtgcctgtgtctgggggagctgtggggtggctgcagttccaggagcctgagtctatccaagagccagcacactgagactcttcaggctctgcccactgcctgcccacttcctaaagtggggttcaccagctgtgtggccttgggcaagttgcttaacttctcttgcctcatttccttgtctgtgaaatagagatagtcatagtatactctgcataaggttcctgtgaagaggtgataacttcacttgttgaaagctctgaggatccctggctctaggagctcctgagtataagaaatggaaaactggcatgtcctaggcacctgtttgtctcatgcaagagctttatagaccgtctcccacttgatccttccaacaactccatgaggcaggtgttactgccatccttattttacagattagaaaacaggccaagtgaaattcagcaactttcctgaggtcacacagtcgttggcagaacatcccaggccagtggggcccaggggatggggttaccatctctcagtcacccagaaagacaaaaggaaggcacacaaaccccagtgggcaccgctctgtgccagggcttttgtttcaccccaaccgtgatgagtgtgggtgatgtggccggtgtggtccatatcgctcctcagggccagtgtcactggtgtgcgtggcagcctgtggcatacacaagatattgtttcccgctcttcaggtgagaaaagcgagactcaggttggctaagaatttgtgcaggccacacagctgtgtgcaccatgagctgggcagaagccctgcccaccagcaccatgggggctcccggctcctgccacacaggccacccgggagtgcagacactaagtgtggctctgaatcgagctgcttggattcaagtcctgcgtctgccccttaccagctgtggaacctcaggcagctcacttcaccaccccaagtctcagtttccccatctgcacaacgaagataataatgacatgtcattcaggggattgctgtgaagggctaatgttctaattcgggtggcactctcagaacagttcctcatgcaaagtgagcactcacgcatcagctgtctacccaggagacttcctttgaggcacaatgtgatagcgttttgtttttttgttttttttgtttttctggtttttttgagaccaagtgttgctcttgtcccccaggctggagtgcaatggcatgacctcggcctactgcaacctccacctgttgggttcaagcgatcctcctgcctcagcctcccgagtagctgggattacaggcgcatgccaccacacccagctaatttttgtatttttagtagagacgggatttcaccatgttggccaggctggtctcgaactcctgacctcaggtgatacacccgcctcggcttcccaaagtgctgggattacaggcgtgagccaacgcgcccggccccaatgtgataggtttataaaaataggaaaacaaatctctgaagatttttaggagagatactgcaagaaaagcctggaagctgtaagcccttccctgtttccacacatcccgatcattcattcactcacagctttacccagatgtgattcacacgttgtacaatccacacatgtaaagcgtacaattcagtcgcttttaggttattcacagagttgtgcaactatcaccacagcagactttagaacatttccatcaccctaaaaagacactctggccgggtgtggtggcacacgcctgtaatcccagctacttgggaggctgaggcaggagaatcacttgaacccaggaggcagacattgcagtgagctgtgatcgtgacactacactcagcctgggtgacagagcaagactctgtctcaaaacaaaaaaaaaaaagaaaaaaaaagtcatctacctatcctagacattttgtgtaaatgaaattatacaagatggctgggcacggtgcttcatgcctataatcccagcactttgggaggcccaactgggaggatcacttgaggtcaggagtttaagattagcatggccaacatggcaaaaccccatctgtactaaaaatacaaaaattagctagatgtggtggtgggtgcctgtaatcccagctacttagcaggctgaggcaggagaatcacttgaacccaggaggtggaggttgcagtgagccaagatcataccactgtactccagcctgggtgacagagcaagactctgtctcaaaaaaaaaaaaaaaagaaagaaagaaagaaagaaattatacaatatgtagtctttcatcactgaccgctttcacttggcataatgttttcaaggttcttccatgtcatagtgtggatcagtatttcattactttttctggctgtatagtattcattgcctgcttacacattttgtttttctgttgatggatattgggttgttcccaccttttgactattattagcaatgctgctatcaacattcatgtacacattttgtgtggacatgttttcgtttctcttggttatatacctaggtagaattactgggcaactctaagttcaccttttgtagaacttccagaccactttccaaagcagctgcacaattttacattcccaccagcagcgtatgagggttctgatttctctgcatcctcaccagcaggtgattatccgtctttttgactctgcctatcctggtgagtgtgaagtggtatctcattatggctttggtgtgcatttccctgatggctgtaatgttgaacatgttttcatctgcttcttggccatttgtatgccttcttcggagaaatgtctgtgctgatcctttcctcattttaaaaactggattatttgtcattttattattgagttataagtgttcattagatgttctagatataagttcctttttagctatgtcatgacttgcaaatttttctcccattctgtgggttgtcttttcactttcctgacagtgtcctctgaagtacaaaaatatttagttttgatgaagtctaatttatctatttttttttcttctgttgcttttgcttttggcatcctgtctaagaaaccattgcttaattcaaggtcatgaagatttgctgctatgtttccttcttctttttttttttttttttgagacagagtctcgctctgtgctcaggccagagtgcaatctcagctcactgcaacctctgcctcctgggttcaagtgattctcatgcctcaggacctcccaagtagttgggattacaggcacccaccaccacacctggctaatttttgtgattttagtagagacggggtttcaccatgttgaccaacttcaactcctgacctcaggtaacctgcctgcctcagcctccgaaagtgctcagattacaggcgtgagccaccgcacctggctccctacgtttccatctgagagttttctagtttgcagctctttgatccattttgagttaatttttatatgtgatgtgaagggtccaacttcattctttttacgtgggtctcccatattatttatttatttgtttacctaataatttctttaaattaatatactttaaaaatttggtttcacttaggcagtatttttgtgatcccaggtcttatgagtctgacattaaaaaaaacatactgtgtattcaaaaacaaataatagcctgtagagctgttttacagtccatgcgcccatctcccccagtcatctcgtacatcccactttgggagccagtgctgatcatgatgagttttatggggagggagagtgtagcaggggctgatttgaggtaggggttgtgaaaggcctccccaaagaagtggcatttggcctagaatctgacaccacctctaaatattagctctaggagaaggggcagagcctgtagtacattccaggcagagggaacagcatgtgcaaaggcccagagaaaagcaagatcagaacatctgctggacagagacatggagagagagacaaagagacaggagaagacggagacatggagagaggggcactgagagagccagagaggccaagaggtcatacacaaacaccatgtccacacacaccgacacagaggcagtaccacccacagtgacctgcaaaagtcagagagaccagaagcacctgcattgaccaggtgccatgtgtgtgccagccttgccagcctttccccacacagtgccagctcctccctgcagccctgctagacagggcaattctctcctttggaagaggaggcactgtgcttgttctggggctcagccagcgagttgaagaggccgggacatcttctcctgttcccgaggaagacaggactgataggaggggctggccaggatggagcctgggcagagccagctggggagggacgtctggatttgggtcaggagaaaccaactgtatgactttgggcgacttctccctaccagcaccacccagcctgtccagctctgacatccaatggctacctattatcactgttacaatatgcttcttggattcggccggtcttctatgcatctttactaagccaaggtcaatgttatcacccaaagttgatggcaatcttttctttcggtagctgatatctaaaaatatcccttcctcaggccagcagtgcggagcacagccccggttccgtacagctgaggtgttcctctccagccagctcaggggggtgttagataggaattcagaagttgcgaattaaaacctccccaggtcagattttgcagacaaactcttgttagacaaagtcagacaggtttcttccctgcaggtcttgtcagagcctttaatctgctgagatgtattatgaccctcagtggagtgaggtaggatcaaggagcagatgtcaggggatttggagagcatcatatgcttgaccaaaaaggtttaagcacagaaactttctgtgccaaggaccatctctgggatctggcatctccagaaagaagggccgcccgtaccaataggtgcctgctgtccccctctgtgcctttcccagagctaagcacatagcagtcctgcagcacgcatgtggcaatggagggatgagaatgccagggaaagagtgaacaggctttttaatgctctatttatttcagcttggtgttccagtaaaacctcggcagggttagtgtccaggctctcaggggaagatggagttaaaatcacacagacttcagcggtggctagtgctgctggccagggctcttgctctgcctcagaattctgttccagagaattccagagacgtccttcgtcctgggaactgagcatcacggcacagtggatacatgtaacctaaagcggtgggttcctgagtgccccctctcccacggcccacccaggacctgcaggattctctcctcctcctgggaggaaaggcgtcagctcagaaactcactgccttctccactctggcctgacctcatgtttctaaataacatttctaaaacatggactttaggccagtcgcaatggctcacacctataatcccagcactttgggaggctgaggtgggcagattgcttgaacttcaaccaggagtttgagaccagcctgggcaacacagggagaccctatctccacaaaaaataaaaatgaaattagccaggcatggtggcacgcgactgtggtcccagctactcgggaggctgaggagggaggattgcttgagcccgagaggcagaagttgcagtgagccgagattgtgccacggcactccagcctgggtgacagagtgagactcggtctcaaaaagcaaaaagactccattgcctggatttaccataatttccctaaccattctgcaggataattcgaggacagagagaagaccccaaggaggaaggcagccctggttaccaaagctggcagatgggggttagctggaagccccagggctggtggacgcaggggccgctgtttccccacccagatccttgctctggaaggcggcccccaggggacccttcattcccactcagacagggacagaggcgggacagagccgagggaggagggctcagatgaagcacctggcaggactgagatatgagggaggccggatgcgaggagggagctctgcagcctgtggtgtccaggaggatttggggagtgtgaggtgagaaaacaaaaagcgtcacccctcccagtggaaggggagcatgaagagagaagaaaatgccagttacacatcctcaaaacaatctctgaatggacgagagccagtcagggggaaacggaagttgcagtgagccaagattgtgccacggcactccagcctgggtgacagagtgagactctgtctcaaaacacaaaaagatgccgcacaccccaggcgggacgggtgggcccaggtgccctgccctggtccaggcctctattcgcaggatctcactgatctctccctgcccaggcttttgtctcccagacaaaccagtctccatgaagcagccacagcgttataaaatatggcccagagcaggacacgcctaaccagtcaaaggcttgcagagtaaaatcccgcctccgtctcctggtctggcctcctccaccccccagcctcattgcagacctcacgggtggaacttctttcagccctagggctttcctcatgctcttgcctctttctagaaggttctccccttctggcccggcaactcttgatcctccttcaggtcttagtttaaaactgttcttcctggaaactgtggactcccgtgatgccttcttctttgcacaacccgtgggctcttttaacagttgaacactggaagaggtgtgtgattcgtattgttataattaatagactttatttttagagcagttttaagtttacagaaaattgagcagatagtacagaaagttcccatttccccacccccctgcacagtttcccctattttggagtatatgtgttacaatgatgagctaacactgatacagtgtcattcactagggcctgttatttacattaggactcactctgtgttggacacttcagtgggttttgccatatgcataatgccacatatctaccattgtggcatcataaagaatggtttcaccgccctaaaaatccctgtgtgccacctatttatcctccctccctgtcccctccaatcactgattttgttcattgtctccctgctagacccgaagcaccatcaggtcagggagccatctgctttgttgacattatactcactgttcccagctcagagcccctgccacataacaggtgcctgataaatatttttctttgcatattttaataaaaataggattctactaaacccattgctctgcaatttgctttttccaaatattgacaatatatcttggaaatcttcccatatcagaatatagagcacactctgtctctctttcactttttattatggagaatttccaacacaaaagaagatggtgtctgccatgatgaacctctgtgtacctctcacccgactgcagttaccaactagtgaatcttcttgtttcatctgtacctctgcccatcagataatttcatctgtaaatatttctatgtgtatctctctctgcttttttttttccttttgagatgtagtctcgctctgtctcccaggctggagtgcagtggtgcaatggctcactgcaacctctgcctcctgggttcaagcgattctcctgcctcagcctccccagtagctgggattacaggtgcaccatcacacttggctaattttgtatttttagtagagatggggtttcaccatgtcggacaggctggtcttgaactcctgacctcaagttatctgcctgccttggcctcccaaagtgctaggaatacaggcataaaccaccatggctggcccttttgttttgtcttgttttgtttttgtttttgttttgtttgtttttgttttgttttgttttgttttttttggagacagagtcttgctctgtctcccaggctggagtgcagtggtgcaaacatggcttgctacagccttgaactcctgggctcaagggatcctcctgccctagcctcttgagtagctaggactgcaggcatgtgccaccacactggctaatttttttattttctgtagaaacaggatcttactatgttacccagtctggcctcaaattcctgggctcaattgatcctcctgcgtcagcctcctaaagtgcttggattataggtgtgcaccaccacgcctagcctgtgtggttctctaaaagataaggactttaaaaaacataaccacaatatcatcatcacacctagtaaacattagtatctaatataggcaatgtccaaatttccagttatctcataaatatacgttccatttgtttgcgtgtttgattttacaggatgtttgaaccaaggaccagaggagcttcacttctgccattaattggtatgcttttgaggtttctcttgctctaggtccatcctttttccgtatcaattttttctccacgcaactcatctgttggaagaagtgggtcattactgccggagtttcctcgagtccagatcttgcggatggcatcccctggtgtcgttcagggtgatgctctgtcctctgtctttcctgtgcgctcacagctgggtctagaggcttgatctgattcaggttcagttgctttggcttcgggtgggggtgtgttcttctagagacgctcactgtctgctggcctctcagtgggaagttctgggctggtgcggctcagtgcctggagctatgcattcatcagggactgcaaattctctcgtgaaatgcttctataaaaagaagcttcccctcatcaactttcggttaccccgaggtacagtttatataggacaggcaggataaatgcttgattctttccctttatttaccagttttcagaataatgagtcgcctataaatatttgaatgaatggatgaataatacacctgtgaatgaactgacgggggtgtgggagttgggggttctatctgttgccctcaagggcgtggctgtgggccacaacctgacagcagaggtccagcctgaagccaggtgcctttctacacaatgaagtgcagcccatggccaagtctctgtctacaccaggtgctggcagcagcctctgtcacccatcaacccacatcagtcaaaggctagggtgatcagaagctgcattactaagaatctagcatctgggacaaggcagtatcatcactctccccaactgagatgtgaggaatccttgaaaccagcatcagagcagagaggagagccgcgcagtgactgcaggtgtggcctttggaacacggcgttgatctctctgcaggaaggggaatcaaggagtttctggcctaaaggttgggctggtggcctccagggtttcttcctgggcagcccaacaccctcctgggcccctcctgggaggcgctcctttccccagaggccaggccaggctgcccacaagctctctgacatctctgccctctcggtgtctccccaggtgcaagtgcaacctgcacgccaacctgtgctccatgcgcgagggcagcctgcagtgcgagtgcgagcacaacaccaccggccccgactgcggcaagtgcaagaagaatttccgcacccggtcctggcgggccggctcctacctgccgctgccccatggctctcccaacgcctgtacgtgccatgccccggggccacgagcccacatggctataatcttccctgcccgtcaatcccaggagctgtggatcatacacacgcacacaaacctgcacacaggcacatacgtgtgcacatgcatgcaaacgtgcacacagaaacatacgagcatgcatgcacaggcatgggcacacatatgaatgcaaaaacacgtgcatgcacagaaacacacgtgcgtgcatgcacccccacacacacaccttgttctacagctcccaaacgccaggtctcataacaagtccctctagcatacctgcatcctgctgaatgctaagctgcccttccagccctggtccacagggaaacccgagaggagctgctcagcagcattcctgcaacccttcgccttcttgaccctgaaggctggcaggtggcccccatgggatggcagggagtgatggggtgggacccccacttcaggtgaggggatcagtagcatcatccctgatcataagcatctctggggtgtttggagcgagccaccaaggccaagtgctgcgtgttcagcactcacctccatcctcagagcaacccctgggaactgagcttccgttatccctttttacagatgtgtcctctacggcctgcaccagagtccccccgcacgtgctctctgcccacccctctcctgtcctcgcccagccatgccagggagccatcctcagggcctgcccactcacatctgcatcatagacccccttctgaggaccacccacccgggcgcgctagcgtagtccacactgtctccatgaaatcagaatgccaggaagcccctgggctgcaagtggagaaggccacagactgcccctggggtgggctctccctgacccccaccactgccactttacggccgttctcaagtgtgtggttggtgtccgaggccctcctaggcactttgtgcatctcgcttcaccctcacacagccccgcagggtggagtccttattacggtcccttctccagatgagcagactgaggcccagcgaacctcggggccctcccaggtttcacagtgagttgcatgccaacgccagggcttagggcagctactggatctgatgctcagaccaggcctgggcagtggcctcctgcaccccatctgggcatcctccctcgacgggtgaaagatttatgtgactttaggctgatcaaagctgagagccacgtgcagaggccatgacaggcatgtcacgcgtgtgctacagcaggcggtgagacaggcctttgaaggggtgacttggcaggcacccgacagcactctcgggtcttcaaaggcacaaagagcactccgggggctgacagcccactccagccgctgcctcctcccagcttcctgtccccatctctttgtggtccaaaccctttcctgaggtctctctttagtggccgtcactctctccctgactcacaaatttgctgccctttcgtctgtcctgagggccgctctctcttccctcctctctgtctcagttctctccaccatcacaccctccttttttttttttcttaaagataagtctctcactctgtcgtccaggctggagtgcagtggcgcagtcatggctcactgtaacctcaacctcctgggcttgagcgatcctcccacttcagcctcccaagtagctgggactgcaggtgcacaccaccaggcccagctaattttcgtgtttttttcagagaaaaggttttgccatgttgcccaggctggtctcgagctcctgagctctagtaaccctcctgccttggcctcccaaagtgctgggattacaggcatgagccaccacgtctggccatgtctggcttttttcttccacttgccccctgcgcctggagggttctgcccatctctggccacctgagactcttacctgccagtcacacctaggaggatccactgtccccaccctcacccccagtcaccacctccagtctagccagcgatggatagacaggcctgtaggggctgggcagctgggtcttccttacttaggggagactcctgagctggccccacctcctgcttccctgggagtccccgggaattgcctttgaggcccccaagccccaggaaggaggggtttcttctggcatttgcagggtcacaggtgaggctggaggcgctgctgtcctcagcacccaagtctcctgccttctctggggtgccagcaggaaacagcccaaagagacacagaggctaattttgccctcaccctgcccctaccgtgacccctcctcagtaagtggcaccgacacccacggggccaagtgcaagtctgggggtcaccttgactggagaccctcctcccgccacgttctttgaacttccctccatccgctccaagtctctcccaatgccatcctcagccctgcagcagccctcactcccgatgccttcccacctcctcaccactctgcccccacctggccagcccatcaccctccagggcccaacttggagcccccaggacctccccgtgccctgcctgatgtcccgcctgtccccacagagcctcacttggtcaccacccagtcctggcccttgcttactgtggctgcaccccgaggtgtcctcagggtctagcaggtggctgcccagacatggaggtggaggaaggagtgggtggggatgggcttgtcctcccaggcctccctgcctgtcctgctggccacagccttggcttgcccaggagaagcccatgggccacacatcccactgccaatcccacagcgtcctttctcgggaacaccgtggggaaagctgtggcaccagctccttccttttgcaactctgatgaatctcacccagggatttcaaggcccctggtcacaccaggatcataggcctcccccatcccctggacacacagagacacacctggattcaggtcaggcctcgcccactctcggctatatttctccccaagccgtgtgtcctcagctgtagaatcaggaccataaggaagttccctcatagggttcttgtgaggacggcacgatttacgcaggggatgctgacaccgtgcctggcacgtgggacgcactccacccgcggcagccgctcccatggcttctcagtgagttttccagccacactgcacttcttagacaggaacactccatacgatgtccctgtcctgcactggagggcccaaaaatctgaaataagaggaggagtgcgtgtgaagctcccagtggagcgtttggcacctgtccagcatgtccccaagggcaagtcacggctctgagattcagtgtctccttctgcaaaatgggccaatagtggttcctccctcccagggctgaagtgaggatgaaatgggataatccacccccgtccccacaccctgcaggtcatcatgattgctagcagttgtgtggtggagcaggtgctcttgagggagcgacacctccaggtgctcccctgccctgctggcccctctgcagggaggtgacacccaggccccttcccctggggcagccagctcacgcccgtctctctcccacaggtgccactgcaggttcctttggcagtaagtacacgcctggggagggtggccagggcccccactgcacgagcctctttgcatgtcctggaaaaagctggagagaaaaaaggggcttcagtgtcccctctgggacttgggcctattcactccctcctctaattacaccccatctgcttctccacctctcccccctccacctccccccctccacccatccccacttcacatcatatgccatgtgtcatgtgtcattttgctgtggcctgtggcccagcaactctcaggctctcccaggagctccatcagtgctgctttggaaaacgggacaggactttttgcaggtctcttggcccctgggtgggctccctgctcctcctgccacccacgccacttctctcacctggatctgggagagcagtctctcctgccagtcaagagtggggtgaccttcccccaccaggggcagaatccaccccctagcctaaccatgggggcagcctccctctgggcagcctctgcagccagcttgtcccagggctctgctcgtccaggtcagctcaggtcccaggggagtcggaccagggaggggcatctgcaggaggtgggggtcctgagagttccccaggagggcgagggcgacatggcgcccacaggttatcagtaaatgtcatcgagactgtccccagacactcacagggtgccaggcacggtctctcctttcagccttgcaaacccctccccctgggaggtcgccatctgctctgcgaggcagcaggagaggactggccaatgtcaaagagccagccgggagcagaccccaaatctcagagatgcttctggggtgcaccgtcaccctccaccagggctctgtggggccccacatcccacccaagttgtccctcccggacccagggggcccctggctgggaagccagtgagccgagagggcgccagaaagaagctggaccctgcagggacgctggtctgcacagccgtcgtaagttgcttctctgtggtgtccccaccccggcaaccccccaaccctctcttgcttttcccatctctcaccaggcatcagcaggtcccagaaagaccccgaccccaaaggccctgtggccactgcggccaccacagccatgacaggggcccctactactcctgtcccctccacgtccactgcctgggcccccatggcgcccagcaccccacagcccacaggtgggtgccagggtacagcgacccctgtcatcccaccctctcctgcttctagcctgggtccctgcctctcttggggtgggagggtcggcagccctgggcagagagcaggggcttggctcttagaatagagacgctagaaccctagagctgggaggccacaggccaaaggggcttgaggacacctgggtcaacctgttcctgagcccagccaggggattcagggatcagttcagcttccaaagtcgtcttcctcctgcccttcaagccattgcttggaagggctcccagaccattgtggccagacggctgcaggaactgagaggaaaggtgctgggggcagcgaggccatcctgacatgcagccaaagactggccttatctcccaatggtgcttctgcctccgtggtccctggagccccgcccacaccctgtccccacctggcccccagggcctctctgtccttagcccctcagcagcacaccggtgggatggatggagcagggttagcccagaaagcaaatgtctctgatcagcagggcaaagggagcctctggagctgagtttggacaccgtgggctgctgggaatgtggaggctgtgtgtgtagtgcaaggccaggccagggccagacgtcctgccccctcaggggtctgccacagacaggcatggaaacctgattctcgctcccctccaacggagggattcacgtgtattcaaggctgggggtgctggagtgggcctctgctctcacctggactcacctggggagtatccctgcactctgtgcagtgcaggtgccaggggtctgaaaggatttatccttcccagagggcaccaggaagacgatgaccaaggggaattcttcctggtcccagccagggaggggtgctccaatagcctgccacaccctgtcccccgccaccctgcagggaggacctggtggggactcctggccccttgggtagtgccctggccctccatctctctgatccaaggagacctgccccactgatccttcccccttggggggtggcatttctaaagggcagagtcccctccatcagctcctgcctcggcctgttgctgggtggacactcaggctccccagacaggggcaaatgctgagagaaagacctcctccttcctaggccatccagagcagctcccctgggggcagcacaccccacctctttctacatccttccttttctgcaggaggcatttacaggaggcaggggctagccaaaagattggaggatttccgggaagcctcctgacccaggaatcctctttggggtggaagacatgggtcactctgagaattctggacttcagacataggttggcccagccacaagggacctgtgctttgctgctgagcctgtggtgggcagacagaagcaaaaacagtggtggtgggtgctgtgcctgtctccaaacaggggtttggctgggaggccagatactctccatatcacatgtgcaagtgcacacatgcacacacacacatgcatgcacacacacaggcatgcacacgcacatgtacacacacacacacacagaggaatccatttgcagagctgcttctgacttggtgccagggcagccgtgggaggctgggcagattgtgcaaagttgggaattaaagaggaaaagtcagaggccagagtgggaaatgcaggggaggtgagggtccccaggaccccctcagtgagcagaaggcacaccctccctctcggcaagacagtgctgctctgcaccctcagccctgtatcaagaagcaggacattaggggaggaggtggctccaatgtgacagccagtggcccctacagcccacatctaggggctcctccctcctcttcagcaactgaagcccctgtccagagcccccattaatgaaaacgatcattgcagtagctgagggtgagttctcctgggctgtgctcgtatcattgtatcatcatatcattgtattctgggctcacagctccgtgagatggaggctgttattttcctagtcccacaggtgaggggatcgaggcttaggaagaagcagctggattttatgatatgtaaattacacctcaatcaagctgtttcagaagaaaaaaggggcagctgctcaaggtctcagaattatggagaggcacgggcaggatttgaactcagggctcgccaactcagccacccaaagctattgtcctgaggcctccaggggctatgaggtagagctatcttttttttttttttttttgagatggagtttcgctcttgtcgctgaggctggagtgcaatggagcaatctcagctcactgcaacctccgcccccccaggttcaagcaattctcctgcctcagcctcccgagtagctgggattacaggcacctgtcaccatgttcagctactttttgtctttttagagagacagggtttcaccatgttggtcaggctggtgttgaactcctgacctcaagtgatccacccgcctcagcctcccaaagtgctgggattccaggcgtgagccaccgcacccggccaagtagtgctgtctccaaggcctggcttgcagggcttcccagttccaaaggagcagaccgggcttccatggggccttggcacagcacacaggccatggcgagaacttgcttcccacacacctgagtgtgtccctgggcagccaagccaggactctctccctccccaagaccctggtccctgaaagatcctgaatacccccgagtgcctcccaacaggtgcttcgggctctttgaacagagtccagctgggcctctgaactcctgggccagatgtttctcccgcctgccaatgtcaagctgtctggaggacagcgctgcgggcggaaaacgccgctggagacactaatcctttcctgggctgggccacggaggatggagggagacaggctctgaagcaaatgccttcagggctggctttctcatggctctaattaagcccttgccaatttgggcctggcggcctcatcttcccactgaacatcatattaaagtcaattcatgtccaaagctccccgctcccagctggaaagtcttccgcacttgttagctggtagcttttccttttctttccccacagccaccgttgtgtataatcccttcaagaagcggaaaacagcagcgctcccctgtccctctgggtttgtcctttgaaatttgggcacagggcagttctttgccagccctgcctgcctgccttgctggctgtgtgtcccgttagtctacgggctgagcgttgtgtcactggttcatgctggggtccctggtgaaaatgggccaggccaggggtcaggaaggtagaagggcagtgatcagggaagcaggtcagatgctggggaaggctccggtccctggattgcggctggacaggaaggacaccttccaggacacttctggacacatgtaagatcttggccggaacacatgtcccacttcgcagccattagccagagacatcagctcagagaggtctgggcccagaggcgggacctggtctagctctgtccttcagtcagaacggggacggcacagggagtgtagaagggtctcgctgaagaatatgcagattctcaggcatgggttcacctctcatctatcgggctttaagtctgcatgtgccctccacaggctgaaatagtgtagatgctgcctatgtagtagatttggacccaattcctttggccagtgtagacagagcctctccttatagtgctgctgcttctaaggggcctgtggggtgcggggctgtgatgcctcagtatgtacccagcttccctcagcaccaccccctcgcataacttggtttcttctcttcttccccccaagagtggaccaggccatctacggctgcccctctctcgagcaggtggtcccaggtggcctcccgtgcagaaggtatgggggggcaaggcctgtgatgggcctgagaccccggggaagcgccctcttagactcgtaggcccctccctctgtagtggaagtagcaggtgtgcatggtggggacctgaggttggaggggggccgcaggaaccaactgagggcacgggtgtagaatgtcggtgcctggggagctctagggcacagtggtgagggagcggcctggtagagcaggtctaccagctctgcccccaagctcacctgcttcaagaggttccatgtggcacccccacgccaagcccttccaccagcactccctccgagggcttcggagtctggtagaggccccgcctcccacgacaggaacccccctctccagctgcccttgctcacaggacacctgggcagttgctggatcagagagtcagagggggcttcctgcaggagcgggggccatgagacctcggagggtggactgtggtgggtgaagggagaaggcagcacattccaggccgcagggccagccggggcaaaggcttggcagtgggatggcagggagcctgacaaagtggaaaatgtgtgggttaaaggagggagggcggggtcctggaagacactgacatcctcctgctacgtgggaggagacacagggctcatctgtagccatagacagacatgccaaggaaacgcgcaggcctgcccgactctccagaagggaaattgtccctggccccagctcaccaagcctgggtggggaattagggcctgaggtctagggaacaggtgagctgttccttccagctcacatgttcaaatttcctccagccccagctctgagcagcgagcagggctttgagcgccctctactggcaggaagctctggcgctggaagcatgtttagagagggtctgaggctcggttcctagaaacctggaggacctgggcctggtgtcctctgtggtgatggagacagagctggcgggagccatcgcttccctaccctgggccaaccagggcaccacagacccccagagggaagccaaggtagtgacgatcccgggacagtggcctgctcacccacagatagggcgttggggtcccagcgggattctgggcagtggaaggcaggtgccgtccgtgttcctggcttgacagcacttgcgagtgggactccagggacagcgaaggattcacttcggctggagcaggaagagtgtttcagaaaggaagggagatgccaaagtccttaaatgccaagtttagtctctgggtttgatgctccaggaagtttggagaggcggtggggagagcaagagacgggcgtggtgtgcaatgtgatgtcaatctatctaaaaacagtttggcttccaagaaggtcttagcagggcgcgggggtgtcaggggttacagaagtcatttggaggattaatccagccagatgtgtccatggtctcagagaggggaccaagggcagggctgatttgcaagcttgggatgtgctgtgtttccttcaggaaggggccccacctccctgggctcttcgaggagaggggctgtgtgatttgaggccagaggggcctctccctccctcacatctgagcaggcgacaaggctgcctgccctagagctggcccagggcggctcggaagcctttgctgggctcttccctgggcagtgggaccatgacagacgaaagaacctgtttctcatctctccaagctgtgggcacccctgccgctgcccctgcccctgccaagggctacaaacttttccagctcaagcccaaatctcctcaagtgatgcctattgaagaattccaaggtaagaggatggacctggggccccatcagccctccctgacacctgttccccatccgccgctggaaaaagacggtgcaggatagaggaccgatgcctggctccgaaaaccctcctggagtagctgggtcaaggttaaactgagtctctcttccctacaggcctccctccccaagggagctgggagcaggtatgagtcagaagccaacttgggcacagtgggcaggccacacagcaggcagagcagatgccagaaatagcccatcccggctcccctgggaggtgtggccctggggctcgtgttggttgaagcagaatctgggacacacgggtcaccgatgctgctctttgggacacttagaggatgcctcatctcctcattatctctggagggacaaagtgaagggggcaggactaggtggcccacaggtgggagtgcccaccatctctcctgggcacaggctgtttctctagtctcccatgcccttgaccactgggtcagtccctcatcccatcacaaaagggaagctgggtcctctagagatacacagatggtgtttcaagagggtggccgttgtccttccttgttcgggggcagccacattggctttcttgctggagggtgggtgggtgggtgagtactgtgtcccttcgtaggaacatcaagggatgcccccccattcttagggatggtgaccttcctcaccaaatcctccattgacaatgtgggattcacctccaatccctgagagccttgccccaggcagtcacgggcttgtctggtccttggagcggagctggttaggcaggggtcagcctgagaaccacgtaggggtggggtgcaggaggcggcaggacatggtggtggtggtccttggtatgaaaccatgtgcttccaggagcagcgagtcagaagccgggccaggaccagggggaggcatgcaggttcccagggctcctgctttaaagtggcactcactcttagcatcctgcaaaacaatcaaacttgcagaaagctcaggctaataagaaagggtctggcaggtgggcgttttcctcccagccatcttccaaagcagcatgggcaggagctcctggcccattgcatcttgtccagcgtccatccatgcattcatctacccgaggataccacggcgagcgccgtgaacccaggcgtcgccctcccccagtgcacagccaggtggcatgaccctgccctccttgcatgaatcactttctaatcaccccggcatgtgggcatccttcagcgagcgcttggccctggtgcccagccaggcattagcaggagctgcccactggccctccctggttccctgcccacagggccaggtgggaatccctgggctcagcctactcaggttctcctctgggctcaaagcagggaggcctctctcttcctgaatccgatggaagggtgggaggcctagggcaccttccggtaccttttccaaagatgccttcctccgtccctgcatgacctggggtgagtccttcctcgccctgtccctcagtttccctgaatgctcgctgaccattggtatttctcccacttggccggcccagactgcgaatgctacggtcactccaaccgctgcagctacattgacttcctgaatgtggtgacctgcgtcagctgcaagcacaacacgcgaggtcagcactgccagcactgccggctgggctactaccgcaacggctcggcagagctggatgatgagaacgtctgcattggtgagagggcacggacacggcacagggaacttgctggaatgcgtgcagggtgcactgccctgcgaggtggcctctggggccccctgcatcagaatcacctggggagactgtgggaattctaactccagggccctctccagttgagcatctctaaggacagaaagctccagaaactgctctattagtaacctacccttgcggttctccggtaagttttgcactggagttgcaaaacttaccagtggcccttccctctctgggcaactggaggggacactgacccttcctggctccaaagagctgtgactctggcaggtggcaggcactcagtggcagaggccactgagcatctgtctggggctggtgtgtgggggggtccccctccatagctcctttccagaaaggtggaggagcagcctatccctcctcctgcaggggcccagttgggggccaaaagatcgccttgctgcgtgcatttgtgcaagtcccttcccgttcctgggcctcagcttcctcattcatcaaattgggaggcagatcagatcaaaggttttcagctcttttttgtggctgaagcttttcttcaaatgctttaccagcccaggtccagctataaagctgctcttcacccctggtgggcacccagtctgctttcttccaagttctactcaaggactggcttttgggtagagaaggaagtccatcagggccctgggcctgggcaaagaccaaagccatgaccgccaaccaaaacgcaccagcctggaatggttgcccctgtcgtcagtagaggccaggtctcggcctcaggggctgtcccccaaccctgcccagccaggccccttgggacaccatcacccatcccccacccagcaggaggctctggctgcccagaggaggggctcctgcaaagctggagctgtcggtctgaattctggcggcagccttcagataattccatcaactctaagtgatcaaagccgctgacgtcacagggggccagctgcagggacagggcagggcctttggatccaattagaggtgcccacaccctggcaccctcctcctctccctggctctccctgcctccaccccgagagccagcactgagctgcaaggtttctcagggtggacgatattcaccctctcccacagagccccaaggcaaccaactgggcccaccccgggagcaggaataggctgttcctccactcccctgcaaaggagctatggaggggggccaccccacaacacagcagccccagacatgctcagtggcctctgctgagtttctgccacctgtcggagtcatagctctttggagatgggaaggacagcgacccctctagttgcccagagaggggaaggggctgacccaggccacaccagtgccagggcggggaaggtggggctgggacgtgtttgatcccaaggaaggaagccagagtcttctctccaggcctggccaccctgggaagtccccacctgccgtccagccgcgggctcacgtggacccagtgtggggagcatcccctggggagtgtggagatgctccctgcgaggccgggagagtgggggtccgagaagacggcgcccacacgtagccctgaccgcgcgcccgtgcccgtgtccgtccagagtgtaactgcaaccagataggctccgtgcacgaccggtgcaacgagaccggcttctgcgagtgccgcgagggcgcggcgggccccaagtgcgacgactgcctccccacgcactactggcgccagggctgctaccgtgagtgcgcgccgtcccccgtgggcggggcctgcggaaaggggacggggcaggaccgaggcagtgggcggggcctagtgggacggggcaggggcggtggactgggcctagcaagacggggcagggccggggaagtgggtggggcctagtgggacggggaagaggcggtgggcggggcctcgcgagacggggcagggccggggcagtgggtggggcctagtgagagcggggcagggttgggatagttggcaggggcctggtgagatggggccgacccgggggcggtggacggggcctagcgagacggagctggcaggtgggcggggacaggatgctgctgaggtccggggccgggccgaggggcgggtccaagagctcggggcggggcctgatgcgacctgaggcacggtggtgcctggtgggaactacgagaaagaccgagctggggttggttggaaaggtatttgcggggacagagggagggaggctgtccaagtcggcgttagccgcgggcacagggtgaaaggaggctccaggcgcgtggaacagcacgtgcacagctctggagactgcaggcgcgtctgaagaacagcaccgaggccagtggggcggggagagaggggcagcggtgggaggcagccgggggccagatctcgcccgggcgccgtcaccctccgaggggggacgtttcgcacccagcgcgcctggagcctcctacatccccggcccagacggcgcccccgggatctcgcacaccctgcttcgcaggagctcggaggttggcggggggaccgggccaccccccgtgctgaccgccccctccgcctgcagccaacgtgtgcgacgacgaccagctgctgtgccagaacggaggcacctgcctgcagaaccagcgctgcgcctgcccgcgcggctacaccggcgtgcgctgcgagcagccccgctgcgaccccgccgacgatgacggcggtctggactgcgaccgcgcgcccggggccgccccgcgccccgccaccctgctcggctgcctgctgctgctggggctggccgcccgcctgggccgctgagccccgcccggaggacgctccccgcacccggaggccgggggtcccggggtcccggggcggggccggcgtccgaggccgggcggtgagaagggtgcggcccgaggtgctcccaggtgctactcagcagggccccccgcccggcccgcgctcccgcccgcactgccctccccccgcagcaggggcgccttgggactccggtccccgcgcctgcgatttggtttcgtttttcttttgtattatccgccgcccagttccttttttgtctttctctctctctctttttttttttttttttctggcggtgagccagagggtcgggagaaacgctgctcgccccacaccccgtcctgcctcccaccacacttacacacacgggactgtggccgacaccccctggcctgtgccaggctcacgggcggcggcggaccccgacctccagttgcctacaattccagtcgctgacttggtcctgttttctattctttatttttcctgcaacccaccagaccccaggcctcaccggaggcccggtgaccacggaactcaccgtctgggggaggaggagagaaggaaggggtggggggcctggaaacttcgttctgtagagaactatttttgtttgtattcactgtcccctgcaagggggacggggcgggagcactggtcaccgcgggggccgatggtggagaatccgaggagtaaagagtttgctcactgctgcctccacggcctgttttctttctgtgttggggacggtgggcaggtgtggggcttacagaggaatccacaacacagccttaaagaaacggtttccctactggggccaccatttccctgggcctttctgtggattccagcaggcagtgccccctccccgcaggcttggctggcagagttttccaccccgcggccaggctgcaggtgccccacctgttaggagcctccccacactgaaaggctgcctccctcctttcccaaaaaagaaatccggagtgtattggcccttttctacagaagtccaagggaaatgactcagggagaatcctagcagaggttgaatccaatgctctgatttatactgtgtctcggtggccacctccgatggatgtgtcatctcagacctgttgcagccggagcctcaagtccaatatcagatgaagctgaacccacaattcggccaccgcctccttccagagtttcagatggccaggtgggcagaggcgggcagtgcagagaccccagacgtgccggccctgtcctccctaccttctcaagattaggaaggggtgctggaggggacaggggcagcttgggagtggtgaggaagctcctagattcggggctcatcccctggggcctctgattcagaggatccagcagttctcccatctccgcttggtgtctccagccctggggccacacttccccctcggtccagcctcctgtccacctatgtttatttcagagcagtgccgggggtccggtcctggttgctaactgctgccactgctccacctgcaggtgctcccagcactggcttctgccaccacacctgttctttcccagctgcgaggtttagacctgggtccttcccttgagtccccaaagctaagctaagaccaagtggaacaaacttggccttggggacagcaggagattacaacacagaaaaggagggggaggcacaacgggacactgcataggactcacagtgtcccgagcccacacaccagcccctcctggcctcctctctctgctcccacccccagcaccctgctgacccggaagtgccttccgacaggccctgcatcctcctgcagctggcccatctctaccctcacattcttccttacgcacagaaccccactgcctgggacccaaagtgcccagataaaataaaacacctctctggggcttcttgtggataggagtggccaggggacacagctctgggcagtgagatgtaagcaggactgatgggtgggcttccagaaagttcttaaaagtcatcccttcctccacgccccacaaagcctcagttgtccaagtttgtggctctggtttttctctctcatccctccctctgctcttcagtcagcaggatggggaaggagccttcttgagacactgagcataacagtgtcaccctcaggatagtgaagggtggagccgggggtggaagttgcagagcctgggacacctgccttggctgcaacctctgcactgcttttatttatctacttatttttatagagttgaggtctcactatgttgcccaggctggtctcaaactcctaggctcaagtgagcctccggccttggcctcccgaagtgctgagattacaggcatgagccaccgcaccacctgcctgtcttactgtgtgagaaaaaaaataaacggtgatgtgattaaaacactagaa

SEQ ID NO: 319 - DNA, 47055 bp, Homo sapiens
  source 1..47055: mol_type = genomic DNA; note = NC_000004.12:337814-384868 ZNF141 [organism=Homo sapiens] [GeneID=7700] [chromosome=4]
gtctttgcgtctggctactaccagaccgcgggttaggggcttcatctctctgcgttctcagttgtgggaggccttggtgattcggccacagctcagcctccgtcgctctgtgacctgcgggtattggatgattggtagctaagactcccgaatacttcagaagtggggaaatggtgagtgtgcggggcagggcgtcccaaggctgaggaggtctcatcggagctggcgggaaatggcggcgggaccgagtctgcgaacggagtccccgctgccgccgctcagccctggggcctcagtaccctccggtgagggacctgggctcctgtcggtccccgcacagcggctctggcccagcctgcagccctccttgtgcagctctgcgcccgcagccccgcaccttccccaggctgtggggtgaggagtagcttatctggaagccgcccgcgcggcgtgcgcgatgccggcgtgggaggagctgtgggagaagctgtggtctggggatcccgtccctgctttaccctgttcggaatgagatcgaggccccatcaaaacagagttcatgtgagcaaatggggactcattaatgggacagcgccggccgtggctcgtggtttgggggctgccagcgggtcttgaaggaaaagcttttgtgaggtgtgtgaggaagcgaagcaaatcacccgcccgctccaacttgcccaccagtctccttgccctgtgcgcctcctccgcgtggctgttcctgagtggcatcttttagaatacgctagtgtgggcgcgcacagcgcttcgctgagttctgtgagtagttctgtcatattattgaacttgaggagggtgtgggcccctggtttgtagacaggtgttcagaaatgaagacgggtgtccagaggcagggactggcgtctgcaggggggcagctgcgggaagagcgctgagcttgtggggtctgtgctgactccgggtggtgtcgttagtgagttgttggacagcccgttggggtcggagcattgactggtgttgagcaaactcctcacgtttcctgtcagaagaaagacatggctgagcctgggctggagggagtcgcaggtgtccgcgggagaccagccgggttctgcacatgcactgtcctgctgcgcactgttctgttcctccaggtctcctcccggggagagagggcgctgagaacttggaggaaaggagttctgagaaacatcccttccctgcaccctgctgccagcccccacccaatgctaacccactcctgagcccgcccattgggcattcgcacggccacacttgtcccaggacagggttctaccctcaggaattgtgcccatggcagctttgctcctaggtttttctcccaagaacacacacagtgcccagaagactcctggttcattttaaccccagatctgtagcaggaatctgttttcttcacccacccaggcttttggaccacctgatcctaatctcctctgcctttatgggctcaggaatcagttagagcttagccctgcctgggcctgaacttgtagcacaaaccagtcctttcgtcaatcctgccttgcccccactcaaggctcttgatagcacctttcttctgctcttttcttccccacaaatcctctttcctgtgcacacagtttgctcaagtgcatccctcatgtgctacaagaattcaacgttagtgagttcaagaccatgcctttagacctgcctgttgtaggaccaaatacaaatcagaagaggcttaatgctttctctttagaatgaggaaagaatttttactcttctcccttaaagcatttagtttgaaaacttttatatttaaatattttctctgcttctttgaaatatatataactcattttaatctgttaactaggtgatttgtcttttttgactcaaaattgtctttaggacatggaaactattgctttgaaatgtgcatagcaagaatatataacctattccgcaatttctgtagcagagtaggaggctgccttcagcaggtacctgccttcacatatcaaatctacctcctgtcctgaagctgtgggaagtttattttccctttgaatattaccaattaggaaacccggatgacctcccaaattactaggtgaaagtgtaataaactatgtatgatacatggtactgtcaagtcttctacttgagagctaattatggtgactttctttgttttggcagtctcttagtagactgcctgtaatgcacaccacattttgtttaattctctaacaacacattttcttgctgttctattattttggacagtattttaggattgtagatgattttgctgttatattttccacacgctgtcaagaattactagatgttatacacaaagtgcccaccaggcttcgttttagagaagaaccttctttctcaggattccagtcacaacccacagttgtgcagcaaagtgcacgaagtgcagcaaagtgctccccaaagctgcaaacaaaatgatctctctatttgggatctacaatcccttctatagcagtttgactagatttctacaaaaatgactttttaggatagcgatcagtttttccacctctttcagtgtgccaatgatcttcagatctgacactgattcagaaatcatggggcccataaatccagcgaggttcacacatgtgcattgattaaacctgagaacttccattctctcccttctccccttgcccaaatgcccacaaatgtgcttaccagccctccaagtcttaaatgtgcagttccaaattctgagtttatgtcctgggatttgagagaagaacagaacttttgtttgagaaatacaagttcttttaattacgagaccaagtgatgtgttaaaatgagaccacagtcctaccgttcccctctttgaactgtttgtcttttgaagttgtttgctattgccacaagtggatataaattaacctaataatgccatactggacactataacccacaccttatagcttaacaacgtacatagccaatcactaaccaatgttacttctataaaccaataagaatttctgacagctttctatcagttccgtctgcctttctttttgcctttaaaaatatacttgtaactgcttctaattggagtgtatattcagggcagctttatagtccagggttgcaatcttcaagctttggcccaaataaactctcttcttatattatgtttaccccacctttttccttttaggtcaaaaaaacatttttcttttttttttttttgagacagaatctcgctctgtcgccaggctggggtgcagtggtgcgatctcggctcactgcaacctccgcctcccaggttcaagcaattctcctgcctccgagtagctgggattacaggcgcacgccaccatgcccggcggattttttatattttgtagtagagatggggtttcaccatattggccaggctggtcttgaactcctgaccttgtgatccacccgcctcagcctcccaaagtgctgagattacaggcgtgagccaccgtgcccagcctgttttgtgagttttgatgccattatgtgaatggctattcattgacagaagagaagttgttattatttgtattgtgtttaccttgctaagaataaatatttagcttctaatataattgttctagagaaacataagggttttggttaaattccttgttactgtatgttatacaaaagacagagaagtggctaaaatagattaaaatttcacaaattctgggaatcaaatttctcttgggcaggcttagaaaagacaaaaccgaaagtacttagtgacatagagagcagaagcctagggcccactttctgtcccatccctgcccagatctaccctcttctgatccttgtccaggtctgagccaacactgaaatctctcacagaactgattaatagaggagatcagagtttagggtggctactccagtctcctctccagagctggtgcccacaattttctgaaacccaaaagccaataaatagggaaaagctatatactttggggccttaaatcttttctataaaattaaaactaatgtttctagagacatcccacccagcaacctgttctctatccctgcagtttcagtggctttttcttacaagtctcaaagtaaatacaaacacaaaaataaaaaaattcctctgaattgtacttaacactttctttggctctctcccatctatttatatttagctattattctatacatttttttaaaaagtcaggggaaacagaaaggaaatggaaattctgggccctgcctttaaatctgggaagtatgggacacctagtgtctacctcccaggatgttatgagaattaacacacataatatgagcttcccatcacagtgctctgtgacatacatctgagcacatattacatgccccataaagatggcattaatgcagatgcacatgttgtttttcagatacagacttactcagacattgccaccgtctccaacttctgtaaccttatagggtctgcagagaatgccatgtttgaagatgatgattggtggtcttgggatgaaaagtatttgtgttgtgataacggtgttggggtaagggactctgtgtgctgtgtctgctttctctaactgagtggtactataatgggtctagagggaggagcgtcagcattaacaggagacttgctgtaaaaagctaattcatggacccttttcaaacctgcagaattttgttacttacagtgaggcctacaatatcaaataatgtatatgtacaatgaagcttgagaggcagtgcttagctaagtgactctcagcccagtcttccagtaggatcacatggacagtttgaagagaaaccatcagctgtgttctgcccacagatcctgtccattgttctgggtgaaaagtccttatttattttatttttgattgttgttgtcccagatttattgaaaataatacagcactacagaaaaaattcaaacaggtccccgaggcattttgaaattcatcccaactgtaggctgagtgacctgaaggttgaacagactgccgaagtccaaaagcttcagcatttccttagtgtcaggatctacttcaattatctcctgatccaaggctgagaccttattttttaaaatcagttccttgcgtggttaaaaaagtattaaaaaagttccttgcatgattaaaaaagtattaaaaaagttccttgcatgattaaaaaagtatttaaaaagttccttgcatgattaaaaaagtccttatgttttaaaatcagttccttgcatgattctacagcaaggccagggtgaagcatgagggcttccagatactttagtgaaaggtgagttcaccctttgttccaggaggtcacagggcctactctgcttgattttggtaggggaaggtcagtgtagcccattatttttattgcagcaacagaaactcttggaatgccatcctttttctgcagagctatagaatactttagagaatattactgcgttgaaagttattttatcagataatcccagtcagtcacatgtcagaactagcgctctcaactcatttcacctgtagtcaaattaagaactatgtcccttcggctgggcgcagtggctcacgcctgtaatcccagcactgtgggaggccgaggagggcggatcacaaggtcaggagatcaagaccatcctggctaatatggtgaaaccccgtctctactaaaaatacaaaaaatcagctgggcgtggtggcgggcacatgtagtcccagctacttgggaggctgaggcaggagaatggtgtgaacctgggaggcggagcttgcagtgagccgagactgcgccgctgcactccagcctgggtgacagagcgagactccgtctcaaaaaaaaaaaaaaaaaaaaaaaagaactatgtcccttgatatatttgtattttcaggaactcttaacattcagggatgtggccatagaattctctccagaagagtggaaatgcctggaccctgaccagcagaatttgtatagagatgtgatgttggagaactacaggaacctggtctccctgggtgaggataacttcaatacataattcctaatttttctcagagctttattttattcctttgaagaatttctcctgggaacttttatgttttatctttacataaaccttctcttttcttgagctaatttgagtccttcactctaggttagtggtaattctagaaattcaatgacataaaatattgtttcccacatcttaaaatccaatttgcaccacttattttttattcggtagtacttggtagtggaacttagaacccgcagatttaaaatacttaaatattctaaagattctgtcaggaaacaatttttggattaattttctagaatcttccataatatctctattctgcttagcgtagtactaggttggtaattggagaatccccatcaatagtcatgttattattttttttaaaataaaacaggtgttgctatctctaacccagacctggtcacctgtctggagcaaagaaaagagccctacaatgtgaagatacataagatcgtagccagacccccaggtaggtgagagtgaatggaggagagggcacaggcaaggggaccaaaggtcaagaaggaagccaggccttaaaatgtggtttggggccgggtgcagtggctcatgcctgtaatccaaggactttgggaggccgaggcaggcggatcacgaggtcaagagatcgagatcatcctggccaacatggtgaaaccccgtctctactaaaaatacaaaaattagctgggcatggtggtgcgcacctggagtcccagctactcgggaggctgaagcaggagaatcacttgaacccaggaggcggaggttgcagtgagccaagatcacaccactgcactccagcctggtgacagagttagactccgtctcaaaaaataaaataaaataaaaaataaaccaggtagtttgggaagctctgctccagtgaaaataatttctgaaaaagctgcattttttctcatgttcacaaataggggcatcttctgttccatgctgttaaatccaagaattctcttttttctttagtgatctccctttaagtttacagggagagctaatgtccactttatcgcttataaggggctgcatgatgtgactgctgttccattgcttttggagacactggaatatttgtgttactgaggagctgtatgtcaaagtatttttttcaagtattcttttcgtattatgtctaaaatgtgtaacgtgagtagtggacatagtgggatttggttcagaaatcccaggaacaccaaggacagatgttgcctcttttctacttagtgttttttaatcctatggaggctgcaaatgtaattctacaaaaattcttacttagcaattttatcagaacaataagcatttcctaaatatgaaaaaaagtaatgttattttacttcaaaattactgttttagtataaactcgtttgtaatgtaaactctatatgtgcaaattttgaaattataatatagtttaaagcatggatttccaacattttggcttccctgggccacattggaagaagaattgtcttgggccacacataaaatacactaacactaatgatagctgatgagctcggatcatctgagatcgggagtacaagactagcctgactaacatggagaaaccctgtctctactaaaaatacaaaattagctgggcgtggtggtgcattcctgtaatcccatctacttgggaggctgaggcaggagaattgcttgaacccaggagacggaggttgcggtttgccgagattttgccattgcactccagcctgggcaacaagagtgaaactctgtctccaaaaaaaaaaaaaaaaaaaaagtttttgaaaaatttttgtgatatcctccaccacagaagataagcaaaaaaagtccttgcattcaaagggttggaaaccactggattaaagtatctactcaccttctatatttcttaaatgcactgtatcattaacaagcataaatgtgctatgtcattaaccagcatagaacattactaagtgtatattaagctctcaattgttctcttatttgttaatagctattataattttgtcttagtaggaagtctgttgagattctgtcattgagatgtatctctctgtagctatataaaaatgtgtgtctcacacacacacctatataacttatttaagtgtgtagtaaattctcacttaacattgttgataggttcttggaaactgagggaagcaacatattaagaaaactaattttaccagagtttaattgataaccagagtttaaaagataacgagttatgtttgaatggcatatagcaacattatttcatttaacaatgcagtttttaagaacctaatttgaacattaagtgaggacttactgtacatctgtgtttgtgtgacatggatttttctgataaataaaaattatgtaactttatatttaatgtgtacaatgtaatgatttgatatgcatctacattgtgaaacaatatagtcaagttcatgaagaaatctattacttcacctagataaccattttgtttggtagtaagaacacttaaggcctactgttgtagcaaatttaaagcatacattatagtattaactatgaatacaatgctattttggtaatctaatgctaatatacattaggtttctcagatttactcaacttataactaaaaatttgtgctcttgaacaacatctcatattcccaccctaggcactaacaactaccattctgctctctgcttctatgagtttacgcttttagatttcctatctaactgagaaaatttagtttctttgtctttccgtgtttggcttatttcatttagcataatgccctccaggtctatccatgttgtaaatggctagatttccttctcttttatggttgaatagtgtcctgtgtatgtgtgtgtatatatatatgtatatacatgtatgtatatatatgtatacacacacacacacaccgccccccccatatattggctactgtaaacggtactacaataaacatggaggggaagatagttctttgaggtactaattttatttcctttggtagtatgcccagaagtggtattgctggattatatgatacttctagttttattctttttttttttttttgagatggagtttcactcttgttgcccaggctggagtgcagtggcacgctgttggctcaccacagcctctgggtcctgggttcaagcaattctcctgcctcagcctccgaagtagctggaattacaggcatgtaccaccatgcctggctaattttgtatttttaatagagacggagtttctccacgttggtcaggctagtctcgaactcccgacctcaggtgatccacccgtctcagcctcccaaagtgctgggattacaggagtgagacaccacgcccggccaagttttttttttttttttttgagactgagtctctctctgtcgcccaggctggagtacagtggcaggatctcggctcactgcaagctccgcctcctgggttcacgccattctcctgcctcagcctcccgagtagctgggactacaggcgccttccaccacacccagctaattttttgtatttttagtagagacagggtttcgctgtgttagccaggatggtcttggtctcctgatctcatgatccgcctgcctcggcctcccaaagtgctgggattacaggcgtgagccaaggagcccggccgcgcccagcctagttttattctttactgtatttttgtaagtttatcaatttgcatctcaccaccagcatacaagatttcccttgtatgtatttcttctttgggaaaaaaaaaaaatctaaccttttgcctattttcgaatgggttattcattattattgttttgcttttttgctttgaattgcagaagtttgttacacattttggatattaacttttttttttttttggagacagaatttctgtcgcccgagctgaagtgcagtggcacgatctttgctcactgcaacctctgtctctcgggttcaagcgattctcctgcctcagcctcccgagtagctgggattacaggcacgtgccaccatgcccagctaattttttgtatttttagtagagacgaggtttcactgtgttagccaagatggtctcgatctcctgatctcatgatctgcctgcctcggcctcccaaagtgctgagattacaggcctgagccaccacacccagctggatattaacttatcagatatggcttgcaaatgcttttctattttgtagggtttttaaaaattttgtttttattttttcctttgatgtgcagaggctgtttactttgatgcagtctcacttgtttatattttattttgttgctgtgctgttgatgtcatttcaaaaaaagttattgccgagaccaatatcaacaaggtttttccatatgttttcttcatgagttttaagatttcatgtcttaatttcagtctttgttttgaagtctgaaattagaaagcatgatgcctgccagacaaggtggctcacacctgtaatcccagcaccttgggaggccgaggtgggcggatcacttgagatcaggagttcaagactagcctggccaatatggtgaaaccctgtctctactaaaaatatacaaaaactagctaggggtggtagtgggcgcttgtaatcccagctactcgggaagctgaggcaggagaatcacttgaacccaagaggcagaggtttcagtgagcctagatcactgaacctagattgtgccactgcactccagcctgggtgacagagctggactccatctcaaaaaaaaaaaaaaaacaagtatgatgcccccagctttgttctttctcaagattgattgctcaggttattaaaagtcgtttaaggttacacctaaattttacaattgtgttttctattagtgtgaaaaatgccaataaaattttgatagggatcacattgaatctatagatcactttggataatattctttgacaatattagttatcctaatggaatatgtttccatttatttgtttctacttcactttctgtcattgatatcttattgtatttagtgtataatactatatgttttttatgtcatttggttaaatttattttgattaactttcttatttttatactattgcaaatggaaatggtttctatttttggaaagtttgtttttactctatggaaatgcaagaaatatttgtatgtggtgccaggtgcagtggctcatttctgtgatcccagcactttcagagcccaaggcagttgtatcatgtgagtacaggagtttgagataagcctgggcaatagagtgaggccctgtctcaaaaaaaaaaaaatcccaacaagcatctatatgttgattatgtatcctgatactttaatgaatgcatttattagttcaatcaatttttcttattttactctagggttttatgtatatgcatgatgatattatccacaaacagtaacttttttatttcttttccactctggagagctttattctccttttccttgtctaattgttttgatacaaacttccagtcacatgttaagatagaagctgtggccctggaggcaggcctgcaagtcttgtccccggctgtggtctctgaagcagccctgtgtctgcatttgacaaatttcacagtttgtataaactatttttggcaggtaaagatctccttttgttgagtcccaggctgatgagattacctctggggttgcagagaagaagggttgtagctgggtcacaagggtgctgctgggtctgctgtggggtctgcctttgatgattgtattaccagagatttggacagtcatggattatttctgggccctggagagattagatttccttgaggatattaatctatatggcaggcagtagactagggttttgaagtttgtctgcatatgatgggccaaataccaggtgtatgaatgggtttggcttctactgacaacctgggaacagtttccacacttttctctttgggtccctgattgtgtacaactggccatggactgtgactgtgagggctagaactgagtcacagggctcaggagcacagctgaggccaggatatacaggcctgcctccagggccatggctgggtgtgtatctccctgcaggtctcttgatgggaaggaccacgtctggactgtagctgagattgaatttgagagaggttacagaactgcttcagaatcctcagtaagaccaagctcagtgtgccatttccttgtctgtagccatgtctatgggctcttgagttggccatctgagtgagggcctgcttattctaaataaccctcgatctctggctccactgaggtttcacaaccctaaccataggcaagcacctttctacttctgctttctatgtgcttactacttaaaatattgtataaaaatggaatcatgcattgtcactttgttagcgtcttatttcactaaaataatggcctcaggatttatccttattgtagcatctgacaagacattttcatttgaagctaaagaatatttcattgcgtgtataagccacatcttttaaaatctttcattcattgaaggatgtttgaattttttcactttttcacttttgtaaattatacggtttggatctatgtccccattcaaatctcatgtcaaatgtaatccctattgttggaggtggggccttgagggagatgattggatcgtagggttggcttttcatgaatagtttagtaccagcccctttggtactgtctttgccatagtgagtgagttctcccgagatcttattttttatttatttattttttgagatggagtctcgctctgtggctcaggctggagtgcagtggcatgatctcggctcaccgcaagctccacctcacgggttcatgccattctcctgcctcaacctccagagtagctgggattacaggtgcttgccaccatgcccggctaattttttgtacttttttttttttttagtagagacggggtttcaccatgttagccaggatggtttggatctcctgacctcatgatccgtccacctcagcctcccaaagtgctgggattacaggcgtgagccaccgcgcccggcctgagatcttattttttaaaagcatgtggcacctcccctctcactcttgtcttgctcctgttcccactgtgtgagatgactcactctccctttgctttgtgccgtgactggaagctttctgaggcctccccaaaagtagaagctgctgtgcttcctgtacagccttcagaactatgagccagttaaacctttttttttttttttgagacagagtctcgctctgccactcaggctggagtacagtggcgcgatctcggctcactgcaatgtccgcctcccaggttcaacttattctcctgcctcagcctcccgagtagctgggactacaggtgcctgccaccaagcctggctaatttttttaatttttagtaggggcggggttttaccatgttagccaggtggtctcctgacctcatgatccgcccctcggcctccaaaagtgctgagattacaggcgtgagcaaccatgcctggccggagaaacatttatacttccatatacttgttgaagtataaaatgtaagtgccttacaattttctttcctcctaaaacataagcactgagtttgaggcattttcctggatttttcaaccactgagttctttttatataaaactaagtgaataaccttgactgggaatccgagacctaagcctgttgactgcagggtaaggtcaatcttgattctgccaaagcaggtcatcaatagccccgtaatgtgttgctggtgaacctttctttcaggtgtctcagcctgctcaaattagacagggaaggagccctggaaagctgggtatccacaggcagaggcagtgagggtttggatgagaggaggttgtgatatcctctgagagggtgtaattgttattgtcatggggctgtttctacatattgtcaagtaaaataaattttgatgtaggtaagaagtgagtttattctaaggagtattgcagtggggaaagcatcaagcataagacctgaagtcatctccaaaatgaggcagaaaaaggctatttttcatacagaggagcaaacaagattagaaacaaggtaggagggccaggcatggtggctcacgcctgtaatcccagcactttgggaggccgagacgggcatatcaggaggtcaagagatggagacaatcctggccaacatggtgaaaccccatctctactaaaaatacaaaaaattagccgggcgtggtggtgggcacctgtagtcccagctactcagaaggctgaggcaggagaatcacttgaacccgggaggcggaggctgcagtgagccaagactataccactgcgctccagcctggtgacagagcgagactccgtctcaaaaaaaaagaggaaggtgggagagggagaaggcagaatggagaatggcaaaatcagattcaggattggagaatgtttcaccctgaagtcagcctgttcttgggaggggcatcaagaggggttgtatgctagctcagactgaaggtggagcagagtccaggggcctgggggaatgtagagtttgtgaatttgtgatatctaagagggagcatcttcaaaatcatagtgaaaagggtatttctttgcaataagcgtttcttgcggatcacaaaggattggagagaccttagtcatagctatttaccaagattcactacccacctcatcttttcccccactttcctttgtcctatacattttttccctttggcttttactgagctgtattcaatataataacctggaaaacatataaatcgtttttgctaagttctgtgagtagttttatcaaattattaaatttgagggagggagttagggaagcccatgatttatagtcagttgctcagaagtgtaggtgggcccctggagtttgtgactggcatgtgcagcggaagcagtgttgtggaactgggtctgaacttgtggggtctgtgctgaccctgggtgttgtcagaattgagttgttgggcacccagtttgtgttggaggattggttggtgttcagcaaactccatatatttggtgttggaataaagataatcaggctggatgtggtggctcacgcctgtaatcctagcactttggaaggacgaggagtgcagatggcttgaggtcaggaattcagcaccagcctgggcaacctggtgaaatcccacctctaccaaaaatacagaaagttagccaggcatggtggcacgaacttgtattcccagctacttgggggactgagtctggaggattgcttgaaccctcagaggtcaaggctgctgtgacctgagatcatgccagtgcactccagcctgagtgacaaagtgagaccctgtctaaaaaaaaaaaaaatcacagcagacttggtcagaaggagatggtgggtctgttgaagaatggagagtttattaatttattattattattattatttttttttttttggagacagagtctcactctcgtccaggctggagtgcagtggcgagatctcggctcactgcaacctccacctcctgaattcaagtgattttcctgcctcagcctctcaagtagctgggactacaggtgtgtgccaccatgcctggctaattttttgtatttttagtagagacgaggtttcaccatgttggccaggctagtctggaactcctgacctcaggtgatccctccaccttggcctcccaaaatgctaggattacaagcatgagccaccactccccgctgagagttttacttcttttgcacacaagttgtcacagttaggtgtaatgtgattctacgtctcctccataggggactgaggacttaaagggaaggacttctgagggcagactcttctctccacctgctgctacaatgtgatttctgctcattcacacacatgcacgctaagcaatggtatggccgtgcttctctcatgacaaagcttcactcaggaattgtgctgagagcacctctgcttctagggttttccactaataggctacataagtgcccagaagactcatgggctctttctacctgccagatcttgaatctgcaccagtaacctgttttctccagtagaataggcttctggatcacctgaccatctcatctccctgtatgcacacatttataagtcagaggtgccctgcctgggtgaatatctagagcactaaccagtccttttaccaactgtgcactgatcctcacccatggttcttgatagcaccttttcttattctgcattttccccccacagaccctctctcatgtgaacacagcatgcccaaggtcaccctgcaggtgcctaagtccagggcctgctggaaatcaggtttctatgagttcaaggcaaagtttttgggtgtggttattgtaaatgtaaatgcaaaatagaaataagaggcttaatcctcacattggaaaataaagagtatttactctcctcccttttcttaaaacctttgatttagaaaacttttatatgtaaattctttctgtgccttttatcttttttgttgtcttttaattctctaatttgtttctggtctgatttttgttattttgtttattatgctaacattgggattatttagttatttttcaagtttttgaggattaaagttggtttatttgagatttttaaaatataaaatatattactataaaattcccagaactgcttttgttacattcatttttatatattatgattctattttcatttttctcaaatactttatgatttccttttaccttctttgacccattggttgttcagaagcatgttgtttaatatccatttatttgtaagttttaaaatttccttccggtgttgatttctagttttataaaattgtgatttaaaaacttgatatgatttcagtctgtttaaaaatgaaaagacttgtttatttttgttgtgggccagatttatgacaggtcttggagagtgttccatgtgtgtttgagaagaatataaattatactgttactatcatatttgtttttttctccagtttagttaacatatgtttatatatttgtgtgctccaatattggatacataaatatttttaatcgttatattcttttgacaaattagcctcatcactatataatgaagtttttttaatgacgaatttttttctttattttattttatttatttatttatttattttttgagacagtctcactccgtcacccaggctggagtgcagtggtgcaatcttggttcaccacaacctcggttcaccacaacctctgcctcccaggttcaagcaattcacctgcctcagcctccctagtagctgggattacaggtgcccaccatcacgtctggctaatttttgtatttttagtagagacagggtttcaccatgttggccaggctggtctcgaactcctgattgcaggtgattctgctgcctgggcctcccaaagtgttgggattacaggtatgagccatcgtgcccagctatgacagatttttttctagatgtctatttagtctcatataaatataggcattcctacactttttaagttattattggcatggaatattcttttcatttttgaatcgttaacctatgtatttccttaaatctacagtaagtctctagtttgcagcatattgttgatttttaaaatcgattcagacattctgtgaatgttttagattgttttttgcttaataacaatattctagggttggtaatttataaagaatagaagtttacttagctcacaatcctggatgctgagatgtccgagagcatgtcattcccacctcatgagaatcacatttccacatcacaacatgaccaaagtcttgaggatgatggaaggtgtacaccagagctcacttttgtaatagacccactctcatgatgactaacgcactcttagaattataatactaggctgggcacagtggcttacacctgtaatcccggcactttgggaggctgaggcgggtggatcacaggtcacgagtttgagaccagcctggccaagatagtgaaacccccatctctactaaaatgacaaaaactagccgggtgcggtggcggctgcctgtaatcccagctactcaggaggctgaggcaggagaatctcttgaacctgggaggcagaggttgcagtgagccgagatcatgccaccgcactccagcctgggtgacacagcaaggctccgtctcaaaaaaaaaaaaaaaagaataatactattaatcctttcataaaagtagagccctcatgacctaataacttcttaaaggcctcacttcttatttgtttgtttgttttttgagacagagtcttgttctgtcacccaggctggagtacagtggagtacagtgatctcagctcactgcaaccttcacctcccagattcaagcgattctcctgcctcagcctccccagtagcttggactacaggcgcgtgccaccacacccggttaattgtctgtattttttgtagagttggggtttcactgtgtttcaatctcttgacctcgtgatcctcccgcctcagcctcccaaagtgctggaattagaggtgtgagccaccgcacccgaccaaggcctcacttaattttatcacaatggcagttaaattttaacacgaattttgaggggacactaaaaccatagcagtgtgtttttattgcatagctaaatctttctatatttaaatgaattaccgattgataagaacttattactgccattttattcattgtttactgaccatttagtggtttctgttttttaattccttcatgctgtcatcttttgtgttttcttgaatttttgttttgtttttgttgccttctttttcttgtatgtgcatctactagttttttttttgtaatttccaagagacttacatgaaacctctcattttaaaattttgccttcaatttaaccttttgttttgtacagatagggtcttactttgttactcaggctatagttcagtggtgcattcacagttgagtgcagcctcaacctttgtgggctcaagcaatcctcccatctcagcctcttgagtagctggaactacaagcacatgccaccatattcagctaattttgtcagtgctttttgtagagacggggttttgccatgttgctcaggctggtcttgaactcctgacctcaagcacttgatttgacctcccaatgtactaggattacaggcatgagccatcaggcccagtcatttctttttttaaaagattgaatagctttctgagatctttattttatttatgtatttattttagagacagcgtcctgctatattgacccaggaggtggaggttgcagtgagccgagatgtcaccactgcactccagcctgagtgatagagtgagactctgtctcaaaaaaaaaaaaaaaagaatctctctttgtctttgaattctggcagtttaattataatgtgtcctgagcaatttttatgaggttcttgctatagagattttaagcttcataaaactgaatgtctattttccttccaagattgggaaaatttaagacattatacctttacacaattaaaaaaatttttttttctctgtctcctgaacctcttaagagatgtacattcctacagataattatgcagtgtgggacccaaatgcttcagtcactctttcttttttcttttttctttttttttttttttttgagacagagtctcactctgttgcccaggctggagtgcagtggcacgatcttggctcactgcagcttgcgcctcccggattcaagcaattctctaccttagtctcctgagtagctgggactataggcgcgcgccaccacgcccgactaattttttctttttttctttttgtatttgtagtagagacaggatttcgccatgttggccaggatggtctcgatttcctgacttcgtgattcgcccgcctcagcctcccgaagtgctgggattacaggcatgagccaccatgcctggcctcattctttaagttttaattaggaactttcaaatgacttacttttaagtttgcttatttttttttcctgtagaactgagtcttctgttaaagcttgttgttaaattttttagttctattgtgtactccagcatatgtatttggttcttttttaagtttctcgttcttttttttttttttttttttaaagatggagtttcgctcttgtcacccagactggagtgcaatggcacgatcttggctgactgcaacctctacctcccgagttcaagtgattctcctgcctccgcctcccaagtagctgggattagtcatgagccaccacacctggctaatttttatatttttagtagagatggggtttcaccatgttggccaggctggtctcgaactcctgacctcaagtgatccgcctgcctcagcctcctgaagtgctgggattacaggtgtgagccattgtgcccagctctccttcttttttataactcattttgttcatgcattgttgcaaaaaaaaattagtaatctgtgtacttttgcattttatttttcttttgttgtttttttgtttgattgtttgagatggagtcttgttctgttgccaagctggagttcagtggttcagtctcggctcactgcaacctccgcctcccgggttcaagcaattctcctgtctcagcctcccaagtagctaagattacaggaatgtgccaccacacctggctaatttttgtatttttagtagagacggtttcaccatgttggccaggatggtcacgatctcctgaccttgtgatccatccgcctcggcctcccaaagtgctgggattacaggtgtgagcctcctcgcctggactcttattgagattttttaagataattactttgaattctctgttagacattttctagatctgtgttttattgttagttgttcctggagcatttttagtttctttttgtgctgttaggtttgcctgatccttcataatctgtgaagccttgttttgatgttcttgcatctgaaggagtaaatacttctttcagtcattacagactagtttagggaggtaaatatcttctattggttttctgggctgatgagattttcactaggatcacagtcaactgcattggatcctggtcacgtaactactactgggtctacagtgaagttaatgcttggcagacctgttatttaagcatcagacagttgaggattccattttctgaggagactgaactttctttaagatcttgatcaataagactggtgctgagaaaaaaaaaacccagttaatatctgcaaatggagatgctgatacaataaatatgagtaggtgtggctcctgctgtttggctcttgcgagatgtttggaaatgctctaacctagtcattggacaggtttctagatgaccgttactgagcgttgatcacagctgagagggtgtgaaactaattcatagggctgcttcaggatacacagctgagaccaaagtcttcaggtttgttctgggttcatgacatttctccctccagatttctaggtgggcaggacttctccctgcctctagctgccagggactggagcttggttataggactgcttcacaattcacggtgggaataaagtcagccagcatgcctacagggacacatgtagctgtgcttttgggcaggtcacaggtcaggaaaaactcctcctggattttggttgcatggacttggagccaagttgtagtgccacgtcaagatccaccatcaaataaatattggcaagcctacatccaggggcagagatggatatttctgtctgtgggtccctgtgtgagtaggatttcttccacatcatgactgacatgtgcaaggggtgcagtttggggtaattcagagatcacagacagaagcaacatctaaaggcctttcacctgagacacaggacattatgaatcctcctaagtgtcttggcagatggtgctagtggcataaacaaaaccaaatgatagctatgtttacaatgagaattaattacatttcattctgtattgtgggcaagcatgccactcaagcaagggcacaccctctcaatacagccctcctcagtcttcggttcgcagtcttacacatggattccaaagttgccgtaaaggttgttttgtcagggcttaactgctgcatttttgttactgtagaaagtgtgggtagggagcctcctattctgccatcttgctatgccatatgttccgatatgttctatgtcaaatttatctgattacagattcagaatttctgaaataaagtactcagatttacacattgtgtaataagtaaatgtattgcaatgcttcattctcattagagcattttattaattattgaaatgcatttgcttttattgcggcgcatggcatgtcaaagattcaaaatgccagctcttcataagtcacagttgaaaactagttatttaaaggattgtttttatgatacgtctgtattatattcaatattttataggtcagaattttctcttgttttcaactgtattttactggggagtctcttttcatgtaggttctccttgatcatttacttttttgtgtgtttttaatcttcatatttgtatggtaattttcaactttgtaccttttatgaccatgtattgtttaattccaataaaaatcattggagcaagttaaaaaaatatacataaatatatatgtgacatttctgttgcctataaaagttatctatgtggtatttgcctgcaaaaatcactttgggcaaattttaaaaaatatataaatgcgaattttctattgcctataaaagttttctatatggtatttgcctgtataaatattgacctactttgtttataaattactcattttcttgggtagtcatcagtatttccttgtgtagatgagcagtcaaagaaactgtaaatttaccatctatttattgtttgattatatattattctgtgagagaagcacttgttatttgaaggtgatttttgaaaaatgtaaccgttttaggtagatgtaaatatttaattgtgatgaaaaacataaaattgccatcttaaacattttcaagtacagtctagtggagctaagtacatttacattattttgcaatggatctttagattaattttatcttacgaaagtaaaatgtaataataaataaactgcccttttcctctcttcagctcttggaaaacaccattttacttactgtttctatacttttggctgatttttatatttgtatcactataattatataatgtctctttttgactattttttttaacggaatgatctcaggctttgtttttgtaagatgtgtcagaatatctttctgtttttttttttttttaagttctagggtacatgtgcataacgtgcaggtttgttacatatgtatacatgtgccatgttggtgtgctgcacccattaacttgtcatttacattaggtatatctcctaatgttatccctctccccgcccaaccccacgacaggccccggtgtgtgacgttccccaccctgtgtttgagtgttctcattgttcaattcccacctgtgagtgagaacatgcggtgtttggttttctgtctttgtgatagtttgctcagaatgatggtttccatcttcatccatgtccctacaaaggacaagaactcatccttttttatggctgcatagtattccatggtgtatatgtgccacgttttcttaatccagtctatcattgatggacatttgcgttggttccaagtctttgctattgtgaatagtgccgcagtaaacatacatgtgcatgtgtctttatagcagcatgatttatagtcctttgggtatatacccattaataggatggctgggtcaaatggtatttctagttctaaatccttgaggaattgccacactgtcttccacaatggttgaactagtttacagtcccatcaacagtgtaaaagtgttcctatttctccacatcctctccagcacctgttgtttcctgactttttaatgattgccattctaactggtgtgagatggtatctcattgtagttttgatttgcatttctctgatggccagtgatgatgagcattttttcatgtgtcttttggttgcctaaatgtcttcttttgagaagtgtctgttcatatcctttgcccactttttgatagggttgtttgatttcttcttgtaaatttgtttgaattctttgtagattctggttattagccctttgttggatgggtagattgtaaaaattttctcccattctgtaggttgcctgttcactctgatggtagtttcttttgctgtgcagaagctcttttgtttaattagattccatttgtcaattttggcttttcttgccattgcttttggtgttttagtcatgaagtacttgcccatgcctgtgtcctaaatggtattgcctaggttttcttctagggtttttatggttataggtctaacatttaagtctttaatccatcttgaattaatttttgtataaggcgtaaggaagggatccaatttcagcttttacatatggctagccagttttcccagcaccatttattaaatagggagtccttcccccatttcttgtttttgtcacatttgtcaaagatcagatggttgtagatgtgtggtattatttctgagggctctgttctgttccattggtctatatctctgttttggtaccagtaccatgctgttttggttactgtagccttgtagcatgatttgaagtcaggtagcgtgatgcctccagctttgttcttttggcttaggattgtcttggcaatgcaggctcttttttggttccatatgaactttaaagtagttttttccagttctgtgaagaaagtcattggtagcttgatgaggatggcattgaatctataaattaccttgggcagtatggccattttcatgatattgattcttcctatccatgagcatggaatgttgttccatttgtttgcgtcctcttttatttcattgagcagtggtttgtagttctccttgaagaggtccttcacatcccttgtaagttggattcctatgtattttattgtctttgaagcaattgtgaataggagttcactcatgatttggctctctgtctgttactggtgttataggaatgctcgtgatttttgcacattgattttgtgtcctgagactttgctgaagttgcttatcagcttgagattttgggctgagacgatggggttttctaaatacacaatcatgtcatctgcaaacagggacaatttgacttcctcttttcctaattgaataccctttatttcttttctcctgcatgattgccctggccagaacttccaacactatgttgaataggagtggtgagagaaggcatccctgtcttgtgccagttttcaaagggaatgcttcctgcccgggcgcagtgggttacgcctgtaatcctagcactttgggaggccaaggcgggcagatcatgaggtcaggagatggagaccatcctggctaacaccgtgaaacctcgtctgtactaaaaaaatggaaacaactagccgggtgtggtggcaggcacctggagtcccagctacgcgggaggctgaggcaggagaatggcatgaacccgggaggcggagcttgcagtgagccaagatcgtgccactgtactccagcctgcacgacacagtgagactctgtctccaaaaaaaaaaaaaggcgggggggaatgcttctagtttttgcccatttagtatgatattggctgtgggtttgtcataaatagctcttattattttgagatacgttccatcaatacctagtttattgagagtttttagcttgaagggctgttgaattttgccgaaggccttttctgcatctattgagacaatcatgtggtttttgttgatggttctgtttatgtgatggattacgtttattgatttgtgtatgttgaaccagccttgcatccctgggatgaagccgagttgatcatggtagatgagctttttgaagtgctgctggatttggtttgccagtattttattgaggattttcacatcgatgttcctcagggatattggtctaaaattctctttttttgttgtgtctctgtgaggctttggtatcagaatgatgctggcctcataaaatgagttagggaggagtccctctttttctattgattgaaatagtttcagaaggaatgataccagctcttctttgtacctctggtagaattcggctgtgaattcatctggtcctggactttttttggttggtaggctattaattattgcctcaatttcagagcctgttattggtctattcagagattctgtttcttcctgctttagtcttgggagggtgtatgtgtccaggaatttatccatttcttctagattttctactttatttgcatagaggtatttataatattctctgatggtagtttctatttctgtgggatcggtggttatatcccctttatcatttcttgttgcatctatttgattcttctctcttttcttctttattagtctttattactcttgctagagtccactccagactctctttgcctgggtatcaccagcagagactgcagagcggcaaatattgctgcctgatccttcctctggaagctttgtcccagagggtcacctgcctgtatgaggtgtcagtcgactcctactgggagatgtctcccagttaggctacataggggtcagggacccacttgaggaggcagtctgcccattctcagatctcaaacaccatgctgggagaaccacgattctcttcagagccatcatacaggacgattaaatctgcagaagtttctgctgccttttgttcagctatgccctccccccagaggtggaatctacagaggcaactggccttgttgagatgcagtgggcttcgcccagttcaagcttccctggctgctttgtttacttactcaagcctcagcaatggtggacgctcctccccctgccaggctgctgcctggcaggtcaatctcagactgctgtgctagcagtgagcaaggctctgtgggtgtgggacctggcaagccaggcgtgggatataatctcctggtgtgccgtttgctaagaccattggaaaaacacagtatttgggcaggagatcccgattttccagatacagtctgtcacagcttcccttggctaggagagggaaatcccccaaccccttgtgcttcccaggtgaggtgatgccccaccctgtttcagcttgccctcagtgggctgcactgcacccactgtccaaccagtcccaatgagatgaaccaggtacctcagttggaagtgcagaaatcacccgtcttttacgtcagtcacgctgtgagctgcaaaccagagccgttcctattcagccatcttggaacgggaggtctctgctctatttttaaattgtgtgttatttttgttgttaagtttgttaaatattctataagtttatcttttgttgtgtatatttcacaaatattttctttcattctgtagattatctcttcactttgttaacgttttctttgctgtgcaaaacatttttagtttgttgtaatcccatttgcataatgttacttcttttgcctgtgcttttgaggtcttacttaaaaattctttgctctgtaatatgtggtaaagcattcctctatgtttatccaaatagctttataggtttgggtttcacatttaaatctttatttgcgattgagttttttatactgtaagagctaggggcctagtttcattttttgattatcatgtaggtaatcaattttcctagcaccaattattgaaaagactgtctttttccaaatgtgtgttcttgacatctttgttgaaaatcacttgcctctagtttcatgaatttattactgggctcactggatagtttgatctgtctgtttttatgccagtatcatgttgttttgcttattatagctttatagcatatttcggagtcaggtagtgtaatgcctccagcttgattctttttgcccaggattacctttgctatttgggggtctttggttggtcctggttaattttaagcttgtttattccattgctgtgaaaaaagtctttggtattttgatagagatggcattgaatctgtagatcaccttgggtagtatggccactttcgtaatgttttttcaattcatgaggaaaaatatctttcaatttttatgtctttttcagttttttatcaattttgttgttgtttgctttttgagacaaagtctcaccctgttgcccaggctggagtgcaatggcacaatatcagtgcaccacaacctctgcctcctgggttcaaatgattctcctgtctcaacctcctgagtagctgggatgacaggcgtgtgccgccccactaatttttgtatttttagtagtgacggggtttcaccatgttggtcaggctgctctcgaactactgacctcgtgatctgcccaccttggcctaccaaagtgctaggattacaggcgtgagccaccacacccagcattatcaatgttttataattatcagtgtagagagtgttcaccttttcaattcggtttgctgctagacatattttattttatttatttaatttgggatggagtcctgctttgtcgctcagactggagcgcactggtgcgatcttggctcaccacaacctctgcctcctaggttcaagcaattctcctgcctcagcctcctgagtagctgggagtagctggactgcacctggttaatttttgtatttttaggagagacagtgtttcgccatgttgaccaggctggtcttgagctctggacctcaggtaatcctcctgcctcagcctcccaaaatgctaggattacaggcgtgagccactgaacctggccaactggtggatgtagaagcaacactggcaaaattgaacatggctttgtgatttaagaaactcaacgaattaggtatagatcatatgtacctcaatacagtaaagaccctatatgacagattaatagctgatatcatactggataggaaagagcagaaatcttctttttttgagatctggaacaggacaagtatgtttttattttatattataattgtgtatgacagcattcagctgtgtacactgtaagactggagcacaagtgaaatatggatcactgatatgtctatttccaatatgagtctatctgtatgtgtattggttttgtattgtttatgagttgtttacttgttctgtttatgtgtgttcaatggtggttttgaatagtcattgaaatcctcctaattttactttctatttatttgtaaatctatatttgtgtgtgggagaaacacttttgcgacttgaagataagttcaaaaactgtcatatgtctgtatctcagattttagatactatttttaattgtcaaaaacacataaactttacaatctttttttttttttttgatgtggagtctcactctgtcacccaggctggagtgcagtggtgcgatatcagttcactgcaacctctgcctcccaggttcaagcgattcttctgcctcagcctcctgagtagctgggattacaggtgcgcaccaccatgcccaactaatttttgtattttttgtagagacggggtttcaccatattggccaggctagtcttgatctcctgacctcatgatctgtccgccacggcctcccaacatgctgagattacaccgcgcccagccaaaactttacaatcttaaatactgtttttttccaaagtttgttgtcataatttaagttctggggtacacgtgcagaacatccagattttgttacataggtatacacgtgccataaatacttttaagtatttaccttagtcatattatatcgatattcttatgcactctgtctggaatatgtttatcttgcaaggctaacactcatacacattaaacaactacctactttttctgttttctggccctttacaaaaacaattctgttttctattttagagtcagactgctttatatatctcatgtaagttgactcatgcaatttttgtctcttcatggctgacttattttgtgttacacagtgccatcaacatttatctttattatacatattaggatactttttgctttttataaacagtaatgtttcatttttttaaaggattttttttttgagacagagtcttgctctgtcacccagtcagaatgtaagtgcagtggcaccatctcagctcactgcaacctccacgtcccaggttcaagcaattcttgtgcctcaaccacccaagtagctgggattacagacgtgcaccaccacacccatctaatttttgtatttttagtagagacagggtttcaccacattggtcaagctgatctcgaacacctgacctcaagcgatccacctgtctcggcctcccaaactgctgggattacaggcatgagccaccatgcctggccaatcggccaatgtttcattattttaatatttcaaattatatttatccattgatttggtgagagaaattttcattactttcatttatttgctttcagtaacaatgctacaataattgtgagtgtccaaattactctttatatgaccatatgtgtgagagttcatatttttgccggattttattgatttaggtgttcaccttcatactcataccaaattgctttaattctttagctttgtatgttttttgaaatcaagaactgtagtgtttctgacattgttactctttttgaagattgttgagtgcttcattgtttcttgaaattccatataatttgggggttgctgtttctttttctggaagaatttaattagaaatttgacagggattgcatttaatctggagattgcattaaggaatttagacatcttctttttaggcaaaattgttttatactgctttcaagtcttctattcctttatgaatattctgtcttgtttcattattcattatagaaattggggtattgaaatatcctactacaattacattgctccctatatcttgctttaattctgtcagtatttgctttgtatattttgaaccctagtgtaagatacacacacacacacacactcacacacacacattaatatatgtatacccacatttatcatgggttctaagtaaatgaacttgtttattattgtttaatgtcttcctttgccccttatgagcttttagttaaagtatattttatgaaatagagtttttgacttaagatgtactttgtgttatataacttggacctgttctcctcttatttggttatttccatgaaatgtcttctttcatcttgcctttttcagtctcctttaatcattagacctcaagtgactcttgtagaaaaacaagttggatcttgttttttaatttttgcaatcagtccctttatttggtgcatgtattttgaatggaaagtttacttcataaatatttgaataatttgctgaaatagaaaggcttacctgttttataaattgttttactggattattttatctctgtcccttattttctttttctgtcttcctgtttgtcttttagatttttgtgttgataggactttacttcttatacttttgtgtatctatacctttgtggtatcttgggaattctgaaaaatttcttaaagagatatatatatatatatatatatatatattttttttttttttttttttgagagggagtctcactgtgtcgcccaggctgaagtgcaatggcatgatctcagctcactgcaacttctgcctcttgggttcaagcgattctcctgcctcagcctcctgagtagctgggactacaggcacacgccaccatgcccagctaatttttgtatttttagtagagacggggtttcaccatgttggccaggatgatctcgatctcctgacctcgtgatccacctgcctcagccgctcaaagtgctgggatcacaggcatgagccactgggcctggccaaaataatatattttaaactcttaaaaatgtaacttgaattgcatttgaaaattcttcctctttacatctgccctgaatgttgttattgatgtcactaatcatatttttttgctgtatatttattaccagattatgatgaatagtttataatcatttttatgcttttatcctttaaattttagagaaaaacttttttgcactattataatgatacagaactttatatttgtgtttgtgcatatgtttttcagaaagttatgtattttcatatcatcatattttttttcttgcatcctgttattttcaatggaagatagttcagcatttttttttataaggcaggtgttgtgctaatatacttttcagcatttggttatcttgaaaggcctttactttttcttcatttttaggactgttttactggttatattattcctacttagaagctatttttccttcagcacgttaactatatcgcaactttctcttgtctgaaaaaatgttgacagattcacttgttatcttataagagcatacttacaaatcacacatcacttttatcttgccgcttctaagattccatttttgcctttgacttttaaaactttgcttattatgtgctttgttataaatctccttgtatatcctagttgaagtttgttgagctccttcttttttttttgaaatgaaagtcttgctctgttgcccaggctggaatgcagtggcacaatcttggctcactgcaagctccgcctcccaggttcacaccattctcctgcctcagcctcccgcatagctgggactacaggtgcccaccaccacgcccagctaattttttttgtatttttagtagagacagggtttcaccgtgttagccaggatggtctcactctcctgacctcctgatccaccagcctcggcctctcaaagtgctgggattacaggcatgagccaccatgcctggccacatctttttttaacttttgaaaatttctcaggcattatttttgtatttttcacctccatgttttttatatttttaatgttttcatttatatatatatatatattttaattatatttagttttgttaccatttagctcattgagttttattcaggtcaaattttaaaactttgtacatcttcatttttaatttttgttctggaattttttttttttttgagatggagtctcattctgtcacccaggctggagtgcaatggtgcaatcttggctcactgcaacctccacctcccgggttcaagcaattctcctgcctcagccttccgagtagctgggactacaggcatgggccaccatgcccagcacatttttgtagttttagtagagacagagtttcaccatttgggccaggatgttttcaatctcttgacctcgtgatctgccctcctcggcctcccaaagtgctgggattacaggcatgagccaccatgcctcaccttttgtgataatttgtgtgtgtgtgtgtgtgtcagagtctcgctgtgtctcccaggctggagtgcagtggcatgatctcggctcactgcaagctttgcctcctgtgtttacgccattctcctgcctcagcctcccgcatagctaggactacaggcacccatcaccacgtctggctagtttttttgtatttttagtagggacggtgattcaccatgttagccaagatggtctctatctcctgacctcgtgatccacccgcctcagcctcccaaagtgctgggattacaggtgtgagccaccatgcccgttcccttttctgaaaatttttaaattgttggactgtgttgttctaatattttgtatacattgtcatgtttggttgttatttgtacattaacaaaaagctatttgtcacaatctttacaatgtagctttttcctgacatagtctgaaaccaattgtccttgatagagattatggtaacctctcatacatgttctaaggatgtgtcctctctggaattttgtgtttatttttcagttaaaagggtttgttcatgtttcttcttaacagtctctaatcacttgttctacgtgttgcctgtatttagcactgcagtctgctcctgaaacatttacatttgctttcagcagacccaatccctcccaaagtgtatcaccatttctatcagcactctgtggtattggagacagaaaccaggttttgtaaagacactcaaaagccagaagtaaggatatgtgtatcagtatttttcttctctttaaaggaagaagccaggagttgatacttcactcctaatggcacagtgctatattggggaggaggaagagctgttggtgggtaaatgtaacaaacattccttcctgttctatgtggctcttggcattttgcttacctgaggcattgcatacaattaactcatttatagatttcacagaaaggtgtctttgttagtatatgtttgctacatgtatatgtctgtgaagaagttatggcctgtgggattttgttatgccatcttactaatgtattttgaataatttcataagatttgtaaagtatatttatatgaatctactaagtgggataatttgtaatttttatttctttcagctatgtgttctcatttcacccaagaccattggccagtgcagggcatagaagattcattccacaaacttatactgagaagatatgagaaatgtggacatgataatttacaattaagaaaaggctgtaaaagtttgaatgagtgtaagttgcagaaaggaggttataatgaatttaatgaatgcttgtcaactacccagagcaaaatacttcagtgtaaagcaagtgtcaaagttgttagtaaattttcaaattcaaacaaacgtaagacaagacatactggagagaaacactttaaagaatgtggcaaatcatttcagaagttttcacacctaactcaacataaggtaattcatgctggagagaaaccctacacttgtgaagaatgtggcaaagcctttaaatggtctttaatatttaatgaacataagagaattcatactggagagaaaccttttacttgtgaagaatgtggcagcatctttaccacatcctcacactttgctaagcataaaataattcatactggagaaaaaccctataaatgtgaagaatgtggcaaagcctttaataggttcacaacccttactaaacataagagaattcatgctggagagaaacccatcacatgtgaagaatgtaggaaaatctttacctcatcctcaaactttgccaaacataagcgaattcatactggagagaaaccctacaaatgtgaagaatgtggcaaagcctttaataggtccacaacccttactaaacataagagaattcatactggagagaaaccctacacatgtgaagaatgtggcaaagcttttagacagtcctcaaaactgaatgaacataagaaagttcatactggagagcggccctacaaatgtgatgaatgtggcaaagcctttggacggtccagggtcctgaatgaacataaaaaaattcatactggagagaaaccctacaaatgtgaagaatgtggcaaagcctttagacggtccacagatcggagtcaacataagaaaattcatagtgcagataaaccctacaaatgtaaagaatgtgacaaagcctttaaacaattttcgctcctgagtcaacataagaaaattcatactgtagataaaccctacaaatgtaaagattgtgacaaagcctttaaacggttctcacacctgaataaacataagaaaattcatacttgagagaaatcctacaaatgtaaagaatgtggcaaacctttggatgatccacaaaccttaatgaacatgagaaaatttatactgtagagaaaccctggaaatgtgaagaacgtggcaaagttctttacctcattctcaaaccttgataaacataagagaattcataccggagagaaactgtacaaatgtgaagaatatggcaaagcctgtgaatggtccacaaacctgaatgagcagaagaaaattattactggagataaaccctgcaaatgtaaagagtgtaacaaaacctttaaacagccctcaccggtgaataaacataagaaaaatcatgctggagggaagccctacacatgtggcagaatgtggcaaagcatttaattggtcctcaatgcttaataaatataattcatgctggagagaaacttcacatgtgaaccgtgtggcaaagcctttaaatggtcctcaacccttaatgaacgtaagtgaattcatgctggagcaaaatgcttcacatgcgaagaatgtggcacagtctttaccacatcctcaaactttgttaaacataagagaatttataccagagagaaaccctacacatgtaaagaatgtggcaaagccttcaataggttctcaacccttactgtgcacaagataattcattctggggaaaaaaatgctacaaatgtgaaaaacgtggcagagccttcagaccatccacaaacctttatgaaaattcatatttgagagtagaagattcattccacaaacttacattgagaagatatgaaagatgaatataagaattcatcctagatataaaaccatagaaatgtaaaagatgtgacaaaacctttaagccatactccaggcttcttaaacataatgagaactcatactggaggaaagtcttacaaatgtgaagaatgtggcagtctttaaatcttcctcagtcttttctaatcataagataattcacactgaagagaaactgcaaacgtggaaagtgtgacaaagcttgcaaccacactcaatctattctaaatataagagaaatgatattggtgagaagccacaaaaatatgaaaaatgtggcaaagccttcaaatgcttgtcacatcttactgtatatatataattcctactgaagaaatcccctggaaatgcaaaaaatgtggcaggatttttaccaatgctcatctttttgcacatgatatcctttatattcgagaaaagttatagaaatataaaaaatatagaaaagtcatatctcctcacattttactaactagcaatgttcatacttaataaaaacattataaatgtaatttctgttgaaagacttcagaaaatataggcctttaaagtgaagaagagtattcttaagacaaacaatacaaatataaagagggttgtagtacctgtacttctctcatggattttgttgtacacattttataataggggaaaacactgaaggagactttcttcaacatcagaaaatttatattggagagaaatcctacaaatgtaataaatgtggaaaaacatttgttcaaaaactgcagcttaaacagtttacactagaaaatattttgtagatgcagtaaatgtgaagaaatatttagtctaaaaagaagagtatgtaaacatcagaggatttacagtagaaagaactaaggaactaacactttagacactgcagtaaatcagagtattaagtattaaaaaaatccaaagttgaacctattagagaatttctttgtatataagttgaaaagaagatttttgaagagatactacatttaaagtatattttttcacttgaaaaaagtatagattttttgaaaagcatataatagttaattcaactcaaattatttcatactgtttcaacattcctgtttatgtgaaagcatgtgatgaattgttgctgcatcagagataagagagattctttttcattaggtgggcattatttgtgaatttttacaagaaagagtgaggacagaaatgaaagatccatgatgaaaatctagcagagaggcttttttgtagttgacaatattgagtgatgcatgaggtaggtgttcagagtaatattcttctgcattatagtgagagaaaatctgttttagtagtaaattgttttaccaattatacatttatgtaataagatacagtaaattttaaaattattttaagattatgtgggaacataattttttaactaaacaaaatttttaacgtgttgaaataattgttgcttgaatgaagtgtcattatgccaccaacttaaacctatcccaccttactcaatggtgtaggtaaaagatggtaacaatggtaacatagttgaatgacatttttagtattctctttttccagtggctttaaatagcaaatacattgaagaatatcattcccatatgttgtattttcactcttgttattttccgaaatttttgtgggtacatagtatgcatatttatctatggcatatatgggttattttcttatacaggcatacaacatgtaatataccagagtaaatgagttattcatcacctcaagcattcatcctttgtattacacacaatccaattatacactttaattatttctaaatgtacaattatgattgtagtattatatcagtataattataattcatacatttatgcatcctgaatacttctaaaaaatgttttacatttctctttgaacatgtggcatcttttcctgcaaacttatacaaactttagttccatttacatgaagttaagtatgtaaatgtgttgctgtaaagataaaccttaggtgtaagaaaattatagagcaagcaattgtgtttatgtgagtttgtacctattttccaaagaaaatagcaatattagaacaaagaagattatgttaataccatggataatttactggaaatctagaagcctgaaacattctatattttcttctttttatttaatgactctagaatctaatggattgtcgttgagaatctccccatacaaactccttgtttttatttgtctggtgctcatgctagagctataatttctttgattctcttttttgttttcacttcatgaagtgtttattatgtgagctggtcagaaattataagaatgatttttataaaatgtagtgaatgtaaaatttttagatgtaatttcataatatatgtattaagttattttagttagaacatttcattttgttgttttaatttaagaaccctatataagctgttttctttagttattgttcctttcagtttttgtaattgacataaatgagtttattttgccaatttgttcaggtaagtacttggaaaactttgtcagtcatggggatgttttgatctattattgtagtgaacaaacaaagttctgggtgtgtaatagatgcttcataattagccataaatattcctggagttagtttgtagctccaagtaagagattgaaaataatctgtggcgaacaaatggcattaattgtgcatgtggagaggacgtctgttctcaggctgcagaaccaactcattatgaatgtaaagaggatttcttttcttattttctaattatcttcagttttgtgatatctttatgatttatccccagctatgtatgcctcagagcctttcttcatttttgcgttatggctagtttgtcactgttctcttcattccacgtaatttcacgtggactttaggttaactggggtgtttgaggttatttataggttatcagtgcaacatttagatcacttgagataagagtaattcactatcaacaggtaagaggattaagtcagttggcattgtttttctgtgtttgtaaaagaaaaattgtatgagattctatcataaagtgtgtaaaatgtaacaaaagttagaataagtaaaacattaatataagtgggttgtatattgtaccaccatatgaagaaacatcagaattttgaaatttcttaagaggaaatatatcttagaaataaaatttttaggccaggtggcggtggttcacacctgtaatcccagcactttgggaggccgagatgggtgggtcatgaagtcaagagagcaagatcatcctggcaaacatggtgaaaccccatctctactaaaaatacaaaaattagcagggcgtggtggcatgtgcctgtagtcccagctactcgggaagctgaggcaggagaatcgcttgaacccaggatgcagaggttgcagtgagctgatgttgtgccactgcagtgcagcctgccaacagagtaagacccgtctcaacaacaacaacaaaaaagaagaaaatttttaggagacaatggtaagtgaggaattttacatttaattttctgtgacatagcaaaacatttttccatacaaaatcttctatttatttatttattttagatggagccccactctgtcaccaggctggagtgcagtggtgcaatctcagctcactgcaacctccgcctcccaggttcaagtgattctcctgcctcagcctcctgagttaactgggactacaatcgcctgccaccacgcccagttaatttttatatttttagtagagatggggtttcaccatgttggccaggatggtctcgatcttttgacctcatgatctgcctgccttggcctcctgaagtactgggattacaggcatgagccaccgtgcctggccagaatattatatctttgagtgtgaatgttaaatggtggaaaaacaatagaatgatctctgtagattcaaaatctgcactgatcttttttgtccagattcatattacaatcttgaggaatttctcataattctttgttttagtggatgcatttcatgggctacagttttcatttttactcacctaactttatccaagtccttggtcaccttctctggaaaaaaatttgaagattatggcagctgttgaatccaaacagtttctcagtgatttttttttttttttttttttttttttgagatggagtcttgctctgtcacccaggctggagtgcagtggcacaatctcagctcattgcaacctccacctctcgggttcaagcaattctcctgcctcagcctcccaagtagctgggattacaggtgcccaccaccacacccagctaatttttgtatttttaatagagatgaggtttcactctgttggccaggctggtctcgagctcctgtcctcgtgatccacgcacgtcagcctcccaaagtgctgggattaccggtgtgagccactgtgcccagcctctcagtgatttttgatgcaaattcatttactgtgttcacgaagtggccaattttgggacctttagcatcacttgcccttttagtgtcttacatatgtatgattaccatcagcactagaaattccaggtacttcaagcttaaaagtaagagctctagagtgtattgtcttgtattatatattgttctgggtctaagccatgctagtaaatattagagttcctatgattattttcttctttattttatttttgagacggagtctcgctctgtcgccaggctggagtacagtggtgcgatctcagctcactgcaacctccgcctctcaggttcaggcgattctcctgcctcagcctccttattagctggcattacaggtgtgcaccaccatgcctggctaatttttatattgttagtagagatgcggtttgactatgttggccaggctggtctcaaactcctgaccctgtgatcctgccaccttggcctcccaaagttctggaattacaggcgtgagccactgcgcccagcctctatggttattatattacaaaaacagcacaaaaactatatattttttataatactcaagttgtttgacaaagatactcatcatttgcaacattattctgtaatttttaaaatatatttgttaattgacagataaaatatcctgtagaatatggtgttttgtagtatatatacattgtcaaaagcttaattctagctgcttaacaaatacttcaccacacataattacttttgggataagagctcataacattgactgtgttagcattttccaaaaatacattattgttaactgtagtcaccatgctgtacaatagatttcttgaatttattcctcctaggcaactatgtgttgttttacagacatgtctccagatgcccctttcttgtaaatacccaagcatctggtaaccagcattctactctctggcttatttcacttagcatagtgtcttccacatttatccacattgtttcaaatgaaaagatttcctcccttttaacgttgaattgtatttccttgtgtataccacgtttttggaaaaatacattcatttcttggttgaaaaactcacgtgatgagaagatatttctgtattaaagcatgtattggaattccgtatatacatgttttagtaatagttgatttctaccaaatgctaaccataatactgtatatgtgttaataaattttattttcggccaggcgtggtggctcacacctgtaatcccagcactttgggcgcccaaggcaggtggatcatgaggtcaggagtttgagaccagtctggccaacatggtgaaaccccgtctctactacaaatataaaaattagctgggtgtggtgtcaggcgcctgtaatcccagctactcaagaggttgaggcaggagaatcagttgaacctgggaggtggagattgcagtgagccaagatcatgccattgcactccagcctgggtgacaagagcaaaactccatcccccctgcccaaaaaaaaaaattaattttcacagaaaattaatagcataggtattattatcctcattttacagagaaagaaacagccatagagaaaaatgacttgctcacaacacaggcaactttgactctagagataacacttattacagtaaaatccctcttcagacacaaaatacatgattatcttaaacacattcttaataaaaatttaacaaaaattgttaaatgttgtcatatatgtgtgtgcaaaacgtataaaatatacagaaaagagaaatacttcctgtatttaaaccatataaactctagaattgcccttcgatactgacgtacttgggaacagctttcctttcaactgtccttcaccacccctttagcaattcagaatatttatagcataatttttacctatacctgtagtcagtaaatgctgtaatgtaattaaatattatttactacaaactcacatagtacattatgactttattactgttataatacaaatttatttcttgagttaaatatttgactctattagtttagtttcctttgtgcctgtttctcagttttgcctaaatgctaccaattatcttacactggctccccaaataggtttttatttgtttataaaactttaaatttatctctaggaacctcagccgagcagtcagaactcacagctctgaccaaacccctagaactaagaaagaaccaaaaagttactatttaatacagacttcaaatgtgcttttttttttttttttttttttttttgagacgttgtcttgctctgtcgcccaggctggagtgcagtggtgcaatctcggctcactgcaacctccgcctcctgggttcacacaatttgcctgcctcagccccctgagtagctgggactaacaggtgcgccccaccacgcctgaaaaatttttgtatttttagtagagacggggtttcaccatgttggccaggctggtctcaaactcctgaccttaagtgatccacccagtcagcctcccaaagtgctgggattacaggcgtgagccaccatgccctcaaatatgctttcttagtactccacatttatgcagccatctgggaagaaaggagactttttacaacagagaatacccctattaaatatgggtcacagatttttaccctagtccagcctatccacctaccacagaaagtagctgtagttcattgctggggccaccagaagggtcaagatgaaattgctcagagaaacaggagggctgaccaagcagctagggccaccaccatctctgggaactttttttttttttttttttgagacggagtctcactctcgcccaggctggagtgcagtggctcgatctcggctcactgcaagctccacctcccaggttcacgccattctcctgcctcagcctcccaagtagctgggactacaggcacctgctaccatgcccggctaatttttttgtatttttagtagagacggggtttcaccatgttagccaacaaggtcttgatttcctgacctcgtgatccgcctgcctcagcctaccaaagtgctgggattacaggcatgagccaccgcgcccggccttagttgtgtgtgatttctatgtgtgctctaggcacttgccctatagctgctcctaaatgtggggtcttagaaaacatcttgtcccttcgaagcatactctgctggttggctaaattgcactgggaaaaaatagcagcagccctattgctatgtcacttgcctgcagagcaaaagttgattcaggaacagtaatttgactttgtctatattaaaaatcataaatagtcaacaaatgcaaaaaatgcaaagaatttgtaggtatgattagtgcattataggtgttttcaaatttctcctatgataaattaaaaatgtaatgttgggcattaatttcctaaacccagtgctcagcaattttctcaaattgtttacagtttttccaagagacttcagaaccattccctggagtgaattatttccaatggtgaagagtaatggatggatggcatgagattctcaaaaaaatcttgctcctatttcagaagtgtcactccagccccttgaaggtccaggaaacctggctgagtagtgtggtctatggaggtgcatgggcttcagaatcaggccaacgttgatcctgagtcccagccagctgcttagtagctgtgggatagttacacaagacacatctacaagaaaagtcatgataaaattgattgcaaaaacagcaatttgaaaaatttcttattgtattcatgtccttggaaatggcttttatagtcgttcctatcaagagacagattctgtttcccaaaccttgaacttctcttgacttatctgcactggcacagggtgccagtttggggcccaggtttaaaggtcctaaatgcttctgttatctttttcagaattcttccatctctatgacaacaagcccattttagctttctggagaatagcatctgagaaaagccaaagtgcctcagtttacagacagctcactcacagaagcagagccacctaattcaccagcatctaaccactcacacctgaaggagccaaactgagcccagaagaatggcccggctgagcccagcctaaatttctaaccagctcaatcctgagctagtatgtttcgggattgttatgcagttataagttagtaatatatacacccattaaagacaggatctcaggacagattgatcacaaataacctgcaaatgcttgccaccctgtaagtattgattttcttttttcctttatttaaagttagatttgttgtaagatgatattgagttacacagaagttaggcaggagaatagggtttggaggcagggaacttaaggccaattcgtgctgacttcctacaagaaaaaacaccaaggtctgggagcagggaacctaaagccagttaacgtgaacttcctacatctaaaccaaaaggaaagacctcatctacacccgagtagcaaaggatcgaaggcgactgtcgctacaaccctcccccttgtaccagttctctgatagaaaaggacagtgccttggagtggccgtgggccaagcacaggccatgccttcatctgcatagggtaccaattcgcctcaacctttgattagccaaggaccaaatccttcattcagataaggggtagctgataggaacctcaaaaggagtacttaaaacccagaaaacattgtaaccgggtccttgggcggcttgctggggctcacacccaccctgtagagtgctttctcactttaataaaatcttgcttttgctattcccttcctgtttttcattcctttgtgtgctttgttcaatttttttgttcgaaatgtcaaggacctggacagttcacactcacggccttccttctggtaacagaagtgcaggtatatgtggatgcatgtgattggtacttaaactcacacagtgccccataccacaggagaaaaacacacagttccagcctggcaattaggtccaaagataaatagcaaaacaagaagtttgcctttaatctattccctccacatctaaactctggagggcaaggctgtgaggagatctgaagacatggtgctctctcttcctgtggacccatcattccttgtttaccatctgatatttgaaaagaagaggaacccctgagaaaggaggcagaggctggttaggaagatagggagggaaggtcttgggagatgaaaaacacccacgggaccacacctgcaccacccatgtagctagcaggaagaaatgtggttaagaacttcctcttatgccagggtgttgatcagaagagactgtcccacttaggcccaggtgtaatgaatcaacctaaatgtcattaacttgacccagctccttataatgttactaacatgacataaatattttggttttagcttcactctttccacctgctgtcggttttgcttgggcactcatgggtaataaccaagatggagtcactgtggtcaactccaggcatgcacagatacaacacccttagcggggaaatttacccctcccatttgggcagaacccacagaagacttcctcgttcttgccacataaaagacccagaactcagccccatttctggcaacctgctttcatgtcccctttctgctgagagctttccttttgcttaataaatcctattctgctttattca

SEQ ID NO: 320 - DNA, 10074 bp, Homo sapiens
  source 1..10074: mol_type = genomic DNA; note = NC_000022.11:37019742-37029815 MPST [organism=Homo sapiens] [GeneID=4357] [chromosome=22]
gtgccggagtctcctccctttggtccgctgcaggttggtggcgggaggaggggacagctgcgggcgcggggagggggcgccgcgccgcgggggccatggcggagccaggaagccgggagtccgagacccgggtaactgccgcggcgtggcggcttgcctttctggagggggagggagtggctctttgggggtgctcggcgcggggctcccgcgcgggacctgggcggaagagggggcttagtctaggagagaaggcgcgccgctacgttggcactaagggtgactgtccgcttggggcggcctgccgggtggggtcgtggcgagtggcgggtggggagccttgggtggaagtgggtgacctggtggcaccagagagggcgggggagagagaggaggacagggagacgagaccccgctgacccagaggccccaggaagagacactagccaataacttgttagtgagtgaaaggaactaacattgtccagccctgcttggtgtggcactttgctgggtactcccgtggtgtgacttaattcccacaataaccctgaggagtaggccagaaacttactaagacaggagagagcggcagagcgagttgctggaggacacacccagagttgaggccgggcctgatccctggtctgaagcccacgtggtaccagctgcctttgtttacctggctcttccctgaaggttcatgctttttaaaaaattgcctgttttgaacttagcccgtttaatcataagttgatgtaattcaatttttaataatagctgtatttaacaaccagttggcaaaattcctgaaaagctcgccatgggctcttgcaaactgggggacaccattgcccctccctagcttttgcagaggccagcctggaagctttccctgtttcccaaccctgaccttttgttttgttttgttttttgagacaggctgtggttctgtggcccagactggagtgcagtggcgccatctcagctcactgcaacctccgcctcccaggctcaagcgatcctcccaccttagcctcccaagtaggtgggaccacaggcatgtgccaccattcccggctaatttttaaatttttggtagagatggggtttcaccatgttgtccaggctggtcttgaactcctgggctcaagtgatctgcccatctcagcctcccaaagtgctgagattacaggcatgagccaccatccctggcctcatccctctttttaaaaaaaggttttgttctaaaatgctcacagcaatcctcaaagcctagtgtctggtggttgggggagggggtgggcaggagggaccaggctggggaggtccaagaggagctcccaagctctgctcctcaaggggtaccctggatccagcctgcggctcacgcttgcttcagtgcagctgtgtatccttctgacatgagcctggggcggttacgtcctggggtcctccactcccagggcaccctcacctacagtgatcccggcttctgaatcacacaggcacctggtttctacccctccctgacacccacagcctgccttcacaccctcctttatggcccacagacctttgtgagaagtgccaatcaagcagggagactggggcagggtgacctcagatctctgaagtcccaccaagccctgaaattctaagattttagatttgctgctggcagttccagggccaccaatgagagtaatggaagaaataatgcaatattattattattattattattttgagatggagtctcactctgttgcccaggctggagtgcagtggcgcgatctcggctcactgtaacctctgcctcccaggttcaagcgattctcctgcctcagcctcccgggtagctgggactacaggctcatgccaccatgcccagctaatttttgtatttttagtagagatgaggtttcaccatgttagtcaggctggtcttgaactcttgacctcgttatccgcccgccttggcctcccgaagtgctgggattgcaggtgtgagccaccacgcccgacctaaaccgtttttaatgattattaaaaccagccagatgtaatgcatggtggttgcccctctacatttattgtttaatcttggctctaagaggtggaggtgagaagctccattataaggaacagaaaccacccagagaccctacacacccacatcacacaaccagttaagcagtggagtggggtttacattgatttggggggctctctggctcctaaaccagggctctttctactgtaaatggatgattgggtgagggaaacaaggatcctcaagaataggggacagtgtttgggggtgcacaggggctgctgtggttcccacaatagggttcctcaggaaggaacctgcagcatctgccagcacagcgccccctagctgtgctgtaacgcagataatggggatcaccccttagccaaacaccccttggcagcctccctaccctaaagaccgtgctgaggcttcctgggcccctggaaaagtcagattagtctggacttcctcctactccaggaagccttcccacctcttctgctgccaccccaggcaaacataggggccctctgtgctcaacactgaattctaaactatcctcaatttcactctctcttgcctgcagcctgacgtttccccccagggcttggcaaaggcaagagtgcctcggtgtccggcacaaggcctgaccgcatgggtgaagtaggttcctaaaagccagctgcggccagactgtgggggtgggcacagggtgtcaccctagaactcattaggccctggtcatcatggcacctggggcaggggaagtccagcctgaggggtcaaattctggctgcaaatcctgaggctgcctcctgtgaccacgggcaaggcacttattcttctaattgccagtggcctcattcataaagcaggcgtcctaatacccgcccaaggctgcggtgcctagcatgtgacctggcccacagaggcactcggtccacagatgttgttctctacctgcccccttcatttcgctggcaggactgcatgcagtgggtgtcaaggttgggcctcacacaggggataagtgagggctgatctgcagcccatactccacacacccagccatgtgccctggtgggggctcagcctctgcctggcagaaggggccctttcctctcacctgcacaacggtggcttcccagcacaaagggcttaaagtgtttgggaagtttacacccaggaaggctgtgggctggcctggcatagtgggctggcgagctggtgcactgtctctggtatgcaggaaagatagagaggagagggagggaggtgcgaagtcactgttgctgctgctagaagggccagagagagcccaggctggacaggcaaaacctggcctcgccagactcctggagcctgcacagagtgtgtgtctgagaagtccggattctggtgccagactgactgcctagtgagaagcctggcaccgccgggtcaggctagtgcactttttcttgtttgttttttgtttttgagacagagttttgctcttgttccccaggctggattgcaatggcacgatctcggctcactgcaacctccgcctcctgggttcaagcagttctcctgcctcagcctcccgagtagctgggattacaggtgccctccactaagcccggctaattttttgtatttttggtagagacggggtttcaccatgttggccagactggtttcaaacttctgacctcaggtgatccacctgcctgggcctcccaaagtgctgggattacaagcgtgagccaccgcaccaggccaggttagtgcacttctgtgagcctgagtgtcctccttgaaacggtgacaataatataccaggcctcttaagatcactcattcaacacatactggagagtctactgtgtcaggcattgttctaggatattgttaggattcagtggtacccagcaaggactcagtaaattccagctactgttcctattaggtcgccaatataaatgcttgatgagtgaatgaatgacttccgtctgggacttggttgcaaataaagccgagctgcatcttagggaggggtggagactttgcccctgtttgtgccttgaagccagcagggccttgccctaggatacctccacccaccctcctgcccagcaagtggaggtgaggggcgtggcctggggctctccgggaggtcatggtcattgggtcactcggagcttgtgtttatatgaggcctggcagagggaggcccctggctacccacctttgtgcccgggttcaccaccactggtttctgcgttccctggactctgccctgcacgggccgcacctcccccgccggccctcgcccatgctccagccccagccctagccccaacagcggcctctccctgcttcccttctgacatcctccctgtcgcccaggcccgcagcccgagtgtcgccgccatggcttcgccgcagctctgccgcgcgctggtgtcggcgcaatgggtggcggaggcgctgcgggccccgcgcgctgggcagcctctgcagctgctggacgcctcctggtacctgccgaagctggggcgcgacgcgcgacgcgagttcgaggagcgccacatcccgggcgccgctttcttcgacatcgaccagtgcagcgaccgcacctcgccctacgaccacatgctgcccggggccgagcatttcgcggagtacgcaggccgcctgggcgtgggcgcggccacccacgtcgtgatctacgacgccagcgaccagggcctctactccgccccgcgcgtctggtggatgttccgcgccttcggccaccacgccgtgtcactgcttgatggcggcctccgccactggctgcgccagaacctcccgctcagctccggcaagagccaacctgctcccgccgagttccgcgctcagctcgaccccgccttcatcaagacctacgaggacatcaaggagaacctggaatcccggcgcttccaggtggtggactcccgagccactggcaggttccgcggcaccgagcccgagccccgagacggtaacgcgggggaagggggcaggaggtcgtcgggggcgcggcctctacgccctgagcagtgccctggacttgacctttcttttatttttttaatttatcttgctttcatttcctttccttttttctttcctttccttccctttcccttccctcctttcccccttttccctacccttgccttcttttcacagggtctggctctaccgcccaggctggagtgcagtggcacaatcatggctcactgcagcctcaacctcctgggctcaggtgaccctccccgctcagcctgaccttgcctttaaaggccactgcatgaggtggggaaggagatttgacttccacttgcctcggtgactttgtctgttaagcagaaccataatactggcccttcccctcctgtgctttgggcagtgactctccctagctcattgggaaccctggttgcccaaacagctctcaatccaacactagaggtgtggggggtcactgtggaatgttggggggcaggccccagtatgagagaaaaacccagagggatggtcctgatcagggctacccatgcccctgaggatggtggaatgaaggcagagtcgggggctgcataaaggaaagtctcttccagggaccaaagcttggagaactgagggtggaagggggattaaacagaagtgggtagggcagagccttctgcctgtgggctggatttcctcaggcaagaagcctgtgggtaagctctgtataatgcgaggaggagtccccacaaagcaggctggtcagtggtcacgctagtgtgagtctttcaaacatcccgtgtaagtagatactgtcattgcacagaggaggaaatggaacctggcccaaggtctcaagaaacaacccagccgggattcagactcggcagcctgcgcacttaacagccgtgagcaaccaggaactccccagccctttctcttgtgccttcaagagtgcaagaaactgaccactgcccctagagagctctctgaagagcattcccatggctacagattgggtttggagccgcttgggctcaccatgggccagcattgttttggatggcctgagggcaaggactgtccctgctcttcatgcatcctgaagattagctcagtacctggcacagagtcgatgttccagagaggtttggtgaatacagaaggtccctgttgcatggaatcctgcaaagcaatgttggtgttaccggaaccataggaaacagctgatatccaaccatttttgaacctacacaggtgtcagtttcatgtggttcagcctaatgagagcaccaccttaatcctgttgggttctccatctcagccccaggggaatgagcaacacaggggagctagctggtggtgccagactggggttcagatccctgccacatttacatgggctttgtgacacacgacgggtcatctaatgtctctgaactgcagcttctgcctatgtagaatgggagcagtaacacagagcataaagacatgataggggcaaggagagcaagtgtgtaaagcactcagctccgggttttcatgcacaagtgtgctgcacacttgtgcctgacacttattcagtcgcactagctcatctatagaatgggaggtgatacacgcctagcaggcttgttgtcaaaacaaactaagctcactgcagctggatcagtgatgaatgtcactgtcgtcatcattcccactccacagcctgaggcctggccaagtgctcctgtgatgtgccacaccagtccagcaggcaggggaaacatgctttgcttggtgggattcaaggtgtagggatggccctccctttacagtcaccaccctgggttgagagtttgttcctcctccttgctctgggctggtctctatgtgatatctgaccaagcccggtaactgtgtctgttaggtgggatgcatgacccattccagcctctccacagactcgggagtgctgtctctatgccagggtctgagaatagataccgatacatgggtcagcagctcctgtgggggtgtcactccactgcggagggaaaccaaggcagaagctggacaagagtctgaatggctcagatttgaatcattcgtttttggggggttttttgtttgtgtttgtttctgttgttgttgttgttattgttttgagacggagttttgctcttgtttcccagctggagtacagtggcgcaatctcggctcaccacaacctccgcctcccgggttcaagtgattctcctgccttagcctcccgagtagctgggattacaggcatgtgccaccacgcccggctaatgtttgtattattagtagagacggggtttctccatgttggtcaggctggtctcgaactcccaacctcaggtaatctgcccccctcggcctcccaaagtgctgggattacaggcgtgagccaccgtgcccagcccaagcgttagttgtgaaggtttattttgttgcaaatcccagtcctgcatgaaaatgggaatgttagtaacccctgcctcaaggtggggcagtgaaaacaaaaaacaccctgggagtctgcagaggtgtgggcctttcccatcccattctttctgctacaatcaaaatgatcgtttaaaaatggaaatctaggttgggcaaggtaactcctacctataatcctcacactttggaaggctgaggtgggaggatcccttgagcccaggagttcaagaccatcctggacatgatggcaagccccttctcaataaaaaaaattaaaagtaacagtaaaaaagtaaacgcagaagcctgagttccccctgcagtcaggtcaaagcccccaagtcttactccaggcctgctaaggcgttcccatccccttcagcttcccctttgggcctctggcttctcactgtctgggctttcgtgacaatgacctttaacccctccgggcaacaggtggttccctcgcctttcagattccctctgcctgggatgctctaggcctccatccacccagacccctttatgtgactgaatcctactcatccttcggggcattctcagagaaacttcctccacccactgagcccccagccagtgtggcgtgaaggtgggaagcatagacttgcctgggtttactcctccctgccctctgctagcttgcacaagctagtctttgtacttcattctcttcatctttacaaaagagaggataataatttctttcccagagaattttggggtggattcaaggagaaagtatagctgaccgtctccaaacagtgcctggcagaaagtaagcattcaataacatcagctattggccaggcaaggtggcttactcctatattcccagcactttgggaagctgaggcagaaggattacttgaggccaggaattcaagaccatcctgagccacatactgagaccccatgtctataaaaaccaaattaggccaggcgtggtggttcacacctgtaatcccagcactttgggaggccaaggcaggtggatcatctgaggtcaggagttcgagaccaccctggccaatatggtgaaaccccgtctctactaaaaatacaaaaattagccaggtgtgatgggtgcctgtaatcccagctactcaggaggctgaggcaggagaatcacttgaacccaggaggtggaggttgcagtaagccaagatcatgccactgcactccagcctgggcaacaagagcaaaactccatctcaaaaaaaaaaaaaagaacaaaaaaaggaaattagctgagcatggtggcatgtgcctgtagtagtcccagcccctcggggggaagctgaggcaggaggattgcttgagcccaggaggttgaggctgcagtgagccttgatcatgccactgcacttcagcctgggcaacagaatgagaccctgtctcagtaataataatatcagctattgctgttactggcgttattttttttttacatgccccaggccacccagtagggcacttttggaacacccattatgcttgtaattattcagttgcctgtctgccctgccagattaaagctccttgcctgcaggtactgcacgttctagctaggcaggggtcttgtttattgctttgctgtccctagggtgcatagtcaggaaaccttggggcccagttcttaggttcaaagttcagtcagcaatttgctagatgtgttagcctcaggtggtacttaacctcagcatcaccgtgtataaaatgggggctcctctaaacagtgctcaggttttatggttgtgagaattaaatgagatggtggatataaaggatttagcaccatgcttgcatgggatgctctcaatatctcgagcaccacaaatacgaggtaccattcatagcatccttctatttgtcccctcctccctgctcccctgctgtaggcattgaacctggccacatcccaggtaccgtgaacatccccttcacagacttcctgagccaggaggggctggagaagagccctgaggagatccgccatctgttccaggagaagaaagtggacctgtctaagccactggtggccacgtgtggctctggcgtcacagcctgccacgtggcactaggggcctacctctgcggcaagccagacgtgcccatctacgatggctcctgggtggagtggtacatgcgcgcccggcccgaggatgtcatctcagagggccgggggaagacccactgaagctgggcaggacacaggcgagctcaggtgatgccggccaccagcaatgcctggcctggtagctccgcttctgctttcaccaagagagtgtttcttcactcaactcaggtggcatttggggtgacatctcaaaggccaggaattccgttgacttgttggctgccagtaggggcgggaggaaaggcggaggcgagccctggaggagggaggccacaactccgagctgcccacctggtgctgagctggggccccgcctcctttctgttttatttttgaggaaataaaataaccaagtgctaaa

SEQ ID NO: 321 - DNA, 212110 bp, Homo sapiens
  source 1..212110: mol_type = genomic DNA; note = NC_000015.10:49155774-49367883 GALK2 [organism=Homo sapiens] [GeneID=2585] [chromosome=15]
gaagtggttggtgccttagcaactaaagctggcaactgggacatcgtccggtgctgcaggtctcagccgaagggcgtcggaaactgcgctcgcatcgagcagtttccagcctcctgggtaaaggagcagtctcctcccttgcttgggactctggacgcatctcattccggtgaaagtaagggacagcttaggaccagaagcctttcgcggagaaaaggctgacatgcccgtcctatatgacaggtattatttctgctatcattgtacgtgtgcatttagcccacacattgcggtgggtgttcctaagatacttggagtacttttcagcaacacagtttacacttaatgcttgttatatttgtagttgacaaaacaattctatggatatcctaaattaggtatgcagctatcagttgagttgccttaaatcttactcagttgttcaacgagttgtaaactgacctttacagcccttgggaccaaattaaggtaacaacgactggtttttaaaaaatacattactgtgaacctgagggcatcatgttgtaaggagatgggggctgcggtgactcgcgggatcaggaatttcaagagaaccgagcggaaagggaaatccgcaacatgaagccctctctcgctcccaggcacccctctaccagcagcctcctgccagagcagattagtctctatccagaaattaagggagagattgctcgtaaagatgacaagctgctgtcatttctaaaatatgtgtgtgttgattccaaagatcctgtgtcttccgtgcagctgaaagctgctgaaacacgtcaggagccaaagaaattcagattgccgaaaggccatcactttgatatgataaatattaagagcattcccaaaggcaaaatttccactgtagaagcattgacacttttcaataatcataaactttatccagaaacatgaactgctgagaaaatagcgcaagaatatcatttagaacagaaagatgtgaattcccttcttaaatattttgttacttttgaagtcaaaatcttccctcctgaagacaagaaagcaatacaatcaaaatgaagaaaatcacaaaaatttcctatgtgtactcctcatccctcatcctgtatattttcttatttttgcatattaaattatgttaattaccaagtgtttaatgctctcattgtgagagcatcctcttaatatttattgagctccctgaattttcaagattgccatagactgtattttgttttcttttaatttggtttaggcatatttcatatgtacatgttagcatgactaatcagcacatctgtacctttattataagtaaaagagttaatttgttattttagacacatcataccaacttttaaattggtcatatgaccccttgggaagtgtcctgaatccctcatttaagttttcctatccaatttaggtgtttagttcattcttcatatgtgatagtgaaagtaaaagctttcctgactcttaagactgacattttcttgctagggaaagagactcgatagtaaggtagactaacagtatttcccaaataaaggcacataggagaaaataaagaatcaataaaatctaattaaaattactaccccagggaataagaagtattgaggatttattttattttgaattggttttaagtatggaataattgtctttacagttataaaaagtaattagtggtgtttacgaaatgttgggaatttctgctttgacaaatagttaagtcccatggccttcagagagagaggcagtagtagaaactttcgaaaaagtaacatttctctggatttaacatggaactagaaaaatttaaagaataattaaaaaaccatggtaaatgaaatttggtgattatatatagttttggatgttaatgctagttgagagaagagagaaaaaatagcaagtagaagcagagaacaggatcattggaagggacctgagaaattgctgctttatccattttagcaaacttattagcacggcatgtaccagtactaggatcttgagtaagagtgtgtgagtttagctctgcctaatatattactacttgtgggatctttgggagactatgtcctctttgagattgaatttcttctataaaatgagcataatgctaccttacttaaatttaagggttatcatgaagataagtgaaatagtaaaggactacaaaagaccaagggaataatgaattttttttttgtagtggagaaacgcctggggagaatatatgacctaaggtttctgtagtttatgacctaaccaggcccagaacttagtttttcaaatcctagtagtgtgttttttctgatgtgccaaaaagcagcacacctcagagaagggaataagtgtgaattgtgggtatattggggttatcagtgtgcttctgagggaagataggcatcactacttcccagagatgcccctggaaatgatacagaagatgctaaagaattcaacaagatgacggaatgaggcatttgtagtaatgctgagaacagaaaaatgaactaagtggaaaatttgtaagcatgtctttgaatgtagattggttaggtgaacaaactacctagtttatttttagttcagtacaataattgttttaagaaaacatgaaataactactcaatataaaatgcattttaaaactcctgtaaatcagtcaaaactttattccatttgtcataatggtaactagttgagtcactaatactagtacactcttatttctgagccatctttattcatatctacattgtgtggttaggcagctgttatgtggtatcacatgataaaagatttcttcccataccattaaaaaaatactattacacaaaatcattggcagaattcaaaataaagaaaaaaatgaaataaaggggaaaaactgcttttcaaataggtagcattttccacgtaaacttccagatctgtccacgtgactccacaaatggttatgtagttaagcatatagatttggattatttttgcatctatgtagcagcataggtcaatatttggttgtttatatttagagacaagatcttgctctgtcacccaggctggagtgcagtggcaccatcatagcttactgcagcctcgaactccttggtttaagtgaccttcccatctcagcctcctcagtggctaggacttcaggtacatgccaccattcctgactaatttaaaatattttttttgtagagacaggggtctcaccatgttgcccagactggtcttgcaatcctcccacctcaaccttccaaagcactggtattacaggtgtgaaccacattgcccagtcttaaaatatattcctaataataattattttagtggctgtgtaataatccctcgttgaatgtacccgtgcaccataattcatgccattattgttatacattcagagtattgcagaaataacactattttaagcaattctgcagtgaatatctttgaaattttattctttaaaaaataattccggctggcgcgctggctcacgcctgtaatcccagcactttgggaagccgaggcagacggaccacctgaggtcaggagtttgagaccagcctggccagcatggcaaaaccctgtctctgctaaaaatacaaaaaaaaaattatccaggcatggtggcgggtgcctgtaattccagctggaggctgaggcaggagaatcttttgaaccagggaggcagaggttgcagtgagccgagatcgcaccattgcactccagcctgggcgacagaacaagactctgtctcaaaaaaaaaaaaaaaaataaaataaaataaataattccaagaagagaaattacaggcttgattcttttttagtaattacttgaattgacacctttttggtcatagttcttttaagttatatttgtgacaataatgtgttctcacctatacatacaaatgtttttccctaacagtcttcttctcaatattttattatgataaatttcaagcatacataaaattgaaagaatagtatagtggacatgtatatacccattatcagctttgattgtatgtatgtgtgtgttccctgtatcagttgaaaggattcggatatcatgacacatcactcctaaatgcagctgtgtctgtttcctaaaaataagaacattctcctatgtaatcacatcattattacatataagattaataatactggccaggcacggtggctcgtgcttgtaaacccagcactttgggaggctgaggtaggtggatcacctgaggttaggagtttgagaccagcctggccaacatggagaaatcctgtctctactaaaaatacaaaaattatccaggcatggtggcacatgcctgtaatctcagatactcaggaaaccttaggcaggagaattgcttgcatctgggaggtcggggttgcagtgagccaagattgcgccactgtactccagcctgggcgacagagtgagagtttgtctcaaaaaagaaaaaaaaagattaataataattccctatcattcaatatccagtctatattcaaaattaccatattaaatgtataacttagaattggaagagcctttaatgatatcactttacagtataaggcttcccaaatcccacagtagagattctgattcagtagttctgagtggcattcagaaacctatacttgtaactttacaacaaaacaaacctccctgtacctgggatgactatacatcccagttttcctgggactgatctcgtttactactgttgacccatcataatagtaatagtacccaggccgggtgcggtggctcacacctggaatcctagcactttgggaggccgaggtgggtggatcacgaggtcaagagatcgagaccatcctggcgaacatggtgaaaccccgtctctactaaaaatacaaaatacaaaaattagctgggcgtggtggtgtgcgcctgtagtcccagctacctgatgctgaggcaggagaatcgcttgaaccggggaggtggaggcggaggttgcagtgagctgagatcgtgccactgcactctagcctggtgatagagcgagactccatctcaaaaaaaaaaaaaattaatagcacccatcactttcagaagttagacagtaaatcacatggttactctacttttaattgttcaaaagagaaaataggatcccgaggtagttaagaggtttatttgctcagagtaatcaaagtttcatagttttactttgtactcaagatagcagttgcaaaatggataatatgcttaacaaatgcatactgatcacatatatgaaactgcatgttgatttacatttaaatatattgcataatttgctgcttttaaatgtaatgccttattcctacaatgggaaaataagtatgcaaataagctggtaagtaggaagactgggtgaacggcagctaaattttgagtataatttccttggccatgaccaaatttattaagtctagtctggaaatttactaacagcagttgaaaaggtcttcactgtgctgagcatgctgcttgagtacacaggtgctaataagtgctagttggataaataaaaatgttaatagattaatctttctgtatcacacatcaaaatatttttctgtccttaaaaatccatgtaaatgtgaccttattcacatagcctatcctgaatactttataccgttaagatactctcttttattttttcttgacattaattttattcaatggtaaataatagaaaattgtaattttaacagagtgtatttgtgtgacatgctgcccttgttgaaagtggatcctatgtttttaaaacatattttcataaaatggcattattgaggtattattcagtagcttcatttacctcaataaggtaaattaagctgcacatacttaaagtataaaatttatttatttattttattttattttttgagatggagtcttgctttgttgcccagtctagagtgcagtggcatgatctcggctcactacaacctccgcctcctgggttcaagcgattctcctgcctcagcctccctagaagctggaattacaggtactcaccaccacgcccagctaatttttgtatttgtagtagtgatgaggtttcgccatgttggccaggctggtctcgaactcctgacctcaggtgatccactcgccttggcctcccaaagtgctgggactacaggcatgagccaccactcccagccttaaagtataaaatttaatgaactttgacatatgtatacacctgtgaaactatcacgacacaagataatgaacatattatcactgcaaaatttcctctcagattccttgcagaaatttctctcctccccccttaacttttcccaggtaactgctgatctactttttgtcactatagattagtttacattttcaggaattttatataaatggaatcatgcaatatgtactctcattttcctggtttctttcacttagtataattatgttgagatttgtccaggttgttgcatgtatcagttggttgtttctttttattgctgaatattcattacatggatatattacaattcatcttacccatttatctgttgatagatattttaagtttttttcagtttgtggctaatataaatgaagctgctaagaacatttgtgcacaagtttttgtgtggacatatgttttgtttctcttgggtaatttatggtagacagactctggtggctacccattatctatttccttgaataattctttgctttttgagcgtgagtgggatctgtgacttgcttctaactaaaatacagcaaaggtgatatacgtgattatatatacatgattacattatacaagattgttaagtcaatcctgataggaaagatgatctcctgtgctggctttgaggaaggcaagtgcccatgttgggaaggacaacacaacagggagctgatggtggcatctggttagcagccagccaaaaaataaaaaatatggtcttagtctgacagcccacaaggaactgaatgctgctaacagccatgtgctcttggaagtgaatccttccccagttgagcctcaaataagcctttgtgagaccttaaaacaggatggaaaattgtgagataataaatgtgtatttatttatactactacatttgtagtaatattgttacgcagaatagatgtgaatgcagttagtaaatatcttgtagtgaaatggttgggtcatatggtaggtatatatttaactttttaagaaactctcaaattgttttcctaagtggttttaccattttgcatatccaacagcagtgcataagagttctagttgctccacatccttgccaacatttagtgtggtcaatctttttaactttagctactctagcaggaatgtagcagtatactattgtagttttaatttgcatttacttaataactaatgttgaacattttttgtgtgcttatttgtcatctatgtatcttctttggtgaaatgtttttaaatatattttgcctattttttaaactgggttgtttatcttattactgttgagttgtaagagttctttatgctttttgtgttgtattcatctttgtcatacctaagggcgctgagattttcacttatgtttttttctggaagttttatatagttttacctcttccatttaggtctgcgatccatttcaaatttaattttcgtgtatagtgtgaatgaatgtggaggttcattagtttgcatatggatgtcaaattgttccagcatcatttgttgaaaagatacgctttttcaattgagttgtcttggcacctttgtcaaaaatccaatgacagtttaattgtcagcataatttgatccttttaaaatatatttttcataattgtatgctaccttgtattacaattatttccatttattcattattaaacagaaagctccttgaggacacaactgtctttcttacttctgaattctctgaaatgcagcatatgccttgcttatagaagattctcaatgaaaatgtgatgtgtttaagtaaactttagcattcatgactcttcacaggccttggctgagtcataccaaacaggtttatgatttggcatcctttcagaccaatcatctttaaaatttttttttactatattaatttggggagactgaacactgtgtgttagaagagcagaaaaagaggactccttttgtattagtaaagttctggaaagaaaactcgtggcatactcagggaagttaactgaaaatttaattaagggactatttatagagatggaggcagggttaagggaatcaacaactacttatactaagccttcagaatgctccagactgcaattatatctttcatctctatagttgacataggaggaatatgctaatacagtatgattaagcattgaaggggttcagaatatgccaccccaaaatatgctactttggcctaagtattattttgagccgaagccaattgacaaccagtagatgcagttatgtcagtcactggagagcattagcaaatgtattccaaaaaaaaaaaaaattgcttaagataataaccacaatcagctcctcattgaggtgggcaacattggatggttatgacaaggtgaggaaagaattgtctagtttgaagattcttggtactatatttagtttctaggtgaagaaataaaaaggaaggctgggcatggtggctcatacctgtaatcgcagcactttgggaggccaaggcaggtggatcacctgaggtcaggagttcaagatcagcctggccaacatggtaaaaccccatctctactaatcatacaaaaattagccgagcgtggtggcgcatgcctgtaatcccagatgctccggaggctgaggcaggagaatcgcttgaacccagcaggcggaggttgcagtgagccgagatcatgccattgcactcagcctggatgacaaaagcaaaactccgtctcaaaaaaaaaaaaaaaaaaaaaaaaaagaaataaaaaggaaaaaacaaaatatagttttaaattggggcaatttatctgtagtttggtcaggctaatgtacactgtaagcttgaaatgcaaatttctaatttcagagtctaaatatttgtttctcagatttcattttgatgatggaatgtatactagatgcagagtttgcatcaatttttgtaatatattcatttatttacttaactaattttaatttgccataatagcaggagctttttgtttatgtttattgttgtatccccagtgcctagaatagtgcttagaacatagtagcacagagaaacatttgttaaatgaatgaatgaatgatagaataatggatgaaacatggaatatgaattttagtggaggtgacaggtaataagtataaaaatcaataaataatgtaatttcagatggccttaaagacagcaaaccagatttaggtgatagagaataactggagagaatgttgggatggtttttaaaatcttcataataaccctatgaagtaggtatttttatctcccttttttagaagaggaatttcagacttgcctagggtcacaaagtagtggaaccacgctaatctgatttcattaatttattccttcattaaacattccttgagtgcctgctcaacactgagccagagtctataaaatcagagtaaaacagtctttgccttcagggagcttataatctagctctgtgctgtctaatatagcagccacttgtttctcatcataattgagatatgctgtaattgagatatgctggattttggagacttatttaaaaaagtaaaatgtcaataatttaaaatattatatttaaaatgatattttggtgtattagataaaatatattattaaatttaacatttctttttattgttttgaaagtggcttctagaaaatttaaaatggcatgtttgacttgcattgtagattctgattcagtaggtctgggcccaagataatgtatttctttttttttttttttttattgagacggagtcttgctctgtcacccaggctggagtgcagtggtgccatctccgctcactgcaagctccgcctcccaggttcacgccattctcctgccttagcctcccgagtagctgggactacaggcgcccaccaccacgcccagctaattttttgtatttttagtagagatggggtttcactgtgttagccaggatggtctcgatctcccgaccttgtgatctgcccgcctcggcctcccaaagtgctggaattacactgcgcccggcccaagataatgtatttctaaaaactttcaagtgacgctgatgctgctgttctgaggaccacactttgagtagaaaaacttagactagacagaaaacaagtaattagagtactgatgtgatgctttgtatgactgggcaagcagagggtgcttagagtcttcgttttgttttgctttgtttttcactctgcaaaacaatctatgttcggttaaagcatttttgcacaatttttatttcctccataactacataaatatagatttctctgattcatgagtttatcttttgccatttaatgattatatacactagagagcagtatctattttatgaacagaagaataaggggccgggtgcagtagctcacgcctgtaatctcagcactttgggaggccgaggcaggtggatggcctcagttcaggagtttgagaccagcctggccaacatgttgaaaccccatctctactaaaaatacaaaaattaagtggcaggcacctgtaatcccagctactcgggaggctgaggcaggagaatcacttgaacccggaaggcggaggttgcagtgagccgagatcgcgccattgcactccagcctgggcaacaagagcgagacttggtctcaacaacaacaacaaaaaagaaggaatgtaacatcattataaagaagacataaacaagtattacatattatttactataatgagaaaatatccaaaataggtcactgaagtagattctcccaattgtgaacaatagtttttattgtaagtcaaaataggaaatattttccagaggttgcacaaacagattaaaccacagaaataacattatttcagataaatggtcaatccctctgtggtcttagacatttagttttgggtagagaacatggaaaacttcctgaaggaagtgatttctaagctgagaaacatcaataggcactagccaggtctgtaagtctctaacacccatgctttaactcatattttggatcaagtttttgtattctttcattttagtgtttgttttgtttttgtttagtttgctataatattttatctgaatggagactaatatcctttgaggagaaacaatttcaagtttattaattaggtttctgtttaagactccatcataatataccatttattagtttataattcagattctaaacctattgtaagagtgcctacttgcaaaaagcaaagaaccagaggttcaggatttgtgaaaataaaaatactgtaaaatataaatgtttaaatattttcttttctttttttttgagatggagtttcgctcttggttgcccaggctggagtgcagtggcgtgattttggcttactcaatctccatctcctgggttcaagcgattctcccgcctcagcctcccaagctgctgggattacaggcgcccgccaccacacctggctatatttttgtagttttagtagagatggggtttcaccatgttggccaggccgttctcgaactcctgacctcaggtgatctgcccaccttggcctcccaaagtgctgggattataggcatgagccactgtgcccagccaaatgtttaaatgttttcactattagatatgtctaataagaactaaaggaatatcttcttgaaattgaaaaggaaataatatttttctatcccataaggattgttggaaaggtttaaagagacaataatatacgcaaagtgcttacttagcaagatgcctagtataaggaaggtagtataagaaagtaatgttttgtttttggtgtccatttggggttctctagtagtttggacaggttattttaagagtaatcctttatgaaaattataatgtacacattttattttgggacaaggattctaatcatttcaataatttatttttaagcacagtttactggggtctcaacaaaagtcacatattcagaagtagtatggcctctaggctaggagtctagagacctaggttttagttctagctctgttaatcctgttttactttgtgccaatcatttcaaaaaaggatgctttactaattgctctgtaaggtgctttctagtctgcatcggttttgttgagactgcaatagcaatgtatccaaggtccaaactaatgatttgccatctggtttcatttagcaaagttaatgttcggtcatcaagtacatattcagtaggaagtattctttttcgaaacagtttctacagtcatttttttttaaccctgtataaaatgagtttattttggactgttaaaaaaattcaaaactttaaaatttgttatttttcaactaatgcaaaagaatatattagaaacatctgaataaaaaatgattctgggctgggcacggtggctcacacctttaatcccagaattttggaaggccgaggtgggctgatcacctgaggtcaggagctcgagaccagcctgcccagcatggtgaaaccccgtctttactaaaaatacaaaaattagctggtgtggtggcggctgcctgtattcccagctacttgggaggctgagacgggagaatcgtttgaacctgggaggtggaggttgtagtgaacagagatcatgccattgcactccagcctgggcaacaaagagcgaaactccatctaaaaaaaaaaaaaaagattctgttcttttctgtatttactgatgtccctaaacattttacatttttttttaaaatttaggttatctccctattaaaactatttacaagtgacagtgatgactcctgttactcaaaattaaaccaaaatgaacatcaaactgggatttattggggcccagaaacaagaagatataattcattcatttgaaaatgataaagagggactgaaataatagtgagaaagctgccctgagaccagagtaactttgtttctttgatgtatcatttacagtaataacccaacggggtgccaaggggctgccactctttggctatgctttattgtccattcacactttgtctccatgtttccttcccccttcctcctgtatacatgtatacagaagggggaaggaaacatggagacaaagtatgcatatacatatagaaattctggagcagtaacttactgatgtatacaacttatcgaatctctctgagttatgctactacccctagtgtgttgggcatgttggctcaaacttccttaatcaggaaactttggaatgggtttattgctagctgtctttgcttgggtttaatctcaatatttctgaggtgcaaagtgcactagattgagagttaatagatctgaattttaattccagttttgttcccaatgatcactgtgacctcaggcacatcatttcacctttcgtcgttcattcagtttatcttacctattcattaaaaaccaatctgcctgcccccagttgctttctagtggtagtgatgatggaggtggtgagagacacaataaatacataagcaaataggagaactatgaaggaaggaaaagttagtgatgtactagggatagtgtacttttgatagggcatctaggatttctctagataagtgaaaaatgaagaggtttaactggatgctaaggggtcttgcacattaaaaggcatgtgtttccgtcttttcactactgtgttctaggaaggcccaccaatgcctctaacctgtaaataaatgcaaatctatttaaatcaagtgatacatcaattttatgttgcttgatttggaagtaatccgcaaagaagcaatagctaaacattttagtgttgtttggggagtagctgctgaacaataaagaccaaaaccataactaaaaaacaaacaaacaaacaaaaaaacgcagcccgagacagatcagaaactaggtgtatgtagggcgccaggttatgacactgttctctgacatccacagggcgcaaaaagaaaacctcactagtcagcttcgcacgtgctctgcgcaggggctcctgcgaggccctagtccctccctgggagctaagagcaggacggaggctgtacctgactgctgcttggagggaaccctggctgagtccagggaggaggagccagaggaggggccgattggaagcagccacctcagcgaagctgcaggatttccgcagggcgggagctgtttatctcccggaagaaaacggctcctgtcacagaagtctcgtgattgctctgggagctttgcttagacacttgaaactacaggagaaagaaggatctagcgaaatatggctacagagagccctgctacgcgtcgggtccaggtggcagaacatcctaggtgggggagaggagacgccgggctttgggatctgctgggttggctacgtgtagatcgggtccacagcacttggctcctcccttggggcgctgcttttggtcccggggagcaagtggaacccttgggattctataaggacacgtggctgggcttgcaaaaaagatcacgccgcaaacacattctaccttgactactacgaagggttgtatgtttttttcttcatccatgcagattcttcttttccttttcttgttgtaattagtgtactctttctactgggcttcagcagaaatgcccatatccacactgaactcctctctttgtctcgcatgccagttgatactgctttttaaaagtcttctttctaaatattaattgaaaacaaacacaaaaaccttcttggtgtctgcatcctctttaaaacaaaacaaaacaaaaacacgagaatctctgaactgtcacttagggaattaatttgctggcagtccctagctacacagtaactaatagtttagtgatgtctcggggaggatcttttcagttacaggtactttgtagaaatacttcgttctgactaatggggctgaggtctcataaaatgaagtctgtcacctgctacattagcgaagggctttcctgactctctgcttttgctgtttttcttttcttttctttcttccttcctttcttttttctttttctttttctttttttttttttttttgagacggagttttgctcttgttgcccaggctggagtgcagtggcgccatcttggctcaccgcaacctccgcctcccaggttcaagcgattctcctgtctcagcctcctgagtaggtgggattacaggcaggcgtcaccacacccggctaattttgtattttcatcagagatggggtttctctatgttggtcaggctggtctcgagctcctgagctcaagtgatccgctcaccctggcctcccaaagtgctgggattacagacgtgagccatcgcgcccggccctctgcctttgctgttttcagtttttttctgttagtttttttctctggcatcaagtccttaagctcttcctacttggtggtttattaccaccgtgtgtcagttgatgatattatactttactacaacttgaaaatgttctttcatccttaaaccagcaaacagtgtgtctttagttaccagaaagaagcatgatttcttattatagagtccagcacagctttggactacttctcaatgtctttgaatgttttaatatactctagaggttcttgtatagcactgttgcccttatatatttgaattaattaagacacactgttaaaggcatgcttccaataagattaatgagaaatttgttacatgaaaataacttgatctcttgtagtttagtcttattttttttttttgagacagagtcttgttctgttgcccaggctggagtatagtggcgcagtctccgctcactgcaacctccacctcccaggttcaatccattctcctgccttagcctccagagtagctgggattacaagtgcccgccaccacgccccgttatttttttgtgtttttggtagagacggagtttcgccatgttggccaggctggtctccaacttgtgacctcaagtgatccgcccgtctcagcctcccaaattgctgggattacaggcgtgagccaccgtgccacgtctatagtttaatcttctacataaaacatacccatgtgtaaattcctaatgtgtttccattttatgtgattgtaataataaagatcaacatttctatctatatttaccctgtttgggggaggatggtggtaacaagtataggtacatgtactaaaagtgaagaattgtttactgaatttccttagtgttcttcttgcttttcatgatttttatattattcatgtaacaaatatttattgttaatatttattctgtgttatccacagaagagatcatagtagataagctctgccgttttcttgtttttcatttgtgcacaaaatgcaattattagcttcaagcaatgttttatttgcaggaatgttttgcagccacttactcattctaggagggatgtattttattaaatctaaatagtataatctataaattcacctaaccggtcaagtattgcaatatgctgagaaggaaaaaaaatgaatgaatggtcagcctgctttcttgtggaactcttattctttttccaggatgcctcttcaacctcacaaggcacatgatcctttgagtaaaggcactggtcaaccatatcatacattttagtaaaacttaattttatttttattatttttatgtaaaaatcaaatagaaattgaagttctaatattttctttctgtgtcccactcttgcatggtaccggtaccgtaagactctgaatttcactgttctggctttctttgcattcttagcagttgtatctcttatctttactttctcttttggattaagttttaaaacttgttggattattgctatttttgtagcagttttattgacattcacgtatcatataactaattcatttaaagtttgcaattaaatgggtttaatgtattcatagagctatgcaaccatcaccataatcaaatttagaacgttttcttagaaagaacccagccatcccttagattatcacaccccagaactccattccctttcccctcacctagccttaaacaactactgctctgttttctgtatttatagatttagtcactttgggcatttcaaatgaatggaatcatataaaatgtgtgtttttttggtgactggcttcttccatgtggcataatgttctgaaggttcatgtatcagtacatcatttaacatgtatcagtatatcattcctttttatggttaaataatattctagcttatggatatacattttgtttatacattcaacaattgatggacatttgggttgcttctatcttttggctcttatgaataatgctgctgtatgaacacattcttgagtctctattctaccagttgagctagcagggtgacactgaatacatttttaatattaaaaatttggattatttaaaagtatattcagtaaagcctgaaaatcccacagtttctttcctgattgtctctgatttctacccttggctgccaatttctacttctcttcttagaagttattcatttggtttgtatccttgtaatattattgtgtccttatatcattgttactatattttataaaaatgatatattcacataagtccaataattatatttgtttttttttacttactttttttcacttaatctttctcagatatctggtatatcagttcatacagatatatttcactatttttacttatttcattttattttttgagacagagtctcgctctgttggctggagtgcagtggcactatcttggctcactgcagcctccgctcttgggttcaagagattctccttgtctcagccttccaagtagttgggatcacaggaatgtgccaccatgtctggctaatttttgtatttttagtagagacaggatttcaccatattggccaggctggtcttgaactcctgacctcaagtgatccacccgccttggtctccctgggattacaggctgagccgctgtgccccggactatttcactgtttttaagggctgagagtattttgtagtatgaataccattatttaaccactcaacatttagtacacttagatttctaatttttctctcttgtaaacaatgctgcaacaaacatccttgtgtacatatacatatgtacatatatgtatatatattctctgagcattcttgtgaattttttaaagctcatttatgaaaatggaagcagagccaaaggtaataaacatttaaaatgttgatagctcctgtcaaatggccctgcaaaaaagatgttattggattgcctatttcttgcttttttgtttgtttgttttgtttttaagagacagtctcactctgttgcccaggctggagtgcagtgtcatgaactcggctcaccacaaccaccacttgccgggttcaagcagttttcctgcctcagcctcccaagtagctgggactacaggtgctcaccaccacgccaggctaatttttgtatttttagtagagacagggtttcactatgttggccgggctggtttcgaactcctgacctcgtgatctgcctgccttggtctcccaaagtgctgggattacaggcatgagccacagcacttggcctatttcttgttatttttagaaactctttttatatgtgtgtatttttgtatttgtatgtatttttaatagaaaccatttattctatatatattataaatatagtttctagtttaactttatgacatcttatgtagacattttataatttatgcattgtagtatgttgaataataatgatgatagcatctttgtcttcacccttattttaatatgtcatccaaatgaccaccagaatggtgagatagtagaaagaagagctttattggcactatcagtttgtagaccagaagagagagtctgcagtgtggactgaaggtgttctaacttcgagtagggaagaggaagtttgggttttaggccccacagagtctgtcttatacaatagagtcatacatattcagtaggttttggggaaaagctatacatatttatgaggggagccaagcacatgcgcagtgggtaaacatatatgtaacatacatcccatgttcccttcgtggcaggttttagcattaaaatgaggtggaatttggctcacataacaaggtgagctataggacacaaagacagttagtgcacagcctttataggctggctgaaactagcttaaggtctgcagttgtttatcagaaaagaatgtttgtaaggctggtcctctgtccaatcagagttgtagtggcctggatcataagtcagagttaggaggtgtccaatagctgctattgctagggggtttagcaagagagtggttttacttgtagccatgagaatttaggaagttgttacacctcgacctgtaacttttgttaccttaactttagagtcccccttacctgataaagggacatctacttaagtttctcagatcacaaatgggaatgcttctaatattttgccatcaaatatgatgtttgctgtttctggtaaacatcctttattaaattaaggacatgcccttttctagtaggtgagaaaagaaaaatagctctgagccatctgaggtatgttaagggaggcgaccacctctcatattgtcttatgcccaatttctgcctccaaaaaaagaagtaaaaactaaaaggcagaaatgaaatccacaagcagacagcccagtgccacaccctgggcctggtagttaaagatcaacccctgaccttatcagttacttgcataaaaaagcactgtgaagatccctgtcctgttctgttcccttctaattaccagtgtatgcatcccccagtcaagtaccccctgcttgctcaatcgatcatgaccctctcatgtggacccccttagagttgtgatcccttaaaagggacaggaattgctcactcggggagctcggctcttgagacaggagtcttgctgatgctcccggctgaataaaccccttccttctttaacttggtgtctgaggggttttgtctgtggcttgtcctgctacaatgtgagatatgcaaagatttatcaggcccagagagacatgaatatggcactttagtcacatccctcgccctccttgcacccatgtgccagggggcaatcatttaaagaccttttgttcctgacttcccctgttcctgcttcccctgttatcttgatgttcctgtaatctgtgatacaaagtacagccaatcaataggttatgctattttaatgtaaattcttggtaaacaagttaggaaccaccccatttttttcctttaaaaaccactagtaactactgctaatcagagggtatattcatgttaacttgaatctatgttcctgggttgcaatcttcaaacttggcccaaataaactctgtattaagtttgcctcactttttttgtctttagatcaacgcatgacagagatttaaaaaattttatattttatttttaaaaataaggaatggctatgaaaatacatttgtttcttatttggattttttgagaggatcatgaagtcatagaattttcttctttttattctgttagcatagttcatttaatcaacagatttctggtgctgattaccttcatattcctggaatgaactctgcttggtcacataggttattttaggtaattactgcattaaatttaccgacattttatttagggtttttctatctatttccacaagtgagattagcctatagtttgcttttgagggccattcttgtcaaatgtaagcatctgggttagaccagcctcctaaaatgagatgggaaactttccacagcttctattatttagaaccatttataaaaagaaaataccactttttccttgaaggtccaaccaacttgttgtaacactttttgggctttgtttctgacaacttttctatttctttatttttaaactcttgtgtcaattttagaaatttgtattttttctagaaaaatcagccatttaaaaatttttaaatctttttaaaatttatgtttgtctattatttctagtattgattatgtttaatgacactcaaagttctttttctatatatttttttaaattgaagaaccaccttgtaatttttttatccaatctgctattttcccctggttcaataaattttgcttttatctgttaatttgcttcttctaatttatttaactactttttgctaggttcctatgttatatgcatactttatttattttcattatttattttctttttttcttttaaataatttatgttaaacctattgtatcacacagtatgttttaaacactgccagataactccctaatcagataaagcaaagacaaaaaagtttatcttactagaaacaagagacatcatcacttatagttttcaaacattattgcactttaactgtcataatttgacaaagaattcatgaaataatctacagactagttttaacagacaaataatacttgtaagcagacatgactgtcctaaattgttttttaggtatcaactttacaaacattacttacattagtggtaacggtggagttggagagtattgtgccttttccaagatgcacagtgagaatcaccaggagtgtggtggaacttatgaccctaccaaggccacggatctttcggcctgcagatgtcagcccatgcatcaccctttgcttgtggactggtttggtgatccactgggtggcaggattttttctgacagcattatggagtggatgaatgaggataacttcaaacattttgtatgttgaatcttcaccgaagtgagaactcaggactcttagccgggcatggtggctcacacctgtaatcccagcactttgggaggccaagttgggtggatcacttgaggccaggagttcgagaccagcctggccaacatggtgaaaccgcgtttctactaaacaaaaattacaaaattacaaaaattagctgggtgtggtggcgcacacctataatcccagctacttgggaggctgaggcatgagaattagttgaacccaggaggcagaggttgcagtgagtgagattgtgccactgcactccagcctgggtgacagagcaagactctgtttcaaaaaaaaaaaaaaaaaaaaagaaatactatatatatatatatatatatatatatatatagaaataaaatgtataaatatgtctatatgtataaataaaaatatatgtacatgtatatcatatatacatgtacatatatgtatgcacatatatgtatgtacatatatacatgatgtacatgtatatcatgtatacatgtatatatatgtacatatatatatatatgtgaattcaggactcttagaaccccacagtggcgtccagctttctcgtcttcaatggacttcaagcatactttagctggttaacaccacagtggacaggcttgccataagctgcacccttaggaactgggcattttcggccaccatggtgcacacgaatcctatatataacgtaaacttgcttggccttgtagccctgtcggtgcacttttttgggctgggtgggatgtggagccctgtggtagagcagagagctgtcagtactgctagcagggactctccgaagaaagtgcatggtatcagactgctgcttcctccacagctcctgaatgtacttgtatgcagttatcttggcttacctgatggctgttgccagacggaaaggaaagagcctttctcccccattatttattttcttatatgaatagaaggctagaaaattttctgagtgctattacggttgtgcctcatgggttttgatatgtagacctctcattattattttcaaaatagctatagctgtggccttaatttccactttccttcagcttcttgctcattaatttgctctttaactcttttcattcttctattcaacctatctactatttttattttcaccatcataacctcgttttctaagatctctaatataattttaattttgtttttatgtttaatttttgatcttggagaaatttattgtgatgaaaggaacaaaacagagattcaaattcaccctcctttcccaatggtaattaccaatctttgaaattccatctctaacatatattaaattctcaaatataacagtaataatagtaataactaataattattttatacttataaaaccctcaaacaaacctttgcagtgagttctagtattagcctcagtttgtagatgaggaaaattgaggcatggagcaactcatacaaattaacataaaaattcatgttataaccaattgttcttaaattagtattaaaaattaacattttctataatgccatgactcgatatcctgatattgaagagaaaacaagcacagacaggatgggggacttgcccaaggtcacagtggaagactgaaaatacatgtcatagctcctgaaattttaattcattcatttctgcagttagccacacggtctgagagaatcagtccttttattaaagtccatttcattcacaacagtcatagctttgtttctcaagttctgttactaatactgctgttcttttttctttgtttctttcttttttttttttttttttaagattttaagtcaaaagagcattcagagcaccagagtcagcaatttgtgctgcaatactttggccaattccccatttaacagtatgatctttgtaggagctcttattttcatattgaaatgctcattgtattttttggggggcatactttcagtgactgcattaagacacaaggtcttgttggtagctcacctagaggtaaaatacagctacttcccccaattacagccctaccattcattattagagggttaggtatgaagtttagaaaaacactgtacacttcagttctttctgttcttagagaaaaatgccttccttgtttccttttatagcctccatgcatttgaatttctaaggtaggaatgttgtatagtaagcctcttggtactgaagcagttataagccatgaacagactgccttcccaaggaagtctaggaaaatgacaaagttttataattcaaaataatttcattaagacacattttaggagacttattctaactctgctgttagcacttcatgttatttgtgtttgcagtccttataaaaacaaattaataaggattcaagttcaggaaaacttgaatttcatctgtatatgattttcacaggcagaaacattaacccctattaaggctagcaggattatctaaaccagcaaagtgggagttgtacttattgctctttttcccacatttaattgtaccaattcctttggatttgacatttcaaatatcaccttaatttcacccttctctacctatagctttgaagtactttcagcatttctctctagatatattacaatgaactgctattagatctctttatttctacaatccgaattccacacactacccagtgagctttttcaaatgcaaaattgatgatttacttcatttttaaacatctgttcacatccattgcctgtatgttaaaagccaggtttctcaatatggcataaggccctttaagatctgagacttgatatcctccaacctcctcccctccttttctcttctgatgtttttagatacctaattgtagttttctgaatgctgtatgcttgggccttttcatgtcaattgcctagaatgcttcaccgtaccccacctgtctgacatcatcctttaaaatttatttcaaacattacctctttggggatcctttaatgtaccttccctctttttgatttatcttacggctcatatcatattctgtcatagcagggactaaatgatgtttctctgtgctcccaaaggactgtatttggccgacttatcactctgtattgtccccctgtattgtgaattttggcttacctattttcctcttttgctagaccaatccttccttccttccttccttccttccttccctccctccctccctttccttccttttctttccttcctcttccctcccccctcccctcatctcctcttctttcttttgagacagggtctcactctgttgcccagaatgaagtgcagtggcacaattatggctcactgcagctttgactttctggtgattctcccacttcagcctcctgagtagctaggactacaggcatgcatgtgccatggtgcccagctaattttttgtattttttgtagagatggggttttgccttgttgcccaggctggtctggaattcctgagcttaagtgatctgccttggcctcccaaagtgctgggattacatacatgagccactgcacctggccaacttttaaatttcttaaggccaaggattcttattcatctcctttcaaagagtacttagtaaagcatcagtaaatgtttcttttttaaaaaaaagacttttttttttttttttttttggaacagagtctcactctgttgcccaggctggagtgcagtggtgccgtggcacgatctcggctcactgcagcctccacctcctgggttcaagcgattcttgtgcctcagcctcccgagtagctgggattacaggagcccgccaccatgcctggctaatttttgtatttaaaaaaaatagttttttattttgaaatatttttagacttatagaaaaatcaaataataattgaaaaaagtactgtatattcctctcccaaattccccaaacttaacattttaccacatttgctttatcattctctatctctgttttaattttttttaatttttattttttatgggtacataatatagatgtatatatttatggggtacatgagatattttgatacaggcatacaatgtataataatcccatcagggtaaatagggtatgcatcacctcaagcatttatcatttctttgtgttataaactttccaatgataatcttttagttattataaaatgtaaaataaatttttgttgactataataactgttatgctgtcaaatagtagatcttattcattctatctaacttcatttttgtacctattaaccatccccactccctcatctctgctacccttcgcaacctctggtaaccatcattctactctctttctccatgagttcaattgttttaatttttagctcctgcagatgagtgagaacgtatgaagtttgtatttctgtgcatgacttgtttcacttaacataatgtcccccagatccatccatgttgctgcaaatgacaggatctcattcttttttacggctgagtagtactccattgtgtgtatatgccacatttctttattcatttatctgttgctggacacttaggttgcctccaaatcttggctattgtaaatggtactgcaataaacatggagtgcaggtgtcttttcaatacaccgatttccttttggatatatgcctagcagtgggattcctggatcataaggtagttctatttttaattttttgaagaacctctcaactgttctcggtagtggttgtactaatttacatttccaccaacagtgtatgagggttctcttttctccacatccttaccagcatttgctattatcttttttttggataaaagccattgtagcttgggtgagatgttatcttattgcagttttaatttgcatttctctgactatcagtgatgttaatcactttttcatatacctgtttgccatttttatgtcttttgaaaaatgtttattcagatcttttgcccatttttgaattgaattattacattttttcctattacattgtttaagctcattacattttctggtttttaatcccagtcagatagtttgcaaatattttttctcattctgtaggttgtctcttcactgcattgatttttttcctttgctgtgcagaagctttttaacttgatgtgatctgatttgtccatttttgctttggtagcctttacttttaggacattagacaaaaaaaatctttgctcaaaccaatgtcctggatgtttccccaatgttttttgtttatcttttcaaaatactaacttttccttttgtttatcttctgtattttttgctttaatttcatttatttctgctctcatctttattatttcttttcttatactaatttcgggtttggctttctcttgtctttccatgtttagatgcatcattaggtcatttatttggtgtttttctacttttttgacatgggcatttatttctataaacttttctcttagcattccatcactgtaacccaaaggttttgctgtgttgtgtttccatttttatttgtctcaagaaatttttaaattttcttcttaacttattcattgacctactggtcattcaggaacatattgtttaattgtgtttgtatagtttctaaagttcctcttattgatttctagttttattccattgttttcagaaaagatacatgatatgatttcatttttttgaatttttaaagactagttttggctgggcgtggtggctcacgcctgtaatcccagcactttgggaggccaaggcgggcggatcacttgaggtcgggagtttgagaccagcctgaccaacgtggagaaaccctgactttactaaaaatacaaaattagccaggcgtggtggcacatgcctgtaatcccagctacttgggaggctgaggcaggagaatggcttgaacccgggaggcagaggttgtggtgagccaagatcacaccattgcactccagcctgggcaacaagaatgaaactttgtctcagaaaaaaaaaaaaaaaaaaggactagttttgtggcctaacatatggtctgtttttgagaatgaaccatgtgctgaggagaggaatgtgtattctgccaccgttggatgaaatgttctgtaaataactattattaggtccatttgttatagtgcagattacgtctcatgtttctttgttgattttctgtctggatgatctgtccaatgctgaaagtggagtgttgaagtctccagctattattgttttggggcctatctctctttttagctctgataatatttgttttatatatttggatgctccagtataaggtgcatatatatttacaattgttacattctcttgctgaattgaccccttttatcattatataatgaccttctttttctcttcttatagttttttttttggaaatctattttgtgtgatataagtatagctacacctgctcttttttggtttccattggcatggaatatcttttttcatctgttttctttttcagtctatgtgtgtctttagaggtgaagtttgttgcttgtaggcaacagatcattggattttgttttgtttttaatccattcagccattctatgtcctttgactggagagctgagtccatttacgttcaatgttattgttgataagtaaggacttttctgccattttattatggtgttcttgttgttttgtagtcttctcttccttccttcctgtcttgctgtttgtgaaggtgattttctctggtttctaatttctagctttttattttttgtgtatctgttttgtgttttttatttgaggttaccatgaggcttgcaaataacatcttatcacccattgttttaaactgatattaacaccaattacaaaaagaaacaaacgagaaaagagaaaactaataacacttcaacttcatctaccttcttttttaagtttttgttgtttttattcatatcttattgtctatgtcttgagaagttattgtagttattattttagatgggttcatgttttagtctttctactcaagatataagtagtatacatgccacaattatagtgttacaatgttctgtgtttgtgtccttcttattaccagtgaattttctatcttcagatgatttcttttttaaaaaaattaacttctactgttgatatgtgggtacatgtgcacctttgttatatgggaatattgtgtgatgctggggtttggggcctgtatcctgtcattcaggtaataagcatagtacctgatagtttttcaacccataccccactcctcctttcctctctctagtagtctggagtgtcttttgtttccatgtttatgttcatgtgtgctcaatgtttagctcttactcataagtaagaacatgtgatattttgttttctgtttatgtgtttatttgcttaggataatggctttccactgcaaccattttactgcaaagaatatggtattactcttttttatggctgtgtagtattacagggtgtttatgtgccacattttctttatccagtctaccattgataggcacctgggtttgattccatgtctttcttattgtgaatagcacagcaatgaacatatgagtacatttgtctttttggtagaatgatttattttcctttggatgtatacccagtaatgggattgttgggtcaaatggtaggtctgttttaagttctttgaagaaactccagacactggctaatttacatttccatcaacagtgtataaatgtcccctttttctctgcagcctcatcagcatctgttagtttttgacacattttggtaacagccattctgactagtgtaaggtgggtatctcattgtggttttggttttgatttgcatttcttcagatgatttcttattgcttattaacaaccttttctctcagtttgaagtttcttcagcgtttcttgtaggatatgtctgctgtcagtgatagcagtttttgtctgtctcagaaaatctttgtttctttttcatgtttgaaggatatttttgctggatatactattctagggtaaacatttttttctttcagcactttaagtatgtcttgccattctctcctagcctgtaaggtttccactgagaagtgtgctgacagttgtaatggagctcctttatatgttactggtttctcttctcttcctgcttttaggatcctttctttatccttgacctttgggagtttgattattaaatgtcttgaggtagtcttatttgtgttaaatctgcttggtgttccataaccttcttgtacttgaatattgatatatttctctaggtttataaagttctcttttattatccctttgaataaacgtcctatcccagtctctctcactctctatgctttttcaggccaataaatcttagacttgccctttacaggctattttctgtaacttgtcggcatgctatattcttttttattcttttttcttttgtgtcctctcactgtgtattttcaaataccctgtcttcaagctcactaattctttcttctacttgatcaattctgctattgagtgactctgatgcattcttcagtatttcaattgagtgtttcactctagaatttctgtttgattcttttaaattattttaatgtatttgttaaatttatctgataagattctgaattttttctctgtattgtcctgaatttttttcttttttttttttttttgagatggagtctcactctgtcgtcaggctggagtgcagtggtgcaatctcagctcactgcaacctccgcctcccgggttcaaatgattctcctgcctcaacctccgagtagctgggactacaggtgtgcactaccacacccagctaatttttgtatttttagtagagacagggtttcaccatgttggccaggatggtctcaatctcttgacctcatgatccgcccaccttggcctcccaaagtgctgggattacaggtgtgagccactgcgcctggtctgttatcctgaattttgttgagcttcctcaaaacagttattttgaattctctgtataaaaggtcacttgtccctgccactctgggaatggccactggtgcctcatttagttgatttggtgatgtcatattttccttgatggtcttgatgcttgtggatgttcactgatgtctggacattgaagactcaagtattatggtagtctttgcagtctggatttatttgtatccttttggggcaggctttctaggtatttgaagggaattgagtattacgatctaagtctttggtcactgcagctatatctttattagggggtaccccacacccagtaacactgtgtctcttgccttcttgtagaggtactgccttggtggtgttgggtaagatctgggagaattccctggattaccaggcagagtctttaaatctttaccatcattttcccccaaagagaatttctttctccatactgattttcctggagttaggggatgggagacacaagtagacttgtggccactgtcagtgggactgcactgggtcagacccaaagttcacacagcactgggtcttgcctgaggcctgcagaaaccatgtcatggttaccactgatgctccctcaaggcccaagcaggtggcaaacccagccagacttgtggctttctctttagggtgatgagctccccctaagcccaggattggtccagaaatgctgtctaggagtcagggcatagagtaaggaaccttaggaatctacttggtgctctattccactgtggctgagctggcacccaagctgcaagagaaagtctttcccactcttccctcctcttttcttaagcagaagtatttccctgtagccacctcccccagcctgtagtgagtaatgcctggttattgctgatgtttactgcctggctcccactgtttacccaagggctcttctgtcagcttgtagtacatgctcctgggcctgggatgctcccttcagggtagtgagctcctctctggtccagcatgagtccaaaaatgccatccaggagccaagtcctagaattgtggaccccaggagtccttgggtggtctgcatcacagtaaccaggctggtacccatgcttcaggacaaagttcccgttaatcttccttctttcctcaagcagaacgagtctctttccatggccaacacactgggaatgcacagggtcacccaaggcctatgacaagtactgcctggcaaccactgatggttattcaaggtctgacagctctttagtcagcaggtgatgaattctcccaggactagttctttctcttcaaggcagtagattcccctctggtccaggatgtgtagaaatgttgtcagggtttacagccttataaaggcttagagtgcctttcagatttgtttaggaacctgttgtgctttagcccatggtggttgggctagccagaacttactttcaggctgctgggatgggcaatttccctctagctagggctggtctaaatgctgcttccatgggcactggctgatttctgcactgtgttactttctactgttacaagacagcactgaattccaaagcaaagccccataatcactgtactcctccatgtgcacagcttctctctccatgctacatggccaccaccattgctgggggttaagagagtggtggtgtcaatgattcaagactatctttccaaccgtcttcagtatctctttccttgacatgattttaaaaccagatgttgtgattactcacctgattttgggttcttaagaaggtgctttcttctgtggatagatagttgttcaacttggtatttctgcaggaggatgatccctagagggttctatttggttatcttgctcctatccccttataatttttttcctgaacagtttgagattaagttgaggacctgattcctggtagaagacaaaatctcaactaatttaattaaatgctgtaatcagcttttattattattttcaattcctgaattgggcagcatgtaaaaatagagaggtgctaggctaggcatggcagaacagttggttttcacaaaatagcttgaagaagcacaaggaaacagcataataaaaagcagattattatgttaacatcaggttacttaaggttctttttcttgtaagggttaaaacagaggggacttccttaccatgcaggctaaaactggcctgtttaggaatttggctaccatgtatcccctgcttttttatagatcagataaataatttagttttggtttggtgatgtggaactttagcatgaatgactccattttggtttggcttactggggcctagtggaggaactcagcccaaaacaatggtcttccataaattttatttaacatgctcttttaaccttaaatacttgaatgcgtatttcctaaacacaaggacattcttttatataatcgtagcataatgattaaaattaggaaattaacattgatagaacagtattctctaattacagacctgaagtgttaccagttatcctactaatgttctttatagcaaaatacagcatacgttggtggatacatcccaagacccctcagtagatgcctgaaaccacagatagtaccgaatcctatatatgctatttgcttttttcctatatataaatacctatgataaagtttaatttataaattaggcatagcaagagattaacaataataactagaaataaaatagaacaattttaacagtatgccaacatcactactcataggctttggggtcattattacataacattatggttacttgaacacaagcactgcaatatagagacaatacagagtcaagctgataatgagatgactaccaagtgactagtgggtgggtagcatatatagtgtggatatgctggacaaagggaagactcatgacctgggcagggcaaaatgggacagtgtgagattttattatgctactcagaatagtgtgcaatttaaaacttaggagttgtttatttctgtatttttccatttaatattttcagaccatggttgacagcagataaccgaagccacagaaaacaaaaccacaaataagggtggactgctatattttttcgtgtttcaagatccaatctaggatgtatactatacttacttattgcctctttaatcttttttattgtggaatacttcctcagcctttctatgtgttttatgagcagctattttatagaatattcctcagtttgagttttagggaaaattgtgaaaaacttcgaaatggaccaaaagattatcaggtatcttcaaaggaaaactagaagttttctagtataccctttcaaattatccgatttctatgtgagttctgaggctttcattgtattcatggattcatggtattttacaactctataggtcatataaaactgatagcaatgcaaatgattttttttttccatagaaatcgcaaattgcgtctggtggaatgcaactgattgccccctggctgttaatgttttcaattttttttgtatatatttctaaatgcatattggccattccttattttactgtatatgggtgagactttggattcttttttctgattggttataacatcttaccagttctgtcattaattactgagataaataaaatctttaacatatgttcattttatatgtcatgatgatatttgtcaaaagacaaaagcacaacaaatttagttttgttaaagcaaattaaatatggcctgaggaggcctctctacttctatatttgagtccttgtggatgaactgcaacctaacttaaaaggtagacaagactgaaaacctaacttaagaggatgctcctgtaacagtagttgattcttggccaatcccagcagccgtacttcaaccagtcatacactcctgagtgttcaaactgtgttcgaataaggcaaatgtggaactgtaaggaattcagttgtttctgtatgtcacttctgatttctgtgttacttccctttttttgtctataaatttgttctgaccatgaggcatccctggagtctctctgaatctactgtgattctgggggctgtccaattcatgaattgttcattgctcagttaaacccctttaaatttaacttgactgaagtttttcttttaacagtttaaagaccttacttggtgttatttgcagttctagaattgggcagcacttcattctataaaatagaataagtgttccaatgggctaaacggaggttggttttatagacaaagggctgaaaaaagcagaaaaaagaacaaaaagtggatcggtcattttaatgttaatttcctattaagggaggaatagggaaaaaaataatacaaaaataactggttggtcaacatcaggctacttaggttactttttgttgttaaaggcagagggaactttattgttacgctgactgagactggtctgtttgggaaatttggctattgtctctctctctctctcctgatttcttggaaagtcagataacaacttagttttggtttgctgatgtggaactttagtaccagtactacattttggtttggtctgttgggtctagtgcaacagcttagtctaaaacaatggcctcctataattttcatttaacatactttaaagaaatttctcccttaatgagtttgtgtaatatttcttcatggttagattcagcttatgtatttttaggaggaatacaacaaaagtgattttgtttctttagtacatcatatcaaaaggcacatgatgtatatgtcccatcaccaattctgttaacctaaatcacttaaggaggtgtctgctggtttttccactgtacagttactgttttctcttctgtaacttataagtatcttttggtgaaaaactttgagaatatattggtatcctatttcttaccaaattttcatttactgattttagcatccattgttgattcttgcctgaatcacttattactacaatgatctctaagtggtgattttctgtgttttttttttccatacttttaatttattaattggcattctactgtaaggaaatgcttttccttttcttccttttatatcactatggactcgggtttttattttattctatggattctaatgtttccattatttttgtatttattttgatgctcaattgtttcagggtcagatttgggcaatgggaacctcttcaggtgggtttctgtgtcattgcgacatgtcactatcattgagcacttccttactttctggtatagaaagatgtttcagatttatattgtgttgtttctttccagttctggaatcagccatttctttaaggaactgtaatttcttttgaaataaagatctgggcattagagatgcttattgctaatatgatagtaattatcccaggccatctcagcagataaagcactttgcttttttcttttaacatagtatttctggaagtcgctagatcaacatttctagaaatgatattcttttaaacagtttcattgcacttcattttggaaacaagtcagaatttattcaaacattctcctatgtaagagtgtttagattgtttccagtattttgcgattataaactattctgcaatgaatattatatatatatgtatatatatatatatatatatatatatatatatatatatagttggaggtgtatcttcagggcaaattcttagatagtggattgctaggtaaaaattaatgactatgtatttttgttagacaatgcccagttcccctctgaaagtgttgtaccaaatttgtattcccaaaacagtatataatagaagagtgcctgtttacccagaacctcaacatcagaatgcattgttactttttaattttaaccatctgatagtatctcagtgtagttttaatttgtatttctatctaaaagttaaggctgaacatcttttcatatgtttaagggccttttaaaaattttttcttttagagacaggtcaccctatgtggcctaagctagtctctaactcctggcctcaagcaatccttctgccttggcatccccaagtactgggattacaggtgtgggccactgtgcctggcctagggtcattatgaaactatcttttgttatgaattttctgtttataccttttttttttttttttttttgatggaatctcgctctgttgcccaggctggagtgcagtggtacaatcttggctcactgtaacctccacctccggggttcaagcaattctcctgcttcagcctcccaagtagctgggactgcaggcatgtgccaccactcctggctaatttttgtatttttagtagagacagggtttcaccatgttagccaggctggtctcgaactcctgacctcaggcagtccactcgccttggcctcccaaagtgctgggattacaggcgtgagccaccatgcccgacctgtttataccttttacacatttttctatcaaggctttggtctttttcacatggtttttaagaggctttttttttttaatgtaagggatattatctctttatctacaatatatgttattttctgtgcgttgttttttaaattttgtagtgtttttgccataaatgttttaaaacatttttatatagtcaactctatcaaattaaaaaaatttgcctctattttgagtcatattagaaaacctttcccttaagcctgcattatattgaaattcacttgtgttttcttctagttttctgtagtttcttttttacatttagactcctgatccatttggagattattattgtgtatggtgtaagatatggatctaattttaccttttcccagaagtctaaccaattgtactagcattctgtttttttatttttttatttttatttttttttttgagatggagtctcattctgttgcccaggctggagtgcagtggtgcaatctcagctcacggcaacctgtgccttctgggttcaagtgactcttctggcttagcctcccaagtagctgggattacaggcacgtgccaacacgcccggctaattttttgtatttttagtagagacggggtttcactgtgttagccagatggtctcgatctcttgacctcgtgatccgcccacgtcagcctccaaatgtgctgggattacaggtgtgatgtactagcattctttattaaaaatttacctttgtgggctgggtgcagaggctcatgcctgtaatcccagcactttgggaggccgagtgggggagatcacgtggtcaggagttcgagaccagcctggccaatatggtgaaaccccatctctactaaaaatacaaaaattatccaggcgtggtggcatgcacctgtagtcgcagctactcgggaggccgaggcagaagaattgcttgaaccagggaggcggaggttggagtgagtcgagatccgccactgcactccagcctaggcaacagagcgagactacgtctcaaaaaaaaaaaatttacctttgtgtcatgatttgagatgccaccatcatcatatattaaatttctatttgaatctgtttctggacatgatattattccactgaagtctgctagtctatttatgcactgatatctcactgttttcattacggaggccatatagtatgttttaatgtttggtaaggttactcctctctcaaaacagggtttttttgtttttgttttttctttttttagtgttttgcccactattgttacatatttgtttttcttttctttttttttttttgagatggagtttcactgttattgcctgggctggagtgcaatggtgcaatcttggctcaccgcaacctctgcttcccaagtttaagtgattctcctgcctcagcctcccgagtagctaggattacaagcacgtgccaccatgcccagctaattttgtatttatactagatacagggtttctccatgtcggtcaggctggtcttgaacttcctccctcaggtgatccgcctgccttggcttcccaaaatgcttggattacaggcataagccaccgtgcctggctacatatttgtttttcgtaaggtctttttagctaacttgtctatctccataagaaaagcttattggtattttttgggagatttagttgaatttgtaaattaactttgggagaactacatctttatgatgttgtatcatcttatccaaaacagggatatcttttcatttcttatttttttattttatttgagatggagtctcgctctgtcacctgtgctggaggctagagtgcaagtggcacgatcttggctcactgcaacctccgcctcctgggttgaagtgattctcctgcctccgcctccggagtagctgggattacaggtgcgtgccaccatgctgggctaattttttgtatttttagtagagatggtgtttcactatgttggcaaggctggtctggaactcctgacctcatgatccacccgcctcggcctcccaaagtgctgggattacaggcatgagccacagtgcccagcccgtttctttaagtctatttgtctttcaagaatgtttaaaaacttttcttaaatagattttgcacgtttattaagtttgtttgtaagcatttagtgttttttggtgctaacattaattatattttctttaccattctagtctctaattggtttttgttttcgcatatgaagtctactgatttctgtatattaatcttacatcctgttaccttagtgaattcttttattattcaagttggttttatcattacttctctgtggttttccagaaatttattactgacattataaggctttctgggggagcatggcaggttgcctaagctggtccaaaactggtttgaaagagcagggaaaggagactgacttggggtttttatgatggttagagggtagagccagggagaggatttctacatgtggtttggctggtggcaaaagagaggggctttttttttttatccctttgcttaatgttaggtagaaaggggaaagagggagagttaaggtctaaaagctggcagtagtcaaacatcaaaaatggaatcagactattatagtttctgatatatttggatagaggtctgcaaagtcatttcttatttaaaaaaaagtcttctgtttagtagtattttccctttgttatttttttattttgtacatttgtgctttatcccccatattattaattcattagctaatggcttattttgttaacttttttcctaaaaccgcaggctttgaatttttaggtctgctgtttttctactccccatatcattactttctgttcttatcttttttgtgtcattctttttgtttattttctagcttatggagctgagaatttagtttcctattatcatttttcatttttactgctaaagtgtttagagctatggagttttctgactgctttaaatgtatcccatatattttttatgagtagagcttttaatgttatcattatttttagattctatctttcacttcatttcccctttcacccaagagttgtttaaaagacacttaagaaatttgcaggtaggaagacctttttgttatttttcttgttaataatttctagttctattgcattgagtgttgtttgtattatttctactttatggaatttactaatgtttcattgtaaccaaatatatgatcagtatttgtgaatgttccatgtactcttgagaagttttattgcctattatcagggtaaaatgtttgatatatgtatacatccataaaatttactttatcaagtttattgagtcttttctctgtgtttttggactcattgatctactaaggtgtcttataatctcttattattaatgtatttctacctttatttccttacattgccttatagttttgccttatacaagtaattactgtttcatttgggatatttcttaactgccatgtcttcattttgatttgtggctctcagcattaagaaatatccttctggtaggctgaggcaggaggatcacttgaagccagaagtttgagaccagcctgggcaacatagtgagactatgcctctacaaaaaattaaaaaatattttagctaggcatggcagcatgcctctgtagttctgctgaggctgagaccacaggattgcctgagcccaggagttctaggctgcagcgagccgtgatcatgccactgcccattgaactttagcctgggcaacagagcgagtccctgtctctcactctctaaagaaaggtatccttctatgcacatttaatgtgtaagcttaaattctacaattttgatcaggattactacttgttttcttattgttttcatttgcctataatacctttgcccatttcttgatatttagtctttcggaatcaccttgttttagttatgtgtctagtattcagcataatacattcagtcctattttaggagcaaaattgcacatctttatgttttaatagttgaggctcattcacatttattaatgtgactaatatgtttgatttcagttctgtcatattattttatacaggttgagtatcccttatccaaaatgtttgagactagaagtttttcagatttcagatttattggattttggaatatttaaagatacataatgagatatcttggggatagcacccaaatctaaacatgaaatttatttgtttcatatacgctttattcacatagcatgaaggtagttttatacaatattttaaataattttatttatgaaagtttgtgttaaatacttaaatgtggaattttccacttataacgtcatgtctgtgcttaaaaagcttcaaattttggaatgatttggattttgaaattttgaattaggaatgctcaacctgtaattatatactatggtacattttatgtttttctttatctaccagatatttttcttttctcctttagttttgaaatttctgtggtatttaagaagatttatatttttgttttattggttacctttgtacttatattttaaaacacccttagaaaataggggaatattttcttatttaacttctactatctgctttgtcagtttttttttcccagtggtggctgttgaaaagcactaatattttatgtcattctatctcaaatccagacaaataacctcagttgtttcaacaaacttctctataaaatagaagaagctgggcagagagcagcaagatttatcaacagcatcattaaaattacccagtgcactaacattactaactatcctgacacaagctaaacacttaattacctaccatctctcattgcttgtgatgtattcttttttgttgttgttgttgagatggagttttgctcttgttgcccaggctggagtgcaatggcgcggcctctgctcactgcaacctccacctgggcctgtaatcccagcttgtgatgtattcttattcacctgcacagactggaaatgatattgaacccaggaactaagatacaatcataactaccatttattaaacacatacttcatgccagtgctgggctggacactgttccaaatgaccttattaatcttcccaacaaatctatgggatacatgtttctatcctatttaaaggagaatgagattaatgaatttcatcatgtgtagagaacagttttaagcccaggtctacctgactgcacaggccctgttctttgtttttgtttgtttgtttaataatatccttgtatatgcctgtactataacttaaaaaaaatcattgctttgtcagtttttttggtatcttttaacttttacctcttgcctatttagtaatcaatgagcttattctactttcctctttttctttcctacacttcacctttttttaataggtggactttttctttctagtagtagttttagattaatcttagttttggtggctcccttcttttctctttattttactcaattttcccttcctccccctcttcccctcccctctccctccctccctccctccctcccttccttccttcctctttcattctttcctttttttccaaagacaaggtctcatgttgcccaggctagagtgcagtggctactcgcaggcaggatcttgccgttgatcagtgcggcagttttgacctgctccatttccctcctaggttggtttacttctccttaggcaacgtgataatcccttggcccccacaggtcaccttattgaagcccaacttagtgcagacacctggacagcgtagcgcaccacagcccagaacttctaggctcaagcgatccttctgccttagcctccagagtagctggaactacaggcacacccagggcgtccggcttttttgcttaatttttgtttcactatgttttgtagttcactaatgttttgtagttcactatggtcttcttttctcccttcttcttttttccccctattatagataacttaaagtttggcatttcgtcttctagttatactgaagacaaagtttttgtatacttttatttgttcttgttttgttttttgaggatgtatagagaaagatttaggcagccgcatctaccaggtagtccagtagatgtattttgagtgatatgctagcgatatcagttattgtctccctgctgcaatcttttgttctcatccacagcctctgctgaaggagtaaacacaagtgaccatatttgtaactaaaacaagtgaccttatttttactaaatgacctcaccctttggccacagatgaatttatctttcctgtatggatacaggacctaaactctgccaagctgattatatcttttgagaatttgaacgaaaggacacagaaacgtaatcagttagtataggatgctggagctgttaagtcttgtagagtcaaggccacagtgtcatgaaaactgaaggtatggaggagcagaaactaagaggttcacagaagtaggtggaatgcagagtactcagcagagagaagtttataatggtgtctttggagcaacaagagaatgaggcaggaagagagccaaagaaactggtataaacagtttctgatgactattcaattcccaagagacgagcttgaataacttccaacaatattcaacatatttttctattattttattacattttcttgaggttttttgggtgtgggtctctgtttcttaattaattaatttcctgaatatattaggctttaataaatgtttatcatcctggtgttattacccagatacaatatgatgtgggactacaaataatgagggctattcacagaattgacttgagataatttgagagtatcaagttattaaatatattacaagaattttggatctggaagggacctatgaggaatatctagttcaaattctcaaattttagggaagagaggccaagagaaaatgatttgccgaactttgacattgaattagaggtctcattagaattagaactgtggtttcctgatacccagtctagttttcatttgactacatgttctgagttagacagtataaccccccaaattcatatctacttgaaactgcagaatatgaccttatttggactagcatctttgcaaatgtaatgaattaagatgaggtcgtactcaattagagtggatggactttaatccaatatgactggtgtccttacaagaaggaaaaacagacagaatgccatgtgatgacacggcagagattagagtaataaagctgtaagccaaagaacaccaaggattgacggctgctaccagaaggtagaaagaggcagggaagaaatgattctcctctacagctttcagaggtactactgacctctggttttagacttctggctgcagaattgtgattataaatctctgttgtgttaagccatccagtttatagttcttcgttatgacagccttaggaaaccaaatatactaccgcatggtacacttttaatgtaaagagattcttccctgaatgtcaccaaaaaagtatacagaaactacattcttcaaaagggaagaaaatagctttttctgttgggtatatcaatcttaacttttaaattcttcagtgtgcttagctatacttttgtgccatttagagattacagtattgttcatcttgggattttcaaggaagtatgtcactaggaaattttgcttttattcttttaaggaataattaatggtggcaggcatatggagtgtgtgtgtgtgtgtgtgtgtgtgtgtgtgtgtatgtatgtgtgtgtatgttatgttacggattttctgttatatgatattctgaaatattgtacttttattttcaggttactgaagctaaaggagatgtttaactccaagtttggatctattcccaagttttatgttcgagcaccaggaagagtcaacataataggtatttcaaaagttccttctcttaatttttttcttcatcctttgataagatctaaatttttaaaaatatatttctttcttaatttttcccaaaatagaatatttcacatgtatctactaatagtaagatgtgcctttgcataaggaacacactttacttttatctttcccaatccatgttattagtattgttcatttgttttttaaatgtattaatttgttgaaaccaagttgttaatattgttttcataaaaaatgaaaatatttttctaggccacaggttaaaattttagactgtggtaagtagttttgatggttttatatttactcactgggttagaggagcacagggaaaccttaaaattccttgctactaaaagtgtggtccagaatttgcagcccttctagatgaatttatctttccttttgtttatcctgtgaagtactttgaattttactaccttttagtggtaaataacacaacctttcaacattttgtttactatcattttatcaatgtccctatatataataattgacatagttgtacttagactacataccatttgtatctttttttcatttaatatatcataaatatttccatgtatctatttccattttctgctggtataacagaattccacagatggggtaatttatcaacaatagaagtttatttggcttgtgattctggaggcagagaagttcaatatcatggtactcacatctggtgatggccttcttattgtgttattctcttttttttctgagatggagttttgctcttattgcccaggctggtgtgcaatggtgcagtctcggctcactgcaacctctgcctcccgggttcaagtgattctcctgcctcagcctcccgagtagctgggattacaggcatgtgccaccatgcctggctaattttttgtatttttagtagagacagggtttctccatgttggtcaggctggtctcgaactcccaatctcaggtgatccacctgccttggcctcccaaagtgctgagattacaggcgtgagcctccacacctggcctcttgtgtctgttaactgacctctccctacctgcccttcctgccctcactacatgttatccttcccagcctctagtaaccattaatttatcctctatttttatgagatcaactcttttagcctccatatatgagtgagaacatgaggtatgtatctttctgtgcctgacttatttcacttaacataatgtcctctaagctcatccatgttgctgtgaataacaggatttcactcttttaggtggctgaatagtattccattgcacacatacaccacattttaaaaatccattcatctgtgaatggacatttatgttgattctgtatcttgactattgtgaatagttttgcaataaacaagagagccacatatctctttgacatactgatgtccttttctttggatatatacctagtaatgggattgctggatcatatggtggttctatttttagttttttgaggagccttcatactgttttccatatggctatactaatttactttcccaccaacagtgtagaagaattcttatttctctgcattctctctaacacttattattttttgtctttttgataatagtcatcctaactgaagtgagataatatctcctggtggttttgatttgcattttcctgattattagtgatgttgagcatttgtctatgattgtaagtcatttgtatgtcttctttttagaaatgtctatttagatcatttgccaatttttattttattttattttattaatttatttattttgagacagagtctctctctgttgcccaggctggagtgcagtggcacgatctgggctcactgcaacctccacctcctgggttcgagcaattctcctgcctcggcctcccgagtagctgggactacaggcacgtgccaccatgcccaggtaatttttgtattgttagtagagatggggtttcaccatgttggccaggatggtcttgaactcctgacctcagatgatctgcccaccttggcctcccaaagtgctgggattacaggtgtgagccaccacaccgagaccatttgccaattttttaattggaatatttgttttactactgttgagttaagttttttatatattctggagattaattccttgttcggtgaatagtttacaaatattttatccctttcaacaggttgtctcttcactctattggaaggtttcctttgctgtgcagaagctttttagtttgatataatttcatttgtctatttttgtttctttgcctgtgcttttatagtcttattcataaaatctttgcctagaccaatgtcttgaagtgtttcctttatgttttcttctagtagtttcatagtttcagttctgatgtttaagtctttaatccattttaaattcatttttataaatggtgagatattggggcctatttttattcttttgcatatggatatctagtttttccatcaccatttattaaacagattgtccttttccctatgaatgaaagtaactttgttgaaaatcatttggccttggccaggcatggtggctcacacttgcaatcccagcactttaggaagccgaggagggtggatcacttgaggtcaggagtttgaaagcagcctggccaacatcatgaaacctcgtctctgctaaaaatacaaaaattagctgggtgtggtggcacacacctgtaatcccagctacgcagggggctgaggcacgagaatctcttgaatctgggaggcggaggctgcagtgagccgagatcaaaccactactgcactccagcaggattctgtctcaaaaaaaaaaaaaaaaagaaaatcagttggctgtaaatacatggatttagctctgggttctctattctgttctattggtctgtatgtctgtttttacgccaaaaccatagtattactgtagctttgtagtatatttgaagtcagatagtgtgatgcctccagcttttcttttcttcttcttcttcttcttttatttttttttttggctcaggattgctttggttttttggggtcttttgtgattccatacaaattttagaattaatttctgtgaagaatgtcattggtatcatacgaggaattgcattgaatctgtagtagtatggtcattttaacaatattaattcttccagtccaagaatgtgggatgtcttcccacttttttgtatcctcttcaatttctttcatcagtgttttattgttttcattgtacaggtcttttatcaccttggttaaatttattcctagatattcattttttttagctatttcaaatgggattgcttgcttgatttctttttcaggtagtctgttattggtgtatagaaacactagtgattttaaaaattttttcaaagtacttttatttattattttaaaatcttatttttccataagttattggggtacaggtggtatttggttacatgaatacattttttagtggtgatttgtgagattttggtgtacccatcacccaagcagcatacactgcactgtatttgtagtcttctatcccgcgctcccctcccactcttcctcacaagtccccgatgtccattacctaattcttatgcttttgcatcctcatagcttagcccccacatatcagtgagaacatacaatgtttggttttccatttctgagttatttaacttagaataatagtctccagtctcatccaggtcactgcaaatactgttaattcattcctttttatggctgcatagtattccattgtatatataccacagtttctttatctacttgttgattgatgggcatttgggttggttccgcgattgggttggttccataataccaatgacatatagtggcaattgtgaattgtgccactataaacatgcgcgtgcacatatctttttcaaataatgacttcttttcctctgagtagatacccattagtgggattgctggatcaaatggtagttctacttttagttctttaaggaatctccacactgttttccatagcagctgtactactttacattcccaacagcagtgtagaagtgttccctgttcaccacatccacaccaacatctactcttttttgatttttagattatggccattcttgcaggagtgaggtggtatcacattgtggttttgatttgcatttccctgatcattagtgatgttgagcatttttccatatgtttgttggccatttctatatcttcctttgagaattgtctattcgtgtccttagcccactctttgaatgggatggtttgtttttttcttactgatttgtttgagttcattgtagattctggacattagtcctttgtcagatgtatagactgtgaagattttctccaactctgtaggttgtctttttactctgctgactgttccttttgccatgcaaaagctctttagtttaattaggtcccagctgtttatctttgcttttattgcatttgcttttgggttcttggtcatgaaatccttgcctaagccaatgtctagaagggtttatccaatgttatctgctagaatttttttagtttcatatcttaggtttaagtccttaatccattttgagttgatttttgtgtaaggtgagagatggggatccagtttcattctcccacatgtggctagccagttatccccgcacaatttgttgaaaagggtgtcctttccctactttttgattttgtttgctttgttgaagatcagttggctataagtatttgggtttatttgtgcgttctctattttgttccattggtctacgtgcctatttttatactagtaccacgctgttttggttgactatggcctaatggtatagtttgaaatcaggtagtgtggtgcctccagatttgtttctttttgcttagtcttgtttttgctatgcaggctcttttttggttccatatgaatttttatttatttatttattattattatactttttttagggtacatgtgcacaatgtgcaggttagttacatatgtatggttccatatgaattttataattgttttttctaagtctgtgaagaatgatggtggtattttgatggggactgcattgaatttgtagattgcttttggcagtatggtcattttcacaatattgattctacccatccatgagcatgggatgtgtttccatttgtttgtgttgtctatgatttctttcagcagtgtttcgtagttttccttgtagaggtcttttgactcctttgttaggtatattcctgagtattttattttattttttatttatttattttttgcagctattgtaaaaggggttgagttcttcatttgattctctggtcgctgttggtatatagaagagctatatttgtgtacattaatcttgtatctggaaactttgctgaattcttttatcagttccaggagctttctgaaggagtccatagggttttcaaggtaaacgatcgtatcatcagcaaacagtgacaatttgagttcctctttaccaatttgaatgccctatatttctttctcttgtctgattgctctggctaggacctccagtaccatgttgaaaaggagtggtgagagtgggcatcttagtcttgtcccagttctcagagggaatgctttcaactttacctcattcaatattatgttggctgtgggtctgtcatagatggcttttattacattgaggtatgtcccttttatgtcaattttgctgagagtcttaatcataaagcttgctggattttgtcgaatgctttttctgcatctattgagatgatcatgtgatttttgttttctattctgtttatgtggtgtatcacatttatagacttgcctatgttaaaccatccctgcatccctggtgtgaaacccacttgatcatggtagattaactttttgatatattgttggatttggttagctgggattttgttaaggattttagcatctatgttcatcaaggatattgaactgtagttttctttcttggttatgtcctttcctggttttgatattagggtgatgctggcttcataaaatgaattcgtaaaatgaattcggaaaggttccttctttctctatcttgtggaatactgtgaaaaggattggtttcaattcttctttgaatgtctgatagagttctgctgtgaatctgtctggtcctgtactttttttttgttggtaatttttaaattaccatttaaatctcactgcttgtgattggtctgttcagggtatctaattcttcctgatttaagctaggagggttgtatttttccaggaatttatccatctattctaggttttctagtttactcatgtaaaggtgttcatagtcgccttgaatgatcttttgtatttcagtggtatcaattgtaatatctcctcttttgtttcttagtgaggttatttggattttctctcttcttttcttgggttaatcttgctaatggtctatcaattttcttttctttttttgagacggagtctcgcttttgtcacccaggctggagtgcagtggtgtgatctcagctcactgcaatgtccaccacccaggttcaagcttctcctgcctcagcctgagtagctaggattacaggcacccaccaccatgcccagctaatttttgtacttttagtagagacgagatttcaccatgttggtcaggctggtcttgaactcctgacctcaggtggtccacccgcctcagcctcccaaagtgctgggattacaggcgtgagtcactgcgccggcccaattttatcttttcaaagacccatctttttgtttcatttaccttttgtattttgtttgtttgtttgtttcaatttcacttagttctgctctgatattggttatttcctttcttctgctgtgtttgggtttagtttgttcttgtttctttagtttgttgaggtgtgaccttagattgtctgtttgtgctctttcagactttttgatgtaggtgtttagggctatgaactttcctcttagcactgccttagctgtatcccagaggttttgataggttgtgtcattattgtcattcagttcaaagaagtttttaatttccatctggatctcatttttgactcaatgctcatttaggagcaggttatttaatttccatgtatttgcatggttttgaaggttccttttatagttgatttccagttttatttcattgtagtttgagagagtgcttgatataatttcaattttcttaaatttattaaggcttgttttgtggcccatcacgtggtctatcttggagaaagttccatgccctgttgaaaaggatgtgttttctgtggttgttggatgaaatgctctgtatatatgtgttaagtccatttgttccaaggtataggttcaatccattgtttctttgttgactttctgtcttgatgacctgtctagtgctgtcagtggagtattgaagtcccccactattattgtgttgctgtctatctcatttcttaggtctattagtaattgttttataaatttgggagctctagtgttaggtgcatatatctttaggattgtgatattttcctgttggacaaagcctttttaccattgtataatatccctctttgtctcttttaactgctcttgctttgaaatttgttttgtctaatataagaatggctacctctgctcgctttggtgtccatttgcatgaaatgcctttttctacccctttactttaagtttatgtgagtccttatgtattaggtgagtctcctgaaggcagcagatagttggttggttagtccttatcctttttgcggttctctatcttttaagtggagcatttgggccatttacattgaatgaaacactagctatttttaatactgattttgtatcttgcgactttactgaatttatcagctctaaaagctttttatggtttttaggtttttctacgtataagatcatgttgtgtacaagtagagaccatctgacttcctcctttccaatttggatgccctttacatttttctcttgcctgattgctctggctcagacttccagtactattttgaataagagtggtgaaattgggtatgcttgtcttgttctagtgcttagacaaaaagctttccatttttcctcatttggtatgacattagctatgggtttgtcatatatggcctttattgtgtattgagacatgttccttctgtacctagtatgttaagagtttttatcatgaaagaatgttgaattttatcaaatgctttttctgaattgattgtaaagattatatgggttttgtccttcattctgttgatgtgatatatcgtatttttggatttgtgtatgttgaaccccttccttgcatttctaggattaatcccacttgatcatggtatataatctttttatgggctcttgggttcattttgccaacattttattgaggatttttgattatatgttcaactgagatattgtcctgtagttttctttttctgttgtgtccttgttcagttttggtatcagaataatgctggcctcatagaatagtttcaaagaattccccgcctttcaatttttttgcaagtctgaaaagaattggtgttagttcttctttaaaggtttggtagaattcatgggtgaagccctctggtcctgagcatttcttcgttgggagactttttactgttgcttcaatcttgttacttgttattggtgcgttcaggttttctatttctacctggttcaatcttcttaggttttatgtgtccaggaacttatgcatgtcctttaggttttgcaatttgttggcataatagttgttcacaataggctttaatgatcctttgtattttgtggtgtcacttgtaatgtctccttttctgttttttttaattttatttatttgtgtgttctctttttctcagtctagctaaagatttgctattatgtttaccttttcatttcattaatttttgtctcaaatttacttctgctctgatctttattatttctttccttctactaattttggatttggattgtttttgctagagatgtaccattaggttgtttatatgcaaaatttctacctttttttttagtggctgatttattttattttattttattttattattattatttttttgagatggagttctgctcttgttgcccaagctggagtgcaatggtgcgatctcagctcactgcaatgtctgcctcccagattcaagtgattttcctgccttagcctcccaagtagctgggattacaggcacccaccaccatgcttggctaattttttgtatttttagtagagacagggtttcaccacgaaggccaggctggtcgcgaactcctgacctcaggtgatccacccgcctcggcctcccagagtgttaggattacaggcgtgagtcgccgtgcctggtctattttattttatttttaactttcgagatgtagtctcgccctgttgcccaggctggagtgtagtggcacgatcttggctcactgcaacctgcacttcctggactcaagtgattcttgtgcttcagcgtcctgagtagctgggattacaggcatgtgccaccatgcctggctaatttttgtatttttactagagacggggtttcccaatgttggctgtcacacacacacacactcacacacacacacacacacacacacacacacacggccttttcatttctaccacatggctgggcttcaatttttcaaacttgttcactctgcttcccttttaaatataaattccagtttcaggtcatttctttgcttatgcataagagcataggttgttagaagcagccagactacatcttgaatgctttgctgcttagaaatttttttcaccagatatcatcactctcaagttcaaagttccacaggtccccagagcaggggcacaatgcctccagactctttgctaaagcataacaaaagtgacctttactctagttctcaaaaagttttgtattttcatctgagacctctttagctgggacttcattgttcatattattatcagcattttggacacaaccattcaacaagtttcttggaagttccaaactttccctcatcgtcctatcttttttctgagccctccaaactgttccaacctctgccacttacctagttccaaaggtgctttcacattttcaggtatctttatagcaatgccccacttctgataccaattttctgtattaatctgctcttgcactgctataaagaagtatctgagactggataatttatttaaaaaaagaggtttaattggctcacaattttgcaggctgtacaggaagcatggctgggaaagcctcaggaaacttacaagcatggtggaagacaaaggggaaggaggcacgccgtacatggctagagcaggaggacgagagggaggggaagtgctatactcttttaaatgatcagatctcatgagaactctatcatgagaaccacactcaggagattgtgttaagccattagaaaccacctccatgattcaatcaacacccaccaggcttcacttccagcattaggtattacatttcaccatgagatttgggtggggacacagatccaagccatatcatatgggtctaggcattgatccctttcttcttggttttctaatttgttggtatatagttgctcataatagtctctaatgatgccttgactctctgctatcagttataatatctttaaaaaaaattatctgactttatttatttgaatcttctttattttttactttttcttttttgtttgaaatggagtctcgctctgttgcccaggctggagtgcagtggcgctatctcaactcactgcaacctccacctctcagattcaagtgattgtcctgcctcagcctcccgagtagctgggattacaggtgtccacgaccatgcctggataatttttgtatttttagtagagatggggtttcaccctgttggccaggctggtcttgaacgcctggccttgtgatctgcccaccttggcctcccctcccaaagtgctgggattacaggtgtgagccagtgcacctggcctcttttttacttagtgtggctaaaggttttttgatttagtttatgtttgcaaaacaccaacttttaatttcattgatttttttttgtagttttaaatttcaattttacttatttttgctctgatccgaattcttttcctctactaattctgcatttcatttgcttttgcctttctcatttgttaagattcatctttaggttgcttatttgacatatttctacctttttgatgtaggtgtttattgttttaaatgtgcttttttgtactgctctttctgtatcatggagattttgatctgttgtcttttcactcccaattgtttcatgaaatttaaaaatttcttaattttttcattggcccactggtcattcaggagcatattttttactttccaagtgtttgcttagtttccaaagtttttcttcatgtttatttctaattttatttcattatgatcagagaagttacttgatattattttaacttttttgaactttttgagacttgttttgtggtctaacttaagatctatcctggagaatattctgggcactgatgagaagaatgtgtattctggggctgttggatggaatgtttttataaatatccatttgttctatagtgcagattaagtctgatgtttctttgttgattttctccctggataaataccctagggctgaaagtgaggttttgaaatccccagctattattctataggcatctatccttctttttagttttaataatatttgttttacatatctgagtgctccagcattgggtgcacatatatttacaattgttatatcctgttgctgaactgactcctttgacattatataatgaccttcgtctctttttatagtttttatcttgaatcctgtttatttatgcataactactcttgctctcgtttggttttcatttgtatggagtatctttttcttttttaaaaaattttactttaagttctgggatataaatgcagaatgtgtaggtttgatacctaggtatacgtgtgccatggtggtttgctgcacctgtcaacccattgtctaggttttaagccccgcatgcattagctatttgtcctaatgctcttcctccccttcccctccaccccacaattggccctggtgtgtgttccggaatatctttttctattttattttattttttttggtctgcatgtctttattgatgaggttagcttattgtttttgtttttataatccattcatccactttgtcttttattgggaatttagtccatttatattcgatgttatagttataaggtacagacttactactgccattttgttatttattttctggttgttttgttggtcctctcttccttccttcttgtcttcctttgtgtaaaagtgactttttctgacaatgttttaatttattatttaaaactttttttgggctgggcatggtgcctcacgcctgtaatcccagcacgttggcaggtggaggcgggtggatcatggggtcaggagatcgagaccatcatggctaacacggtgaaaccccatctctactaaaaaataaaaaaagatttagctgggcatggtggcgggtgcctgtagtcccagctactcaggaggctgaggcaggagaatggcatgaacccgggaggtggagcgtgcagtgagctgagatcatgccactgcactccagcctgggcgaccgagcaagagtctgtctcaaaaacaaacaaacaaaaaaacccaactttttttgtatctgttacaggtttttgttttgtggttactgtgaggcttgcaaataacataaccaattattttaagcagatgacagcttaactctgattacaatgaaaataaaaaagaaatcagcaaaaagaaaacaaaaaaaccccccaaaactttaccttaaccccatttcttcactttgtcactttttttttttttttttgagatggagtctcactctgtcacccaggctggatacagtggcgtgatctcggctcacttcaacctctgcctcccgggttcaagcgattctcctgcctcagcctcccaagtagctgggactacaggcacctgccaccacacccggctatttttttttttttttttgtatttttagtagagatggggtttcaccatgttagccaggatagtcttgatctcctgacctcgtgatcttcctgccttgtcctcccaaagtgctaggattacaggcttgagccaccatgcccggctgctttgtcacttttgattgtctctgtttatatctttttatgctcagaaagctgtttcagttactatttttgataggtttgtcttttaatcttcctactaagatatgagtgttttaacactatagttacagtgttagagtattctgtattcattcatctgttcatttaccactaccagtgagttctgtaccaccatgtgatatatatttttttacattaatgtgcttttctttcagattgaataactctctttaacattttttgcaagacaggtctggtgttgttgaaacccctcagctgtgtttgtctgggaaagtatttctctttcatgtttgaaggataattttactggaaataatattctagttcaaaagttgtttttcttcaacactttgaatatgtcatccccctctctcttggcctctaagtttcctgcggagttgtctcctactagacatattggagcccctttatatgttctttgcttcttttctttttctgcttttaggatactttctttatccttgacctttgagagtttgattaatatattaactgagttagtcttatttgggttgaatccttttggtgttgtgtgatcttcttataccttaatatttatatcttttcttaggtttggaaagttttctatcagtatttcactgaataaactttctaccctgatctctctatctctacatcctctttaaagccaataactcttagatttgccccttttaggctattttctagatcttgtagagaggcttcattcttttaaaattatttctcttttctctcctctgactgtgtatttttatatagcctgtcttcaggttcactatttatttttcttgatcgattctgctgttgagagactctgagacatttttgagtttgccagttgaatttttcagctgcagaatttctgtttgaaatttcaaaaactattttaatctctttgttaaatttctctggtagaataatgaatttcttccctgtgttatctttaagtttgttgagcttcctcaagacagttcttttgaattctctgtctgaaaggacatacatctccatctttctgggattggtcactggtgtcttctgtagttcatttaatgaggtcatgttttcctggatactcttgatgcttgtggacattcatcacttatgggcattgacaaattagatatttatttgtctgtgtagtctgggcttgtttgtacccttcattcttgagaaggcttttcatgtattcaaatgggattgagtgtgttgtgctctaagcctgtggtccgtatgggcatatcggcacaaggaggtgctctaagcccaggaatgctgcaattcttcctgacatctagaggcactgccttgacgagtttgggtaaggtaaaggagaattccctgggttgtcaggcaaagtcctcttgatatcttccctttactcctcccagtcagaagtagtctgtctccatactgggctgcctagagcacttccatggcttccacagctggcactgtgctaggtcacacctgaagcctgtataatactggatcttgcctggttactgctgatgtttattcaaggcccaagggatctttagtgagcaggtgaatcctgccaagactgggttcttctcttcagggcagtggattccctctgaatgagagtgggtccaggaactaagtcctggaattgacagcttcaggaatctccttggtgctttacttcgactgagctggtacccaaattgcaagacagtcttctgtactcttcccacttctttccttaagctaaaggaatctctccccaaactgcacttcctggagttgggtgcagtgcgatcaggcactcccctggctgccacagctggtgtcacacttggtcacacatcacaagtctactgcctccaaggccggtgcagtaccagggcttgcccgaggactgcagtacttgtggcctgacagccacttaagcttattctgggcactaggccagtttagttagccagaggtgaggttggttgggactcaggttcctcctgctgagattgagaattctgtcttgcccagggctgatctaaatgccccctccttgggtgctagcagagttctgctgttttgtgtttttctgtaacatggctgcactaagttccagtgcaaagacccacactcacttcaccctccctcccccaaacacagtttctctgtccatgctggaagggatcctgtaggcaatgcaagactgtctttcctgtcctcttcaattcctctatccctgatgttatgttaaaaccaggtactgtgattttcaggtactcacctgaattttctgggttcttatgaaggtgtttattgcatagatagttgctcaatttggtgtaagatcatggaagggttctatttggccatcttgctctgcttccctttatttttatttactgttaaaacctggctcatggtcagttttttcctgtatgtaaactttcttgaggtgcttttgttttatatattagcaatgattaaaaaagctttctcttttttctaggagagcatatagattattgtggatattctgttcttcctatggctgtagaacaagatgtgctaatagctgtagaacctgtgaaaacgtacgctctccaactggccaatacaaatcccttgtatccgtgagtatttaaaattgttagtgtgtgtgtatgtatggttctgtttgtacccaaatgaactctttaggagacatcaaatttgtaacaggtcatttaacttattgatattttgtgtctgacattaaaaaaattctaaggccattatttattgttcattttgttcatttgtcaattcatttaaggaatatttatcaaagacttatcatgtgctagacatagtcttagataccaggtgatacaaagataaataactctgtccttgtccgataggtacttatcatctattgatctaattatctccagcaaagtcaggtctgatgttttcctatgttactatggcaccttctaagtatcttgtcatagcatattattatgctgtattattattatctgtttatttacctgtgtcacccagtagactgtaaactctgtgacttcaggcattgttgcctctcttcttcaatgccctagcatataaaacagagtctggtgcctaatagaggtaagtttctagtacatatgctttatcaagttaacaaagtctttaaaaaaaatcttagtttgctaagattaaaaaagtttactaatgggtattgaatttaattaaatgtctatttagaattgaagatcagtttttttaaaaatatggtgaattagtctgacgaattttctaatgttgagccctttttgcatttctgggataaactctacttgcttctaatgtattataatggatttgacttgataattacagaaaaagattttggcttgtatttggcatattatatgtttggcttgttcattggttagtttatctgcaataacattcatgtattcggaaaatatttttgataagactctataccagtttgtgcaagacgtagaagttttttacttttatatggaacttactgtagaagatctttttttccttttcatttcgcatgtttgataatatatcttgtgtgcattttggacccttgaaaagctcacattatgtcaagcatattttcgtgtcattgtgtatgaacatttaaaaatcggtgcatagtattttgtcatcttgatttagtaaaatttacttaatcattcccacaataatgaatatgtggtttcagtttcgtttttcacaaaagtagatcctgagacagacctggatgaaggtagtatatttgagaaatggtcccaggagcagtaggaaagagcatgaagaatgagttgggcaattagaggtgaattatcaagacatatagtccctgctagaggcaggaggcttgattctaccaggacccctaggaagcatgcagtatgcctcctagaattgtccatttgttttagcattcattgtgtaagtatatcttaatttgtttgtttaccaataatggacatttagatcattcccagtttttgcctgtatgaataatactgctacaaatatttatgtacgaatatatgtgtggacatatgtttcatttctgttgggtaaatacctatgattggagtgtctggtttgccatttatttatttattgagacagggtctcaccctgttgctcagcctggagtgtagtggggcgatctcagctcaactcaacctctgcctcccaggttcaagagattctcccacttcagtctccggagtagctgggactacaggcacatgccgtcacacctggctaatttttgtattttttggtagagatgggatttcaccatgttgaccaggctggtcttaagctactgacctcaagtgatccacctgcatcagcctcccaaagtgctgggattgcaggtttgagctactgcatccgtcctggtttgcctttgatatggtttggtggtgtccccacccaaatctcatcttgaattttaactcccacaattcccacgtgtcctgggaggaacctggtaggaggtaattgaatcatgggggcaagtctttcccatgctgttcttgtgataatgaataagtctcatgagatctgatggttttaaaaatgggagtttccctgcacaagctctctttttgcctgacaccattgatataagacgtgacttgctcctccttgccttctgccatgattgtgaggctcccgcagccatgtggaactgtaagttcattaaatctcttgcttttgtaaattgctcagtctcaagtatgtctttatcagcagcatgaaaatgaactaatatagccttttaaagaaattttctggctgggcacggtggttcacgcctgtaatcccagcattttgggaggctgaggtggatggatctcttgagcctgggagttcgagaccagcctgggcagcatggcaaaagcttgtctccactaagaatacaaaaaaattagttgggtattgtggcatgcacctgtaatcccagctactcaggaggctgaggcaggagaatcacttgaacctcggaggtggaggttgcagtgagccaagattgcgccactgcgctccagccagggtgacagagcgagactctgtctcaaaaaaaaagatattttctgcttgccaaagttgtataattttacattttcaccagtggtgttactaacatgtcttaaaattttagctattctcataaatgtgtagtagcatatttcaagtttttaaatttctctgattaatgatgttgaacatcttttcatctacttatttgctacctagatatattctttgttgaagcgtcttctcaaatcatttccctatttttgagtttcttatagatacaagtcttttttttttttttttttttgagacagagtcttgttctgtcatttctgtgttgggacattacaggtcctttcttctaggtattttgaaatatacaatacatggttgataactatagtccccctactctgctatagaccattagaacttattccttctatctaaccgtatgtttttacctatttgccaacctctttttatcccccgttcactgaccattcctcacctctattatctattattctaccctgtaccttcatgagatcagttttttaagttcccacatatgagtgagaatatctgatgtttgtttttctgtacctggcttattccatccacattgctgcaaatgacatgattttattttttttatggctgagtagtattccattgtgtatatatacattttctttatttattcatctgttggtgggcacttaggttgattccctatctttgctattgtgaatggtactggaataaatatggagtgcaggtatccccttgatatactgatttcttttcctttggataaatacgcagtattagggttgctggatcatatggtagttgtgtttttagtgctctgagaaatctccctactgttttgtataatggctgcactaattacattctcaccaacagtgtataagtgtttccttttttctgtgtccttaccagcatctgttttctttagtcttattagtaatagccattctaacttgggtaagatgatgtctcattgtggttttgatttccattttgctgatgattagtgatggtaagcagttttcatatacctatctgccatttgtatgtatgtctttggaaaaatgtctcttcatgttatttgtccacttttaaatgggattattactagtttttactatcgagtgttttgagttccttgtatattttggatattagttccttgttggatgaatagtttgcaaatattttctcccattcaacaggttgtctccccactctgttgattgcttcctatgtgggcagaagctttttagtttaaaatagttttatttatctatttttgttttatttttctgtacttttgagatcttagtcataaaatctttggctatatcctaaagtgtttcccctatatttctttctagtagttttatagttgtgggtgttatgtttaagtctttaacctatcttggattgaattttgtatatggtgagaaataggggttcaattcattcttctgcatatgggtattgagttttcccagcaccatttattcaagagggtgtttgttcctgaatgtattttcttggtacctttgttgaaaatgagtttgctggccgagcgtggtggctcatgcctataatccctgcactttgggaggctgaggcaggcagatcacctgaggtcaggagtttgagaccagcctggccaacatgatgaagccctgtctctattaaaaatacaaaaaattagctgggtgtggtggtgcgtgcctataatcccagctactcaggaggctgaggcaggagaattgcttgagcccaggaggtggaggttgcagtgagccgagatcgtgacactgcactccagcctgggcaacaagagcaaaatctctgtcttgaaaaaaataaaaaaattaaaaaaaaaagaaaatgagtttgctgtacatacatggatgtatttctgggttctcccttctgtcccattattacttgtgtctgttttgataccaataccttgctgtttgggtttttatagccttataatatattttgaggtcagatagcgtgacccctcttgctttgttctttttcctcaggagtgctttggctatttgggctcttttttttggttttatacatattttaggatatttttctatttttgtgaaaatgacagtagtattttcatagggattgcattgaatttgtagactgctttgggcagtatgttcattttaacaatattaattttttccaatccatgaacatgggatgtcttttcatttgtttgtgtcctcttcaatttcattcatcagtgttttctagttttccttagagatctttcatctccttggttaaatttattcttaggtatttttttttgtagctattataaacagcatttctggcttaatttctttctcagctagttcattattgatgtattgaaatgctgcaaatttttgtatgttggttttttatactgcaactttactgaatttatttattaggtgtaagagttttttttagagtctaggtttttctggatataaaatcatgtcacctgtgaaacaggacaatttaacttcctccatttcaacttggatccttctatttttattcttgcctgattattctggctaaaatttctagtattatgttgactaggagtagtgatattggtcatcttttttgggttccaggttttacaggaaaggcttcaacttttctttatttgatatgatgttagctgtgggtttgtcatatgagacttttattgtgttgtggtatatttattctatgcctgataattgagagtttttatcgtgaaaggatgttgaattttattacatgctttctctatgtctattgagatgattatgtggtttctgtcctttattctactgatgcgatgtgtcacatttagtgatttgtgtttcttgaacaatccttgcatccctgggataaatcccgcttgatcatggtgttttatctttttgatgtgctgtgggattcagtttgcggcaattttgttgaagatttttacatatatgtaaatagggatcttggcctgcagttttggtttttgttacacctttctctaattttagcatcagagtgatgcttgccttttgggactaggttaattcccttctcttcaattcattggaattgtttgaagaggattggtatttgttctttgtaagtttggtagaatttttcagtgaagctgtccagtcttgggcttttctttgttggaagccttttcattttactgtttcaatcttggtacttgttactagtctgtttatgttttttgtttcttcctgatttaatcttggtatgttgtgtgtttaggaatttatcaatttcctttaggttttctggtttgtttgtgtatagtatagttgttcataacagtgtctgataagcttttgtatttccatggtatcagttgtaatgtccttttttgattctgattttgtttatttgggtcttctcactttttttcgtggttaatctggctagcagtttatcaattttgttcttcttttcaaataatcaactttccattttcttgattctttgtattttttcagtaaaataatttcaacttttattttagattcaggggttacatgtgcaggtttgttacttggatacattttgtaatggtgatgtttggggtacagatgatcccatcacccaggtagttagcatagcagccaataggcagtttttcagcccacacttcctgcctccctactgcccccgccattgcttactagtcctcagtgtctattgttcccatctttatgtccctgtgtactcatatttagctcccacttataagtgagaacatgcagcagtacttgattttcttcctgtgttaatttgcttaggactatagcctccagctgcatccatgttgtcgcaaaggatatgatttcatcctttttatggctgcatagtattccctggtgtatgtataccacagtttctttatccagcccaccattgatgggcacctgcgttgattccatgtgtttgctatggtaaatagtgcttcaatgaacatatgagtgcatgtgtctttttttttttagaataatttattttcctatgggtatatacccagtaatgggattgctgggttaaatggtagttctgttttaagttctgtgaggaaactccaaactgctttccacagtggctgaactaatttacactcccaccaagagtgtataagcattcctttttctacacagccttgccagcatctgtttcttgttgacatttacataatagccattctgactggagtgagatggtatctcattgtggttttgatttgcatttgtatgtcttcctttgagaagtgtttgttcatatactttgcccatttttaagtgggattatttgttttttgcttgtttatttgtttacaatgtttacagattctgatattagacctttgtcagatgcatagtttgtgaatattttctctcattttgtgagttatctgtttactctgttgatagtttctttcgctgtgcagaacctctttaattaggtctcacttgtcaatttttgtttttatcacagttgcttttggagatttagccataaaatcttggccaaattctaagcatttcctaggttttcttctaggattcatacagcttgaggtcttatatttaaatcttttatccatcttgaataaatttttatatatgctgaaagataggggtccagtttcattctactgcatacggctaaccagttataccagcaccatttattgaatagggagcccttccttcattgcttgtttttgttgactttgtggaagatcagatggatgtaggtgttcagctttatttctgggttttctattctgttctataagtctatgtctgtgtatctgtttttgtaccaatactatgctgttttggttactatagccttgtagtataatttgaagttgggtaatgtgataactccaatttttttccttttactttagttttttcactgattctcctctgagagaagtggtgttcttttaactgtggtttaaatggaggatagtcaattggcttcatttctggttgctttcagagggccaaggctctgtacaggatctttatttgtggctagattcttgcccctggtttcacaagtgatgtatattggcagattatttttggtgttttaatttgggatgtgatccagtaaatggtgcttaagagtggtggccagcagataggctcttaatcagcttcacagctttttttgtatttcagtgcatttgcagtagtggtctatagtggggtagggggagacagatgaccctctcagcaggtctgttcctgagctttgaggaagccgcctctgatcactggcactgatcctgtctttttctttaattaggtcttccgggctgcagggctccctcaggcagaggctatgacctgcagataggccacaccattcttggactggtcctgtagagcagggttccccaatccctgttactgcttcatggcctgttcagaagtgggccacacagcaggaggtgagtggtgggtgagtgagcattattaccacctgagctcggtctcccgtcagatcagcagtggcattagactgtcatggaagcatgaaccctattgtggactgcatgtgggagggatctaggttgcatgctccttatgataatccaatgcttgatgatctgaggtagaacagtttcaacctgaaaccatcccctcctccccaacatacaccatccatggaaaaattgtcttccacaaaactggtccctgtgctaaaaaggttggggactgctgctgtagagggagagatgcccttctctggtgctggcttacaagcctctgtgtttcactcctctctgtcttctgagggtgtgggctccttccctgctctagcactggctacagatcttggctcaagattcccaagctgcatgctgcagccctgagctgttgggactggcccacagctccatcttttggctccctttggcacagcaccaactgtgctgggggattccaactgcttccagacctctgagaaagtactcaggctggccttttgataaagcacccatactgggcagtggaggctgcactgtactcatgttcctgttagagcagctgggcagaggccttggaaggggctggtgggcaggagtgcctgcagaacagacatgccccattcccactggaaagtcagccctgttctcttgacccagtggtcaactggggttagagttactcagaggaagaaggggagcgttgggggatgggcacctatggctgtattctgcttgcggctgtcatgtgtgccaaacctccattccatataggctggagtacttttactgcctactctccaggcagatccccttgccagtttaaatgtttatgggcgtcataggatctcttgtacctaggattggagatctgcagcaagagtgggttgccccactatcccttcactaacccctccctcaggaggctttcagggctgagcatgagccctagcattcagcaaccccacacaaggttcccagcttcttctcttttcagcctcagtgtcagtgttgcttctctatctactcttggtgttttctgtctaagatttgctcaaagtttattagtttacttaatttttagtctcgttcagtgggagtggtgcttcctggctgtgtctagtcagccaccttatctgctatccctccaaaagctttaaccctttatgtttttttttagtagctactttatttacttctattctgatcttcattatttctttccttccactatttttgggttttgtttcttattgcttttctaattccctgagatgcataattaggttgcttatttgaactctttctttctagatgtaggcattcattgctatgatcttctctgttggcagtgtttttagtatattccatagattttggtatgttgtgtttcagttctcatttatttgaataaactttttgatttctatgttaatttcttccttgagctagtggtcattcagaataatgctgttaaatttccttgtatttatacagtatcacaagttcctctttttattactatctaattttaatccattgtatctaagaaggtatttgatacacactgtctagttttattctgttgtatctaagaagatatttgacatgatttccattttaagaaatttgttgaggcttgttatgtgtcctaacatatggtctatcctggagaatgtttcatctgctgatgagaagaatgtatattctgtagctgctggatgaaatgttttgtaaatttctgttaggtctatttggtcagtagtgcagtctaaatccagtgtttctttttaaattttctgttgtgatgatctctgtaatgttgagagtgggctgctgaagtccccaagtattattgtattgtgctgtctttctccctttagtcataataatatttgctttatatatctgggtgctttgttgttgagtgtatatgtgtttagagttgtcatatcctttgctaatttgatccctttgtcattatataatacccctctttgtctatttttacttttttttgacttaaagtctattttatctgatataagcatggctattcctgcttgcttttggtttctgtttgcatggaatatatttttttcattctcttactttcaatatatatgtgtttttttcagatgaaaagaggttttatttttgtagggggcttattatagggtcatgtttttaaatcagttatcctagtttgtatcttttaattggaaaatttaatctttttacattcaatgttattattgatatgggagggcttattcctgtcattttgttaattgacttctggttgttttatatatcttttttcttttttttatttctctcttgtttgttgtggtttggtggtgttctgtagtggtaacatttgagtcctttctctttcttattcatgagtttgctctaccagtgggctttatacttttatgtgttttcctgttggtgtatatattatccctttgcttccaggtatagtactcccttaagtattgcttgtaggttcagcccattcatgataaatgtgctcagcttttgtttttctaggaaagacttcagttctccttcatttatgaaggatgattttgttgagtatagtatccttggctgccagtctttttctatctacactttgaatatatcatcccattttctcagggcctgtatggtttctgctgagaaatccactgttgttttggtggggctcctttgtaagtgtctagatgcttttcttttgctgctttaagaattttcttgttgtctttgacttttgaccactttgctataatgtgccatggagaagaccttttaaagtcatatttgtttggggatctctgagcttcctgtatcagaatatgtaaatctgttactggactggggaagttttcagctattattttgttaagtaggttttctatccttttggttttctctgctttcttgaacaccaaaaattcaaatatttggttgctttatgatgcttcataagttacataaggttttttcattctctcttatcattttttccttatatttgtctgactgtgttatttcaaaagagctatctttaggtactgaaattctttcttctgcttgatctagtttattgttgaggctttcaaatgcatgttttatttcattcagtgaattgttctgttccaatatttttgtttattttatgatatccatttgttaaatttctttttcatattctagaatttttttccgatttctttgtatctgtgttctcttgtctttcactgatatatatatatatatatatatatatattttttttttttttttttttttttgcgatggagtctcaatctgttgcccaggctggagtgcagtggcatgatgttggttcactacagcctctgcatcctgggttcaagtgattctcatgtctcagcctcccgagtagctgaggattacaggcacccaccaccacacctggctgatttttgtatttttagtagagatggtgtttcaccatgttggatgggctggtctcaaactgctgacctcaagtgatctgcctgcttcagccttccaaagtgctgggattacaggtgtgaaccaccacacccagcttcactgagctttttaaatgtcattactttgaattctatttctggaatttaataaatttctttgtcattggaatctgttgctggtgaattgttttgcttcttccaagtttttgaatttgcttttatagacagtgactttttctcaaagatgtacctatgatattggttgggttggcatgttggcattgattcttggcacttgtagtattgtagtctctgtataattcctttggctataaacagtatcactggtctctgatttcctcagtgacttaggatatggttgttgttggagactgtggatcctggcagttgtagcagtgagctgggtgagtggctgggtccttggacccctgggtagttagtgtcacctgtgtgatggcagtagcagtagtagaacaaccctctggctccaaagcattctgcattgttgttggtggctgtattaggctgggtgagttggtcccctgtgccacaggtgttgcatgcaggtggaagctagctgtggtagtagtagtacgttgggtgggctcatctttaggtctctgggagagtattcaggtgccaatggtggtagattggtcacagccattcttagtaccctggattgtatgcttaggcataggggtggagtctggcagggcgggcctatcctcaggcctcctggtggtgtatgcaagtggtaggcagtagtagagtgaaccaagccacctagtggaatgcccaggtggtggtggcagtggctgtgatgtggcccagctgcgggggagagtggggttgcttttactggcagcagtcgtagacaattggctggggagcatgcactttggctccaggtagtggctgcaggtggggtagcgtttcctcggggcacttgaaaatccatggtggctctgctgctgtgaataccagggttctgccagtggctcatggtttggcctcagcagtgcaatggaagttgctgtgagtgagggagtctgtatttagggctcgtgaaaatacacagcagtcccactgctgggagtattgtagttattgccagtggcttacattttggctctgacaacagcagttagcactcgtggtgtctgtgggtaggggacatcagagaggttgcaaggatgtggagacaggagctgttgatccccatggcaggatgcggtctagtagagtctgggatctcaggatagtgatgtgcaagttgcttaagacttgggggtgtgtggaacccagcatgaatttcctctttggagcaatgccatcatgtgatttccaagtagttcctctgtcagtcgcatggtcctaaagggttgaggcgctctcctatggctaggattgcaggagtccttgatagtaatgtggaccacttggggtgtttctcttgccctttacccacgctgaagagcctctccaggctcccagctgattctggctgagcaggctgccctgatttcctctccttccttgccttaggtgttccttgtcacttcttgttgaattcagtgttctctcttacatgatctattctaactatgattgtcaacttgttattttggttcttctttatggaggaggcaagtaccagatgcctacaggcattcttctgtgcctccgacttcatattttttttgatgctactcttattataaatggtctaccccagatccagacacacacaggtgtcttataatggtctacctaccccaggtccagacacacacagggtagacactgggcagatgtttctttgaagaacaagtaaatgaataaaatatgtaagtggaaagtattaatgtaataatgggtcatgtctgctcattttcaggattcttttctcagaattctacaaacatggaagtgggggtagagaaagcaaatggataatgtaatgcagggttgagaattggtgggaaaatgagtggttttgaacctcaggaaaaggctaggtagagaggtgagatagggatgtgggaaagagcaaagatcaataactaatcaaaaagcagtttttttttgtttttttctgacagacttgagccatacttctaattctgtgggagctggcacttttcagtttgtattagtccattcttacactgctataaagaaatacctgagactgggtaatttataaataaaagaggtataaatggctcatgattctctacaggatatacaggaagcatggctgcggaggcctcaggcaaattacaaacatggtggaaagcaaaggagaagcaggcatgtcttacatgagtggagcaggaggcagagggctgggggcagctacacactttttacacaaccaagtcaagtgagaactgtatcacgagaagagtaccaaagggggaaatccacctctgtgatccaatcactttccaccagaccccacttccaaaactggggattataatttgacatgagatttgggcagagacacaaatccaaaccatattattctgtccctggcccctcccaagtctcaggtactcacattccaaaattcagtcatccttctcaacagtcctcagagtcttaactcattccagcattaacttacaagtccacagtccaaaatctcatctgagacaaggcaagtcccttctgcctataagcctgtaaaataaaaaatgggttagttattacttccaacatacagtgagggtacaggcactgggtaaatacttcttttccaaaagggagaaattagccaaaagaaaggggctacaggccccatgtaagtttgaaacccagcaagggagtcattaaatcttaaagctccaaataatctcctttgattccacatctcacttccagggcacactggggcaaggggtgggctcctaaggttgggaagctgcacctctgaggctttgcaaagtaaagcccctgaggctgctttcatgggctagtgttcatgcacctgcggcttttacatgtgcatggtacaagctcctggttgatctaccattctgcagtctcgaagacaatggccctcttctcacagctccactaggtagtgccccagtggggctctgtgtgagggattcaaccccagatttcccttcagtactgccctagtagagattctccatgacggctctgctcctgcagcagggttctgcctagacatttaggcttttctacacatactctgaaatctaggcagaggctcccgaagccttaactcttgcactctgaacattggcaggctaaacacctcatagaaacaccaagttttatggcttgcacattctgaagcagcagcctgagctgtatctgaagtcctttcagccacccctggaggcagaggggtcaggatatggggagcagtgtcttgagcctgtgcagggaagtgggaccctggtccctgttcatgaaaccattcttccttcttagacctacatgcctgtgatggaaggaactgctgcaaaggtttctgaaatgctttgaaagtcttttcccctttgtcttggccatcagcatttgactattctttacttatgcaaatttctgtagctggcttgaactcctcctccaaaaaggccttttcttttctaccacatggccagccttcaaatttttcaaactcgtacactttgcttcccttttaaatataagtttcagtttcaggtcatttctttgctcacgcatatgaacataggttgttagaagcagcaggctatatcttgactgctttgctgcttagaaatttctcctgtcagtaacctaaaccatcactctcaagttcaaagttccacatacccctagatgcctccaggctctttgttaatgcataacaaaaatgacctttacactagttcccaagaagttcctcattttcatctgagaccttcttagctgggatttcattgtccatatcactatcaggattttcaaagcaaccgttcaacaagtctctaggaagttacaaattttcctcatcttcctgtctttttctcagccctccaaattggtccaacctctacctgttacccagttccaaatgcaaattcacattttcaggtatctttataccaatgcccctgtccttgttaccaattttccatattagttcattcttgcactgctataaagaaatacctgagactgagtgatttataaggaaaagaggtttaattgactcacaattctacaggtgtacaggaagcatggctagggaggcctcaggaaacttacaagcatggtggaaggcaaaggggaagcaggcatgtctacatggccagagccaggaggaagagagagaggtgggaagtgccacagactttttaaataaccagatctagtgagagctctatcatgaaaacaataccaaagggggaaatccacccccatgatccagtcacctcccaccaggtcccacctccaacactggggaatcacaacttggcatgagatttgggcagggatgcaaatccaaattatatcacagttctttctggaacgttgctcatgtagcttcctacatatgtgcaactatcctcctctttttctcctcatacctgcctaccccctctgttcatattcccctctcaaaatctctttctgtttttcttttcttagtgactttcaagatgtccttttaactaggaatagaacctgtcagatatgctaacataactgtatctgctttcaaattgtgtgacctcttgttgatggtgagcaacatattttcaacttctgtgagtgacagtagagtaaaattctgatgagctgaagtcagactacgcatttttggaaagcagctaaacctctttgagcctccaggaagacgtcctctctctatcaaatgcggacttttagaaataatactctctcagccacgtatgccacccagtattattatcacgtgccattactgtttggtagttatttatgttcatgtcatcttggctagattgtgaacttttaaaaggcaagccttctgccttttacctttatattcccatgcatgctttgtatgcttaagtggttagccacttaatatattttaaaagagataatgtatccatgttattgagttaaaataatccatggaaggcatctattacaatgattggcatatagtagatatttagtcagttatattagagcactcagtcaatatggggaattttgcttcatttcctcctctttaattgattctcccatttcacatacattgtccttcggctgattttaggagcctatttatttatctgcctatttttcattttgaagtattttttttgactttcaaagaagacacaagaatagcataaggaaatcccacattccatggatgtatgcttagtatattgtatcaaggaggcacaaaacatccctttactggtggtgttaattttgatcatttgattaaggtggcatctgtcagatctttctaccataaagatgctatatttcatgctgttaatagagaaaaaccctaggctgggtaattataaaggaaagaggtttaattgactcacagttccatatggcgggggaagcctcacaatcatggcagaaagcaaatgaggagcaaagtcacatcttacatggcagcgggcaaagagagcatgtgcaggggaactcccctttgtaaaaccagcggatcccatgagacttattcactatcatgacaaaagcacaagaaagatccaccccccatgattcagttacctaccatcaggtccctcccacaacgtgtgagaattatgggagctacaattcaagatgagatttgagtggggacacagccaaaccatatcagatacttttttttttttttgagacggaatcttgctctgtcgcccaggctggggtgcagtggcacgatctcagctcactgcaacctctacctcccgggttcaagcgattcttctgcctcagcctcctgagtagctgggactacaggctcccaccaccacacccagataatttttgtgtttttagtagagacagggtttcaccatattggccaggcttgtctcgaactcctgaacttgtgatccgcctgccttggcctcccaaagtgctgagattagaggtgtgagctgctgcgcctggcccagatactatgtttttccattgtagttcataagtgtctggtggggaaatactgtaaatatcttgcttctcatcacatttttactaagtttagcccagtttagccagtttattaagtttaacagtccattgatgattgtttcctgaaacaaattatcatacagtttaccatgtagtgacttttctattcacatcattccttctatatctattagttagcattttaccataataaagagtttttctttcctcttcatttagctttgtattcatttgttaacttacattagtatagactcatggaatcttattttgttaaattgattatgcatcaaaatcatcattttgtttatttgtttttttttcttaaattgtgcagatggtaaaattggatgggtggcagagatggctttgagtactcttgtttcagtttgggggtgtgccaaacagcaggcccagaggataagcattcatgtggtttacaccagtttaacaaggaccaacatgaaagagaaaatagttgtagattactctgaaatatattgtttcctctgtgtttcaggaaataaaaagggtcagttggaggtagtttagtcactaaggccactgcaacttcctctcttaactcttagcagctggagatgttttgctgtagacacacagtttgaacataaaaggtaaaggagagtcagtatcgctgtgttggcacaagatggcagcagtcatccattgattttgcagctcaaggcctacagattttaaattaatggtgtcttttgtcttcgcagggacttcagtactagtgctaataacatccagattgataaaaccaagcctttgtggcacaactatttcttatgtggacttaaaggaattcaggtaaattggtttataaggcacttactaccagttgagattatcatgtgtattctgtcagatttattttatttactacatctttttcatctccttacagtactaaccgatgcttctgttctattttgctagtttgtgtttcagagagtggggaagatatgactgttttggggtggtgttcacagggggcagtagtggtttttatacagctggctgttcataaataggtgcatctgacaaacatctgtctggttttaaaatctttgtttaaacatacttttgaggatatgttttaatactattatttacatttatacttgggatgtataggggtatactgtaataggatttagagtcagcccaggtttgaatctgggctcttctcagctgtggtaatttaacctcttaagtctcagatttatccataaaatgatgtcattgctatcctgacaaagagttgttaaaagaattacataaagcttgatggtagccatttaataaatggtagctagtattgttattgctacttcagatgggattaaaaaaagatataatgaaatgtattagtataagtattttccaagaaacattgaataattactttgaaaatctctaatgttacatacaagaacaagaaaataaaatgttttcactctcataattgaaaaagtatcaaggaccaaaagaaaattgatatttgctgtttttagagccacttttatattgcaataattattttagatgtagtgacttgcatagaatcatagtaggacaataagaagtaaattttgcctttgtgagctaaaagtaaacaaacaaactgacccatgttttagagagcttgtgttccttactgcctggcagtcctatctgaaactttgtaatgagcagctaggacttagtggcacatccattacagaaatacatcaaatttatttctaatgtgtagtcctatactgtaacagtggtggtttttgttcttaaagttaatgaattcatttctttctttcttttgtgttttcctttctctcagacacatggtaataacttacaggaaaagttattggcaggttttaaatcttcaaatcatctggcttatcatatgcattagtgggaattacagtatttggaagcatttgcctggcaaatgcaattttaatcttccttgtaacaacatgcctttttgcagcatatgggtaaagtggcctaaataatgcatgttgctttgtgttatttttgagcatttcaggttttaaagccttcctgtttggtttgacaatttatgtgcaaaagcaaacttatacaatgaacttttggcagaaaggtaatttaaatgctagcctgttcagaaactttcaaattcaaatactagaaagtttcagagaataattcacttatattacattgaacatgttatccttttggcatagagctattacagaatgtggcatatacccatttgcattttgaatttgttatacattttcatttaaacattgcataatacgttgttttttgtttttgtttttttgtttttgtttttgtttttgttttttgagacggagtcttgctctgtcgcccaggctggagtgtagtggcgtgatctcggctcactgcaacctctgcccccggggttcaagcgattctcctgcctcaccctccttagtagctgggattacaggtgcctgccaccgcgcctggctaatttttgtatttttagtagagacggggtttcactatattggccaggctggtcttgaactcctgacttcgtgacccacccgcctcggcctcccaaagtgctgggattgcaggtgtgagccactgcgcccggctgataagttcttaagtgtgattcccactcaagacacctgtgtttgatcagtttatattaaatatattgtattcttcaatttttttttttaaacaagctgtctgatattctgtatgaaagggcattggcaacagtagagtttcagtttatagtttgtttgtatatctggaaggaaatttttagatgacttgaaatcaggaagagaagtacacccagctaaatttcttcttattgtggtgcgagaattttgctagctaggacagacagacaaaaaattaaggaaaaaggtcttttatttgcagaattttgttgttattttagttattctagctagctgattgaaattctcccttgtataataggtatgatgaaatgcataattaggtaatagtatttcatatgttaatcttcagtcatttgagtaatttgcaaagactatggtactttttcttgagaaggaggtagacttgaatttatttgtaaacttaaaccacaaaggttatgatatgatatcatccaaagtgtcctagtgttagaaagtaatgtaagtatactagagctttccatatttaaatcagaatctgattatttctttgggctttcctatttgtagaaatagagtttcctcaacttgtttagggtctgtattctcatttgtggctgaattctaatttgactatctttaaagctaccatatggctaaactgtatctataaactgtagtaagcatctggattttctcatgtagctggcatattaaatcacaatgacggtttgctggctcaggtttctaactgcagtggaaaagttttcaaacaggattcagagacctgggccctactctcgtctccctatgtgtcatcttgggaaagtttcttcatctcttggtgcctaggttttttcataagtaaaacagaactgagaatgtttggaactcctttttttcagagaaccttctaaagtaaggcactccttagaaacaagtcactgcttgggggctggacttttataataacagaatgctggagttgtgctgcatggagatttaaattacctcacagataattgtatatttcttgtcctgctacttgacaaattggattataattgttttatattttttccatatttgttcaaatcaattaatactcaagaaaaagaacattcaaggcaattttatattttttccatattcaaatcaattaatattcaagaaaaagaacattcaaggcaagaaaattaaaggcatttaagggaattactctgtggctaagagtcattaaataaaatgtcacatatagtctcaactaaattgaattgcataagtagtttctataactattataagtctattgatagacttttgttctctggggaatgaaagaagctttcactactccttgaattcaatactgaattactgttgctgtttttccttatattcttaggaacactttggtcttagtaacctgactggaatgaactgcctggtagatggaaatatcccaccaagttctggcctctccagctccagtgctttggtctgttgtgctggcttggtgacgctcacagtgctgggaaggaatctatccaaggtaactacctttgataggaaacctcatagaaccctctcctaataatcattagcatccaaatctcaaatcagaatgccttccttgattgaaaaactgtcttctctaaaaggactgcacatgtgggcaagcattgtaacttaacaagtgataaatcactataaagtagcttataccctccaaacagtgagtgaatagatctgtgaataactgtataaaaatacattgtattaaatatgggatttgaatgtatggatatcattttagatcacctcattcacaagttaaatttagggcaagaaattcttcctctcatggttgagcctgcttattttcacccaaaaccttaaattaaaaatttgacaagtagtgggttacaagggtaaagactaggtaataaaggaactgaatatgccagcagattagtcacagaaataaactttaaaatattgcattacaagacgaaatgcttatttaaaggaaatataaattgtacaagaggtcagaaagcctcaagtttataagttcacataaatctctgactctgcagtttagagcaggtgtgctcagctttaattaatgctttagcattctggttcaaataaaatgttatcataggttctttttaccccatgtacatatactaccaggtttacggatggtttggacagatcaagagaaaggcagccacatgcttagtctcttttaagcatgtttaaactttcagtttgaaaattttatgtataggaggaaggcagaaatgaaggagaaagcaaaggttcagacagaatccttctttttagctgtcctgtgtaagtgtacattaattagcccttagtgagcaatgactggttgggagggaaagggggcttacatattattattattttttgagaagagaagaagcaagggacaggaagtccatgtgtaaaatgtgtttcccctggtacaattttcaatctgatttgtttatttattcatttgtttgttcatcattcaaccattatttatttaatggctattttgtgccagataatgttcaaggcattggagatataataagtatagtctcaactttcactatgcttatagtctaaaagggaaaagagacaagtaaataggcaactgcaatagaatatagtaagtggataagtagttttctatgggagcagatataacccagatttagagagcataggacatctaaatggagacaacaaagattaaaggagttgtagatattgatggcatgataacactgatgacatcagataagcatgtattgggtggagagaacatcatgtggaaatgtccagagtaaaagcaatcatggcttgttggagtaacaaaaaaaatgtctcaatatggttgaagcatacagcaatttggataacagagcaggagatcagttgctgggccttgtaaactttgttaaggaatttaggtatcatcttcatagcagtgggaaaccattgcagggttttaggaagaggtaaggtgatcatatctgtattttagaaagatctccctggctatattacaaagtctgcatttcagggttttagcagtagggaggtgatttggtttagagtagtggcaatgagaatggttagaattagatagattcaagatctcagaatcagtaggacttggtcattgattgggcatgggaatggggaacagcaaagactcaaagattatatcggtgtctggctggtatgattcattggaataagagatatgggggaaaaataggtttgagtggaagctgaaatgttgagtgtgaggaatctgtgggcatactgatggagttatttagtatttagttatgaaaaaaatatgaaggtcaggaggagatctggacttgagatggtacatttgagaatcattagtttatcattgtttttgaagccataggagtggatcaagatacctggtgttggaatataggtggaaagataaggaaaactaggacagagccccaagaaacatgaacatttgaggaatgggcataggaagggatgtccactgaagggattgaggagtagtccagtaagtatgagaaaaaccagaaaggtgaggcaacagcaaagacaaggaagataatgtttcatgaaaggagtggtagtgttgtcatatgcttctgagaggttaccacaagttctgagaagtatccattgaatatcacaacaaagaagttgtacaaaactttgacaagagcagttttagatggaaatgggttgaagggtctataaggggtaagaaagtggtaaagttcagtggatacaaaaagtctggtgatgcatagaaaaagataatttggtatttggaggagggtgtgaagtcaaggaattcatttcacttttaatgggaggattggtgaaacttagtttttctatttttctggtgttttgataatatacctatctaagaaataggaaggaaagaagataaagagaaacacttgaacccttagaattaattctgattgtctgttttcaaagtcggaaatagcaaatacatttttttatcggaactatcttactgcagtgcctaagcaaaaagggaacaatatgtatatcctggctttctcagctagtctaagttgtactaacaatatttacattttctaaggactgagcataattatttggagagtttttttttttctggagtgagacagaatcttgaatgaaaggaagtctgtaatttgttcagtctttaatttaaatgccatgtgattttactcttgtaaaaatcacagaatataagaattcaagggactttagagatgagctagttcaaaatgctccttttactgatgtattagtgttaccataggaaacaaatgacatgttaggtataactgaagagagtttaataaagagacttttacagagatgtgggtaaggtcaagggaactaactaggaagggttctcttgtgaagctggaagccattgtactttaggagctgtggatatagagtaatgttgccagaaatgcagcaaggcagagaaagaatgacacaggtgaaaatggcaatgagtgggaatagttgaggggaatttaccatagaggtcagccttttggggtaggggaagtgtgagaatagaggaacagagggacaaccgaaaataactagcctgtttgataaggacactaagtcccacaacagattggtgactaaagcctttcctattatttcatatccagtaaaccccattcagttgcagacaacaattactgcagatgggatataataagtagatgtggaacttgttaattcattaatatactaaatgttgcatatctgaaaccagaaaacaatatggctaatcacccagagaatctggaagccagaaattatgaatcagaatgttactggtacaagagagtatgatgtggcaaaagatctatgaaaaaggaaaatctagagacttctgatttcagcatgtcagaataagacttacctactctttttctgtgtccctaaattaatcttcttttctcaaaaatcatttccaaacaacagggaaaataagaaaaggaagcacaagctttatctttggtaagccaaggagacataaataaccataaaccacaaaatacaaagatggaaagtggatagaggaatgttacatgacttaggcgaatggagaaaggtcagagccaagtgcctgcggagggagttgcagatggaaaggcagctgactcatcccacagctctctggcaaggcttaggaagaaagcagggtaatatggtgggtggggatttatctgaaagcctttgtgaggactatttagaccctaaaaggcctctcttcacctggaccatttccccctatctttgcaggagtctctggagaaacaaccagagatcatttgtacttggggacactgagcactgagaaaggcaggacgagaaagacttgaaaactgggagattagaggacattctgcatctgaaaaatgaaattcttagctccattcttctggtcattactggcacactggcaacctcaccaccctacactccagcaggaatgttggaggatccttctcaaaggaaacttaaccatcccagagatggttcatacagatactgacatttggtgacccccttctccagctcctctatgaccttgttagaagcccatttacaaagcttctaataagctttttagtgactcactcttaaatatgatagggcatcaaagtatagtaagattttggaagaaaacctacaaaatgaaccaaacaaacaaaaaaaacagagaaaacaggaaactagaggaaacagagacaatgctgagagcagaagaatcaaagacatgatgtcctcagagagataaaagaaaatgttaagtccttgaaaaataatagtgttacttttttaaaaaaggaaccaacggtaagatagagcttttgcatattaaaaatatgacaagacaaaatttagcaaaaagattggaaacagctgggcatggtggctcatgcctgcaatctcagcagtttgggaggctaaggcaggaggatcgcttgaggccaggagttcaagaccagcctgggcaacacagtgagaccttgtctcaaaaaaagagaacagactggaagaactctctgatatagtagggaataaaagagctggacaataagagagaaaaacaggaaaatttatggatcaattccagaaatccatccaactagtaaggaaaaacagaaaaaacagttattagaaattattattattattaaaaatagagttggggcctctctatgttgcccaggctggtctcaaactcctgacctcaagtgatcctccctcatcagcctctcaaagctctgggattataggtgtgagccactgtgtctgtccagaagattttttttttaaaataatatttctccaaagtgaaaatgtgaatttggattggaagggctcactgggtgtttggtataataaatgtaaaaggccaaaccaaagaatatcatctggaaattttgaaacttgagtgttatagaaaagacactaaaagctagttgacagagcaagagaaaagaacggaaagaaatcataatcaaaggatcagaaatgtaaattaatttctcaaaaacagtattggaagataaaggcagttgataaatgtctctaaaatattaataaattttagtttaggctatctgtttaaatgaattaatcaaatgtgagggtatagtaaaacattttcaacatgtaaagtgtaaaagtctagaggatgtaatccaccaaaactagggagtaaaccaagaaagaagatcgcatgggaactaggaaatgagaaatccaatatatgagagaggagttgggtatttatagaacattggtatttgtagaacataaggggaattccaacataacacccataatatccagcagcttagaaagcagtgcagattaaaatgaggagagggaaagatggaacttataatcttatcagtaaaacaaaaaaaaagccaaaaaaactggttaatctgatatgttcaaccatgtggaaaatggattcagagtaatttcacagagctgttgtaggatatgacaaagctcagctagatatacaaatctaagcaaatgaagaaatggggcaattattaaatataggaaaaacaaaaaagtttgtaacagaaatgaaatcaaccatttttttttgctcataagtgaacaataatctcagtaattaacacaacaaatatgaatttaagcaaaattttgggcataactttattgagaaaggtggaggagggtaaaggaaaggtggatgtaagagagctaaaatcctcacttatcataataggaaagcaataaataatgtttaaaatgaaacaacaggcaataacatttaccaatgttatttggaattggaagcaaaagcaaagagccaaaagtatttgccgttgtacacattgcattggggatagggatgacagagtgagctaggggctgcctttgttgttgttataagccttttacctctatttaatcttttagattatatgcaaatatcactttggcgaaagtaaaataaaagatagaagaactgaatagaatgaaaaataagaatggaaatagaatgaaaagtaagatgacctgtatgaccacacctgggggaacctgaaagatgaagagatgagaagggattcaatgagtcaaggctagagattgagaacagatgagctgttggaatgtgaccaaatcaatggcctagggtgaggtctgttgatgggttttgggtggaagaatccaagaaaatacaggcatcttccatttagtggcagtagtccattccaacaaatcagatgttctgcacaaaattattcagcgagggcctatttttttaaaataggaaaaagtataatgcattattcctcaactcaaaacctctaactaatttcctacaatgttacaaaaatacagtaaagctttctttatataagtcacacagaagtagcatgaaaaatgtttaaaccaattttcttgaacattaaacaattaatatggttgttaacaagcagttactttatatagtgataccggtatgtcttctgtattgacacctggtatttcagtactctgcatactattttgttaacaatgttgtgtttaggttttagggtgtaaatatgtatgttttcctatataaacacctttcagaaagtgttgttttgagagatatgaacattctatgaagtttgggtatcaaaaatctttcgccaagaaaatgttagttgctgaggtgttctacaagatatgcctgtattttgtaagaatgggatttgggttgctctgatgtccagtttctgtctgttcttggagttgtccttggaggccaagaagaaaggaccaagtgcctcttaggaatcttagaatagaaatagctggcctacttgggaaacaggttgcaactctaaaagctagtcttgggtagtaaggtgtgttagactagcatctatccacaaattcctccctctgctggtgtggggttgggagtagattttgaattcatgaggttgtagactgagcaggtgatattcagaaaacccactttggaggatctgggaggtacagtagagaagtatagggttgagctgcatcccccatactgaagtctaaggaagagaaaacccatattatcttggttgatgaagactgaaagagccagctgggaatagtggggtaggggagaattcttgtatgtggatatctctggcattttgtcaaaaacacaatttacatgattctgagttacccagaatatgaattggacataaaaccttcctttgagagttatagttcactggggaacctggggaatctcttagatggcatcaagaatcctgtattgggaagcccagaataacatgtataatactggatttgtgaggagtgctttcaagagaagaagacagataaacttcctaacctaccacttgaaagcagtgattcagtggcatttgttgaatacctactatatgccatgcgttgttctaggcactggaaatacaactgtgaataaaaccagtgaagtgcccctgcttttatggagtttccatattggcagaagtgatggtatgagaaagataatgaagagctatacaaataaatatataatatcagctaggccgtagttaagggaaattgtatattttatctagggagttaggagaagttctctccgagaagaggacatttgaacagagaccttagggagtgagcagctgagaaagagtgtcagagggaacagcaagtgcaaaagccctaaggtgaaagagagtttgtcatgtctcaggaataagaggtccctgtggttggggtgtggtgagacagaagcggggagaggtgggaggtgagttgagagagttggtcaagggccatggtgtgtagcatcttctttggctttcattctaagcgtaatggaaaacctttggagggctgtgagctggggatggcaagatgtgatttacatggattaagttcttttacctgggagtattataccatacccctgacagtggcaagagaggaaacaataagaaagaaaagagaagagaaaaaagaaaagaaggaaggaagacaaatggtcaatgcccttatggaacttaaatgcatatagtggaatagtaacagaagatttattaactgaccatctatctcatacaaagtgtaaggtattttatatgtaaatgaataaagaggttgaaataatgtctccttggtgaagttaaacagggacagtttcaagtaattggtgagttctaagaaaatgttaaaggaaggaaaggctgggaaacaaagcactgggaggggcccaagggcatttcaggcagagtgaacccataagtgtattttaacagttctctgagccagacttaaaatatgtgtcagccaaggcctagaaattctcttgcagcctcatgaaattccttttaaaactttttgactacagggatgctttctagttgcttaagtccctgaacagatttacttaacttcatttcaggggcaaattagttatatagacaggggttgatactcttttcaggggagtgtttttgaagtttgaaacctgttctgtactggagacctctaaggttcataaacagagtaagtggaatgttcaaagttctgtgccaaatatgtccacattttcacttttctgagtttacaagtgctgtttccttgagaaagtacaaggctgtatttttcttcacatatagctgcatttcagtgaaatatttcttggccttcagaataagaccttgtgcctaaagaataaagacatgtctatgttataaaatgaaaaggatctcaaaattatataaactatgatttgaatgttttaatagtttgttacatggtataagaaaaatcagaaaccaatttgcactgtcactaattattatgcttagaagtccacataaggacattgtttcagtttgcttagaataacaaaacctcatccatataatggttaaggaaaatagtagtttaaaccattccagccagatgttgagtgctaatgaactgcagcagtatggcctctgaaaagatggtaaatccagaatacaagctttgaaaagaatctcttaattaggtgttgaacatggactgaagccatgtgctcactggtacaaaaaccaggaagctatagtgttagctctgggtggcctgtgtttaaatgtgttctaagttttaggttaataatgtaaatacaaaaccattcacgtagttttgtcaattaaaagagatcctctggttgtatccttttttaggagtaggattggagactgaatcatttctttaatgattttgagtagtttggattcacttgggtgatgtgacactaagctatttgtctttgcagacgttgtttgggtcacttctgggttttttttccgttttctttcctaggctaaatacttgtttacctttagcgtaaacgaaggcaaacaagcataattagggaacagcagatttgaggagtgtgtgtcactgtttgcaagtggtttcaaatgaaaccactgttgctacaaattaatatgtatgcctagttgtgttttgaacttttgttgtgatccttaaatcgttattactcagtgactgtgtttcaaggcctccagattttgacttgcaccctacaataagttaagtgttacacagtattcaaataattaactggaataatgcaagtgatattaagtactacacatatgtgcatagcctttacctactacatcagttgtgtgcattgaacataacttaaagatgaaaatacaaggatagataacccccctaccaaattcagaagtgtttctcatttattttcatgcatttctgtttcacagaggttatggtagccatcttggtcaagagttacctatgctgactcccagactaatatttgatagagtaaggaagacaatgaaagactgacttaactttgtcccctctgtggccaatttgctctgtaacttgtgataacttccctatgcctcagtttctgtttctaaaataagggtgagaatagttcttcctttaacttcacaaggatgactcagttaaactggcttaatacctacagttctctgaccttcctgataggagattttgatgaagttcagggaaagagtttagcaagaaaataggtaaggtaggaaaataaattagtagtcagggaagtttttgtaattgtatgaagttttgttgactgtattggtggtataaaaagtaaagtagaggttccttttcaaagagactctcctccctgtctaattaggaataaatagtacttctcttagaagcaaaatttattcaaagagctgtgctaacattcttaaatatctgctagctctaataaagaaatcaatgtactttatgttcttagctcccacaatttagcctaaatatttgccctggcatgcttatactggtccaagcgggcattaggttatagcctgttcctcttccttatttggaggtgtttttacctttctcagcattccacaagttacttcctccttcctttgttctcgtctgcccgtgcctcttttaaaaagttctaagttgctagccaattgggacaaatacagaatgtgaggtcccgtactagccaatggaaaccggacatagcagtagggtggacgcgtcaggttataaatgactctgtctcctttgtttggtgtactcttgtggtaaaactgctggcgagtgtaccctttctgcagaaagtaaaaatggccttgctgaggaaattaaatttatgttcaagtgctatttctttatggcaccggggaacaagcatttctaacagtggtcatgggaagagtaaggagccaaatcatattgtgtggagaagaaagtgattcaaagagaaaaggttaataaatgagactggttaaagcatgcactgcagtattggagacacaaagatttggaggttattactgcaaaatatgactttaaagttttatgttagaattttcatgagagtaaaagatgtctttttaaaaaaattactgttaagcacctagatgttttatgcacatcaactctaactttgtggtagtcttgtaaataagttttactactatttcaattttgcagaggaaaatatgaggctcagagaatttatataatgtcaccaaagacaaatcacatgtaactggagttgtctggattccagctcacatatttttgatccaaaatggatacttttctattcagccatgctgctacctatggtataatgtaattataccatattgtctgatataatcagtatcatagacatcggaaaaccctggagatgaggtccagccctaacattctgtgatccttctgatgtcctaaaagacagggaagtaaattatacattttcatgtatataattaatgtgaattggattttttaaataagttgacagattttatactctttgtcaaagttataatgatatttttttgaaatcctactatatccaaagcaaacggttggattctcaggatataggaaaacttagatacagtctttgggccttagaagtttataatttcagtagggagattagattaacataaaaatggaaatgtcatgcaaaagtagcatatacaaattcttccaaagaatacgaaaacaaagaacacttcccaacttgtattatgaggccagtaaaacctttctgccaaaccaaatgtgatagcttgataccaaacctgacaaggacatcacaagaaaagagaattacaggtcaatctctctcatgacattggatacaaaaaattctgaacaaaatgttcacaaatttaatctggtaatattataggctaatacattgtggccaagatgagtttattctaagaatttaaggttggtttatcatttaaaaatcagtgttatttaccatattaacagtaaaacatgtcatcttgatatataaaggaaagagtttgataagatttatcatgcattcatgataaaaactcttagcaaattagtagaattcagtataatgactgcctttgggaattagggaagagaaatgattaggtagagacatgaagagaccttctagagtgctggcagaggttcattactttttcttttattgtggcaagaccacttaacatgagatctaccctcttaacaaaattttaaatgtataatacattatcattgactataggtgcaatgttgtagagcagatctctagagcttgtccagcttgtttgactgaagctttatgccagttgattagtaactccccatccacctcaccctgcaccagcaaccatcattccactctgattctaagtgcttcatttcttaaccttgatggtggttacgaggatgtttcctttgtgacaaattattaagctttatttttatgctttatatacttttctctatgttctgtacttcctaaacataaaaaatagcaagactttcttcaaccctaggatcaaccactgttaaaagatttttaatgaatccttccagaaatactctatccaatgtaatatatacatatgtttgccctttttgtaaaacacccaggaaaattttatatataaatatatgtatatattggcccggtgcggtgcctcatgcctgtaatcccagcactttgggaggcaaaggcgggtggatcacttgaggtcaggagtttgagaccaccctggccaacatggtgaaactctgtctctcctaaaaatacaaaaaattagctgggtatgatggtgagcacctgtaatcccagctatcaggaggctgaggcaggaggattgcttgaacccgggaggcagaggttgcagtgaggcgagatcgcaccattgcactccagtctgggtgacagagtaagacttcgtctcaaaaaaaaaattatacacacacacacatacacacacatctttccccttgctttgctttttcacttaaaaccataaattgggaatcattccatgtcagcacatctacatatactgaattctctttaatggctgccttgttttctaatatacggtcatactataatgcccaattatagattttggtgtgatggtaatgttctaaaattggcctgactattggacatttcagttgtttccagggttttgtataatatcagttttaatacttaataatatttctttataaggatatgctatactttatttaactagacctctatgatggaaatgtaggttgttttcaagtttccactattataaagaaggctctgatgaatattcttgtagacaattattttcatacttattcacttttttatttaacataaatcccagaacataaagttactgggttaaaagatatgataactttacttttgaaatacactgcccaatccggaaagattttaccagcaatgcagcaacattgcatgagaggatctattttcctactactgaagttctatcaatcttttaaatctttcctaatctgaaagatgttgtcatggccatttctttaattattagatagtttaattagatagtttaaatgtttaatcttttccatgtcttttattgatcacttgcattttttgatttggctgtatatcaactcagctcattttctcctggagtatttatcaatcatcttattactttataagaactcttcatatgctaaccattcatctattatatgttgcaaatatttatccctgctcaaactaattttctgtttgacttcttttaaactaacaattgtgaagcaaaagtcactttagtcatatttaatcacatatagcataggatcattatatgtgcattcaattttatcttccttgagttgaaaatactctataatctctcatttcattttgaagtacttggacacagggagcctcatagactcagggattttacttagcatctctcaggagatctccactaaatggatcccagggttctcttgtctactacaggtgtgaccttttatctttagacgcttactcagaggaaccaaaactgtgactgatttgcattgtaagcaggaatattttttctttctttctttttttttgtggtgaaagcaagtttattaagcaactaaaggaataaaagaatcactacttcataggcagagcagccagcaggaatattttttccaatagcatttgtgcagtaagacatacacttttgaatcatgaataatgtaacttaccatctgtttagcacttggaaagtttcaaagaactgtaccatgatccatatgataggccatttaactctgttaagtaaggtacaactgccaacttcttagaccagagccctgcctctcagagacttcctggagcctagctataggagtgtttacttaggactctagactttatgttatatcaaagagatatggaagatttcacttttatagtatattaacattgtccccatttcatctttggaccttaaaacaccaagcatcatcatcatcatcatcatcaacaacaactacacaaaactgttgaggggcacagtcattgggtggataggcttaggttcattcagcccttctggatcttgggtcagccactggtattgacaatagggatgaattttcaatcttgaaggacatataaatttgttaagaataaaagaagtgcagttagtctggcaaattgtaaataaccttaaaacttttctccctaaagagagatgattgtatcactttcttatgagcatctttacagtgcctgacataaaggaggcaagtaattggattgggttgaattagtgaactaccttcatctgtaaagcagccattttcccctagtgttagtactatatttggatgaattaacaactggttgttaattttgactgtatttatataaattaaagtgaagcaagaccctgtggaatttatttgtgaccatcaaagaccataaatctcttacattttaagtaagttacagagaaagtaaaattggtgatgagtcctgtggttacaaaggcattcagagattatctgattatttcttcttctgataaaattatgttattgctttgtaaaatataagcaaaaatctaagcaatcaggactctttatgctgtcaagaccttttcattgtaatgaaagtgctcctttttatttttataatttaatttgtatttatatttattttcatgacaaaatattttaattctcatcaggttttataaatagttcttcaaatgtcactatggtttaaatttggtgataaagcagagaatttggataaaagaaaatttggtgataaaggaagaaatttattggaaaaatttaaaagatgtagattttttagggatagttcacagaaacctatgtgttaatgcagggtgcttttatatttagaagttttcattgattttcttcaattatttgggataatattgttacctattgacagcgatgttacatctctcacacacacatgattagatgtattgttaatgtaccacttaaaatttttttccaacttttaattatgagaaaatttcaaaaggatagaagaggcaagaataggcaatgaacatgtatgtctttcacatagatccttggaaacattttgccacatttgctttatctttctctctacttttttttctgagccatttgggaattaattgcggacatcacctctgagtacatcaatattcatcccctcaaagcaaggcattctttaatatgccacactatatcattggaacatttaacattgatataatattattatctaatatgcagttcatattcaaatttcccaattgtctcaatagtaatgtcctttagaacttctttttcttgttctttttctttctttcttttaattttttctgattgagaatttacttattcaagataattgaatacattctggatctgaaaaattaaaaagaaaggaattaaatactactcataataatactcagttttaccaataattggatttaattaatatcatcattgcatttagtttttttttcatttttttagtttactttattttagaacagttccccagcatttttttgtcttttatgacactgacaattttgaagcgtccaggccaaatttttttgttcaaatttcctgaatttggatttgtcagacggttgccttattattagattgagactaaggttttttgccccaagaatactgtataggtgatggatgtccttcttggtgaattgcatcacatggtttctgtttctccaattgtacttaacattatttaatacacagagataggtagagatctgctgtctatcaaaataatgccatagtttaggtatgtcatatgaattcccctttataaaggtggagtttttgttaataaaagttctttaaaagtgtattaaaagtgatgatagagactataacatagtcttctattacatgttttaattaataatgcatgtttgtcaaatgagtgaaaaatagcaatgacttaaaaatcacaaattctcaattttgtcaaggaatttcaattcattattgcactgctatttaagtctgttcatgttcttcattgttttgtttaggaaacaaaatgtactaagcttggaataaactgtttgagatgtctaacataaaaataaccaaagcagatgtaattttatactgccactgtgtatatagggttacattatttcacttgcagtcacttagggtttgtatatatcacatttcagtataatgacatgggcaggctccaaagaaaataccaagcaacgcgaatttggtttgactaacaaatatttacatgtctttgtgtctgtaattattgtaatcttttaaggggtttatgctacacaggcttaattctctagagctctgtgttagattaaaagaggctgatcagtagtatatataactgtaaaaatgatactgtagcccgtctagataaattggtataagccagagcttctgcagggaacaggtggacttaagagagccctgacatgggcagatagctgcctttcatgtgcatgctttcttatgtgttttagccttttctttctttccagatgggtggtgttgatggaaccatcatttgattgttatttgatcttttcaggtttctctagtcatgtagttagcacattggaagcaagaaaagataaacagtacagtcctttcctcatctataggaggcagacagatagttgtattgctggtactgaaccattcacgtatatttgcttactcagtaccatccgtgtcaatttgcaagctttagccagatgtaattggttaaatagattctcccctgttgcccccttgattaaagctccttggcctgtaagatgtcaatatcctattaacttttaacttcactatagcgcttcttagtttgtattgtaaagatgtttccctctagaccatcatggggttttcaagcatagagactatttattttttaaatgtttggatccccatagactcaaatcacaactgatttagatcaggcagtatggtgcctaactgaattaattaaaaaaatgtaatctcatttgcaacataatttcctggtgatgacataaataattatttgagttttaacttgagattctatcaattttacaatttggtttaatccagaggatttattcatttatccacattgactgaggagttattatgttccaggcagggttgatccactggtctctctcctgcctctcttatggctgatgtctattctgagttgttggtgtctctgccacactggctggtgactgtcattattagttttaggcatttgtgctagttgctgggttccgcctagttgctaataggctttgtctgttatatacagacataaatcccataaatttaagcatgtgaattagtaaagttgtcatagtaacagttctagtaaagactgttcctcttggatgtcacacttgaacccgctgaattttgtcacctgcctcttacattctcagatgaaggagttattacacagggaggtggtaaaggagcaacagaggcaaagaaatgggatgcactcatataatataattggctacccaaaatggagatgtttctaaaggcataaatatctctggatgcatgtggaaacctctcttttatccctgattgtattctcctttagtgtaaagaataggcattacatagctattataactagtaaagttagagtttttgtttatcagaaatttaagatcaattaaatattttctaattaaagtgttgtagttaaaaattataaatattgactgaacacaatggcagtgagaatacagttttcaagtgtgagttttagcactgagggctagttcatgagctgggtgttcccaaagccatgggtagaagtaggaaatacagcacaacatcttaaatgggtgaaactatatttcttaataaccctaggtttttcctgatctcattagaaatgattatatgttccttaaaatttttttaactgtaaaagcaatatattctattttataagattatggattattttatttaattttaattataattgtaataaaataacattttatttaattttaattataattataataaaataacattttatttaattagaaattaaagaaaattatccataatcttatacaaccaaatattggactcacagtcaccttaagtattgtgaggaaaataaaatctttgtatctttaaatattacaactcaaagagactacatttagctcatatgttgattcaattaacaatttttaataacatatctattttgtgtcaggcactattcctggcactggggtagagcaattactaaaatgcagtgcctgctctcatggagcttacaattaagtggggaaagaagggtgatggaaaagaaataagtgaaaagataacctaaagtgttaaaagccttgaagaaaaagcagggtttgagatggagagtggcagggggtattagtatattttaaggaagtaagggaagttctgtctgatgaggtaacgtttgagcagagattttgggataagggcattccagactgaaggaatggtggatataaagatcctgaggtggtgggatattgatgcactaactatatgctaggcttttaaaatcctaacagtgacacaatgaagtaggtaattattataatttgtattttgcagagaaggaaacttacatgctttaaccactgtgctatacacccacatgatgtaatagagcagagagttaaagtatgtaactcaggtcccaggaggccaggaaaagttccccagaggagttgctccttgaatttagttgtagtgaaaaagcaagtagaaaatgagaagggtttagaattctggtctgttttctcctgttactatatccccagaagcacatttatttggaagcatatatatatatatatatgtgtgtgtgtgtgtgtgtgtgtgtgtgtgtgtgtgagagagagagagagagagagagagatggtatctcattgtggttttgatttgcatttctctgatggccagtgatggtgagcattttttcatgtgttttttggctgcataaatgtcttcttttgagaagtgtcagttcatgtccttcacccattttttgatggggttgtttttttcttgtaaatttgtttgagttcactgtagattctggatattagccctttgtcagatgagtaggttgtgaaaattttctcctattttgtatacatatatatatatgtatactaaaaattgataagctatagaggagatgatcatagacctcagggaaggataaagtgagtagttccattatttattttattttattattattatactttaagttttagggtacatgtgcacaatgtgcaggttagttacatatgtatacatgtgccatgctgttgtgctgcacccattaactcctcatttagcattaggtatatctcctaaagctatccatcccccctccccccaccccacaacagttccccagagtgtgatgttccccttcctgtgtccatgtgttctcattgttcagttcccacctatgagtgagaatatgtggtgtttggttatttgttcttgtgatagtttactgagaatgatgatttccaatttcatccaggtccctacaaaggacatgaactcatcattttttatggctgcatagtattccatggtgtatatgtgccacattttcttttttttttttaattattattatactttaagttttagggtacatgtgcacaatgtgcaggttagttacatatgtatacatgtgccatgctggtgcgctgcacccactaacttgtcatctagcattaggtatatctcccaatgctatccctcccccctcccccaaccccaccacagtccccagagtgtgatgttccccttcctgtgtccatatgttctcattgttcaattcccacctatgagtgagaatatgtggtgtttggtttttttgttcttgcgatactttactgagaatgatgatttccagtttcatccacgtccctacaaaggatatgaactcatcattttttatggctgcatagtattccatggtgtatatgtgccacattttcttaatccagtctatcattgttggacatttgggttggttccaagtctttgctattgtgaatagtgccgcaataaacatacgtgtgcatgtgtctttatagcagcatgatttatagtcctttgggtatatacccagtaatgggatggctgggtgaaatggtatttctagttctagatccctgaggaatcgccacacagacttccacaaggtttgaactagtttacagtcccaccaacagtgtaaaagtgttcctatttctccacatcctctccagcacctgttgtttcctgactttttaatgatcgccattctaactggtgtgagatggtatctcattgtggttttgatttgcattcctctgatggccaatttcatgtgttttttggctgcataaatgtcttcttttgagaagtgtctgttcatgtccttcgcccactttttcatggggttgtttgtttttttcttgtaaatttgtttgagttcattgtagattctggatattagccctttgtcagacgagtaggttgtgaaaattttctcccattttgtaggttgcctgttcactctgatggtagtttcttttgctgtgcagaagctctttagtttaattagatcccatttgtcaattttggcttttgttgccattgcttttggtgttttagacatgaagtccttgcccatgcctatgtcctgaatggtaatgcctaggttttcttctagggtttttatggttttaggtctaacgtttaagtctttaatccatcttgaattgatttttgtatcaggtgtaaggaagggatcgagtttcagctttctacatatggctagccagttttcccagcaccatttattaaatagggaatcctttccccattgcttgtttttctcaggtttgtcaaatatcagatagttgtagatatgtggtgttatttctgagggctctgttctgttccattgatctatatctctgtttcggtaccagtaccatgctgttttggttactgtagccttgtagtatagtttgaagtcaggtagtgtgatgcctccagctttgtacttttggcttaggattggcttggcaatgcaggctcttttttggttccatatgaactttaaagtagttttttccaattctgtgaagaaagtcattggtagcttgatggggatggcattgaatctataaattaccttgggcagtatggccattttcatgatattgattcttcctacccatgagcatggaatgttcttccatttgtttgtatcctcttttatttccttgagcagtggtttgtagttctccttgaagaggtccttcacgtcccttgtaagttggattcctaggtattttattctctttgaagcaattgtgaatgggagttcactcatgatttagctgtctgtttgtctgttattggtgtataagaatgcttgtgatttttgtacattgattttgtatcctgagactttgctgaagttgcttatcagcttaaggagattttgggctgagacaatggggttttccagatatacaatcatgtcatccgcaaacagggacaatttgacttcctcttttcctgattgaataccctttatttccttctcctgcctaattgccctggccagaacttccaacactatgttgaataggagtggtgagagagggcatccctgtcttgtgccacttttcaaagggaatgcttccagtttttgcccattcagtatgatattggctgtgggtttgtcatagatagctcttattattttgaaatacatcccatcaatacctaatttattcagagtttttagcatgaagggttgttgaattttgtcaaaggctttttctgcatctattgagataatcatgtggtttttgtctttggttctgtttatatgctggattacatttattgatttgtgtatattgaaccagccttgcatcccagggatgaagcccacttgatcatggtgggtaagctttttgatgtgctgctggattcagtttgccagtattttattgaggatttttgcatcaatgttcttcaaggatattggtctaaaattctcttttttggttgtgtctctgcccggctttgacatcaggatgatgctggcctcataaaatgagttagggaggattccctctttttctattgattggaatattttcagaaggaatggtaccagttcctccttgtacctctggtagaattcggctgtgaatccatctggtcctggactctttttggttggtaagctattgattattgccacaatttcagagcctgttattggtcttttcagagattcaacttcttcctggtttagtcttgggagggtgtatgtgtcgaggaatttatccatttcttctggattttctagtttatttgcatagaggtgtttgtagtattctctgatggtagtttgtatttctgtgggatcggtggtgatatcccctttatcattttttattgcgtctattgattcttctctgttttcttctgtattagtcttgctagcggtctgtcaattttgttgatcctttcaaaaaaaccagctcctggattcattaattttttgaagggttttttgtgtctccatttccttcagttctgctctgattttagttatttcttgccctctgctagcttttgaatgtgtttgctcttgcttttctagttcttttaattgtgatgttagggtgtcaattttggatctttcctgctttctcttgtgggcatttagtgctataaatttccctctacacactgctttgaatgcatcccagagattctggtatgttgtgtctttgttctcgttggtttcaaagaacatctttatttctaccttcatttcattatgtacccagtagtcattcaggagcaggttgttcagtttccatgtagttgagcagttttgagtgagattcttaatcctgagttctagtttgattgcactgtggtctgagagatagtttgttataatttctgttcttttacatctgctgaggagagctttacttccaagtatgtggtcagttttggaataggtgtggtgtggtgctgaaaaaaatgtatattctgttgatttggggtggagagttctgtagatgtctattaggtccgcttggtgcagagctgagttcaattcctgggtatccttgttgactttctgtctcgttgatctgtctaatgttgacagtggggtgttaaagtctcccattattaatgtgtgggagtctaagtctctttgtaggtcactcaggacttgctttatgaatcttggtgctcctgtattgggtgcacatatatttaggatagttagctcttcttgttgaattgatccctttaccattatgtaatggccttctttgtctcttttgatctttgttggtttaaagtctgttgtatcagagactgggattgcaacccctgcctttttttgttttccattggcttggtagatcttcctccatccttttattttgagcctatgtgtgtctctgcacatgagatgggtttcctgaatacagcacactgatgggtcttgactctttatccaatttgccagtctgtgtcttttaattggagcatttagtccatttacatttaaagttaatattgttatatgtgaatttgatcctgtcattatgatgttagctggttattttgcttgttagttgatgcagtttcttcctagtctcgatggtctttacattttggcatgattttgcagcggctggtactggttgttcctttccatgtttagtgcttccttcaggagctcttgtaaggcaggcctgttggtgagaaaatctctcagcatttgcttgtctgtaaagtattttatttctccttcacttatgaagcttagtttggctggatatgaaattctgggttgaaaattcttttctttcagaatgttgaatattggcccccactctcttctggcttgtagggtttctgccaagagatccactgttagtctgatgggcttccctttgagggtaacccgacctttctctctagctgtccttaacattttttccttcatttcaactttggtgaatctgacaattatgtgtcttggagttgctcttctcgaggagtatctttgtggcgttctctggatttcctgaatctgaacgttggcctgccttgctagattggggaagttctcctggataatatcctgcagagtgttttccaacttggttccattctccccatcactttcaggtacaccaatcagacgtagatttggtcttttcacatagtcccatatttcttggaggctttgctcatttctttttattcttttttctctaaacctcccttctcgcttcatttcattcatttcatcttccatcactgataccctttcttccagttgatcgcatcggctcctgaggcttctgcattcttcacgtagttctcgagccttggctttcagctccatcagctcctttaagcgcttctctgtattgattattctagttatacattcgtctaaatttttttcaaagttttcaacttctttgcctttggtttgaatgtcctcccaacgtagctcagagtaatttgatcgtctgaagccttcttctctcagctcgtcaaagtcattctccatccagctttgttccattgctggtgaggaactgcgttcctttggaggaggagaggcgctctgctttttagagtttccagtttttctgttctgttttttccccatctttgtggttttatctacttttggtctttgatgatggtgatgtacagatgggtttttggtgtgtatgtcctttctgtttgttagttttccttctaacagacaggaccctcagctgcaggtctgttggagtttgctagaggtccactccagaccctgtttgcctgggtaccagcagtggtggctgtagtacagcggattttcgtgaaccgcgaatgctgctgtctgatcgttcctctggtagttttgtctcagaggagtacccagccgtgtgaggtgtcagtctgcccctactggggggtgcctcccagttaggctgcttgggggtcaggggtcagggacccacttgaggaggcagtctgcccattctcagatctccagctgcgtgctgggagaaccactgctctcttcaaagctgtcagacagggacatttaagtctgcagaggttactgctgtctttttgtctgtgcccttcccccagaggtggagcctacagaggcaggcaggcctccttgagctgtggtgggctccacccagttctaggttcctggctgctttatttacctaaggaagcctgggcaatggcgcgcgccctcccccagcctggctgccgccttgcagtttgatcttatactgctgtgctagcaatcagcgaggctccgtgggcataggaccctctgagccaggtgcaggatataatctcctggtgtgccgttttttaagcccgtcggaaaagcgcagtgttgggttgggagtgatgcgattttccaggtgctgtctgtcacccctttctttgactaggaaagggaactccctgacccgttgcgcttcccgagtgaggcaatgcctcgccctgttttggctcgcgcgcagtgcgctgcatccactatcctgtgcccactgtctggcactccctagggagatgaacccagtacctcagatggaaatgcagaaatcacccgtcttctgcgtcgctcacgctgggagctgtagagcggagctgttcctattcggccatctttgctcctgccccagtagttccatgtttttttaactgaatggaacaaaatgtttgaaattgtttgaatgtttgaatattctttgggcttctgtgaagataaaatattccaaaagcgcttgtgagtttttaagattcttgctagcaaggaaaaatagcccactcaagccagcttcattaaaaaaggagtgtttgctttaagtatgtgtcctaaaatgcgaaggagggtatgtcagttagcttttgctgtgtaacaatttttttcgaaatatagtggcttaagactaccaccacttggactgggttcagcttgacagtaattctgtctattttgtctggactcattaagacatctgatctcagctgctggtcaagttggcacttctgcttctggattggctggctgtcagccgacatgataggaggccttgggccacatgtttatcatcctccaggctagtccaggcttgtccaaatggagatctccagcttccaagagcaggtggagggcaagctccaatgtacaagtgcttttcaagtttctgtttatatctcatatgcctctacccaaattgagcaaagcaagttttatcccagatttaatgagtggagaaacagatttcatcttttgatgggtggaactgcaaagtcacattgcaagggaacggaaacagagaggggaagaatttgtggtcattttgcagtctaatataatggagctgggtttcaggaatgcacagaaacctaagtgtcgttaagactgcctctctcacttgtcttgctctctgttttgcttgtctgtttcattcttcttaatcttcagaccagcttcctctacttctctggtctccattttagaaaatatggctgctgacagcttctatgatcatatgagatagacatagatcgcttaaaactgactctttccccattgggaagatttttctgaagaaggaactctagaaggggaatctggttagtgtcttcagccaggtacccactcctggatctatgaatggtgataaagcattttgttgggtggatgggagattgggtgtgtgtgtgaatctggcaattatgagttatattgttataaccttgtggtattaatagttggaggtagagtgctaagaaggaggaaaaagagttcagtgtccccagaaaagtgtagagatgggaagagggtggctagacatctcacatgggtccattacgatgagttttataactactgtattaatttcaggggattgagagtagtggctgggacctgggaggaacgagatgatgaactaaaaaccagtatggaagggaggtacttgagccacgtaaaggggtaaagggtgttaaagaaaaaaatattcaatgatatttgttaaaacatggcaaagcaggctttcttaaggaccattgtgatgagattttgcaatgggagagagaaattgggctcaactctgaatacagcatggccaaatgggaagttatagccaaggagcagggtaggagccagtgaatgggaaattaaacatcaggagtaatgaggattccagctaacctgacctaaaaggattcttgctgaatgcaggccaaggtgatcagtcattacctggaggatgttggaagatgaggaaccttatcagatatcaagggtgatcagatattgagggtggggtgttctcactaaactgatttagcaaggtgaacagatgggcctagtagctggttcaggagcatgactgaagtttgggcaagcaaagaatcgttgtcaaggtcttctgtctccagagtctcagtccaatggggaataccaatcccttcaataatggcagcagtgtttctagtaacagactgggaaatctgtttgggtatgtcttggatggttttatcacttaaaccctttttcttctacacataatgccatttctgtgataacatgttatttctgttttactggaattttctagttctttatttcctccttttcatgttggtcatattatagatgttttgatagttattggcatatttttcttgaataaatcagaaaaatggaaagaagtaaaatccttacttctttcatatttttatcaaagaaggaagttggaaaatattgactataatgaattttctagattttttttctgtatctcagcacataaacatataaagaagaatgagataggtttttctgttataaaactctgaatgaagcaaaagaaagtgatatttcactctccaagatttgccagtgtcatataatgactgcatagttccaggattttaatttggtacatattcatttatcaggggaagatttttgtctctgaatatggtgggttagcagggaaatggggagttgacattgtatattcatttgttcattcattcatttattcagcattcatttatcaacaaatagtttaggtattagagatacaaggtgaacagaatgactcctcccctcatggagcttagactaatggaggaagactaatattaaacaaacatacacaaatatctgtacacagattgtgataaatgttatgaaggaaacagattatgagagagaacagggagaacccaatttaaatggggaagagtagttttgggaaaggctttgtggtgtcagttgagatgtaaaagctgagttgcaggtacaagccaaaaattactcattttttaaagtcactatgtcatatgtcaatgtaaaatgcagagtgttctagattgctttgcagagctaaaacttcagctatagaaattagtaatatatccactgaaagatgtggatagaaagaatcatgaagtaagagagaaagtgagcagagctgcagtctgaggcacaggtggtgtaatgtaaggacagtggctgatgttgcaggctgctgtttggtccagtagcagggagcccattatccaccttgcaaagcagccagccagggttctatccttactggtataccttagaaatgatcagaaatgatcatcttctttttctccccttcttctactgtctctctttagacaatgttagcatcttttgctccatggattggcagtgtgtaaaatggatttattttctagcaaattaccttaccaattgggtacatctcctggtctaggttagtttttgttccattagaaattacttccctctcctttgagcccttctaccaatagtgtgctaaactaaatgacatttttatatttacatccaagatagtgattatgcaacatcatctgcaatattgtttctatttttatctaagttttgttaagcattgtatttataacatttataatttgggggagtgtcaggagtaactatatgtaggtacttaaggaatgaaaatctggagaaagagattacaatcatttatttttcaaaggataggttttctaggtcagctttttgccttatggattagagtgtacttgggctgtgatttgtaattagattgttcatgaaagttattggttgtcagcacttcttttggttctcccatggtgtgtagcatagagccgcaaatatatatttaaaaagtgctgtacaagagatcaaatgaatctgcccctgaggtacttcttccatagggtatattgtgcagtgcaaggtcaggggcctggtagattgcatggagggtgaaggtgagctcttgtggtagtctcaactcagcataggcctcataaacatggggagtagagttgtgcccaagaacccacattttggaagacaggacaaaatggaaattctctactgtttcatgaagttttccttttacttccctctcctattttgcaaagagcaaggaatttaacccttttgtttcagcatttctacatacattttcatcttttgtagaacagaatatttataaatttttaaaatttggaggaggacaaggaagtatagtttttccctaggaattgaagttaagacgctgctgtctctgaaccccagaactcaggggccctctccctatgtgcatttttattccactcacctcccaacttgagatattaataggagatcattttctaccctctgttaccatagtgatctcactgcttcacaaattagcccttttcattcttggaccactctaatcattggaaagattttccttctatttaatcaaactctatcctttctatctatatatccccaattgtctcctccttttgatagtagaatcctttgaagtttgaaggaaccgcttgtgcgtcctcttattctttctctaagccacacatccactgttgtttcaactattccttatggaatatggctactggacctcctcaccattcttgctccctcttcttagaatgtactcttgtttatcatcgctcccctaacgtaactattcctcccatctgctatgtctcagttttttattctatttgtaccaagtgcctattttctttatgtttaaagtgtctaggaattatacaatccaaaatattcagtaaggttaataaattagaagtagaaaactaggacaaaagaaaagaataaaaacataccaactcttaattacttaatgtaattgttttgtttaatcttacttactaagattcctggaggccaaggtgaaagggcaatagtaagttatagaggtctcatgatcagaatagaggaatcattccagttcttcagaagaggcagtattttccctgggggtgctaaattctgaaatgcatttctcacatggattctttagagcacataaaatataatgaaaatcacctctgcaatgtctgaaaacaaatgcaagagtggtgttcacatgactctttcttataatgaccttcagtagatgctctgagcataacatttgagcacagtgcagtaaaatcaatttatttcatgtaacaactcttggaacaccctcagcatttcctgaccctaaagatgcttcccactacatgtcaaagtgtttgcgaattaactattgtatacataaaaccctttccccaaggcaaatgtgtacactgagatatgtatttggttgactcggattatgattcatagaggttctttctttctctttcgtttgcatctatatctgtatgatcagatccatattaggaaaattagcaagtattctcatagttattattatgctagggaaagaaatagtaactagtcatcgaatgcccctctcttcttgtcattctctaggagagtccagattggtttaccactagaaatcctgcagttaggacctcaagagtgggacaggactgttctgctcaaaacacagtataaggaacccttcctccagggaataggagggttcctctatccatgggaaggaacatgcaattccaggacacgcttgccaaaccacagagattgtaagcctgccgcccatccattattatcattatttagcatttttagaaggttagagccaaaataagtattctgccagccaaaggagtgacaccagcctttaccacaggcattggaggccccgctggtatttagtagctgtgacttgggtcatattattgtctgattccatcaggccggccaggctcctgcctcctgttggctttccccaacaacttttttttaggcagttttttctcccctcttctcctcttcccagtagtagttactttggtatgtgtttgctgactattccctccaactcccaccctgtgttttctaagaatttaaacaatgaaagggattcagtcaattgtgctagtgagagataagtatgcagggaaggctttgggggctcctgaattttgggatcctggtctactcctgaaacctttccctgagagataaagtatagtattatgcttaaaagcatagaaccaagactctgagctcaaattctggctttgccacttactagctgaatgatcttgggcagtttatttaacctctctatgcttcagtttcttcattataaaatggatttgaaactccctccctcacggatttgaaactagatagaacacaaaaagtgcttagaacagtgtctgaggcattgtgttagctggcattacaattattgggctacagaaatcataccaagctattagccctatattgagatcactctgggttgcgaaacaattaagaacattgggatctttgggaggaaactatttgggaattgtgtttggaaatggataatggcaaagccctccaagcctcaggccatccagcaacgtacacgttttttaacttgaagagaaaatggaggaacattttgatgaatcagaaatgtctgcctcctagaacttatggtcaacttaattgttcattctaatgaaaaggagtttcagttcagatatgcataaattgtgctccattggctcaccagggcccaattttgggcacagcctgtttcctgaagcagaatgacaaggtagcttggtggacttttgagccaggcctttctggctttgaatcttattttaggtcagcttattgacctttttgagcctcaatttccttctctatgaaatagagaagttacaattctataaaaagttataattctttttctgggttgttttgtaaattaaataagatgtacaaaataccctgcacagtgtctagccctagaagacatttggtatttgtcagctttcttcacttttttgttaatattctttcccaatttgtttaatttatcaagaaagccttgtcatgtaggaaatcatttaaagagctgtttcagatttaatatgcatgcagatcacctggggatcttgttaagttgcagattctgattcagtaggtctgggatggagcatgagattgtgcacgtttaaccagttcccgggtgacatcaatgctgcgtgtgaagactgcacttggagtagcagagtatactgtactcttttctccctttgcatctcattattaccttttagattcatgttaatattttaacagttttaccacacacatttgcacatccagagtcatcatctggagaaatatccaaggttgtacattgttaggtactaataagattcctcctcatgcagtacaggccgtgatggttgaggtctagaagaaacctatcatagacatttccccaggattcccatgggcctaggatcccaaagtgtttgaataaaatactttgctccagcctgattgttgaaggtcccttctcagaatctgggtccctctgtgacttggattgcagatcagttaggttaaggaagtggtctttgtctttctcttgtcgacaagtctggagggagccactggaagactgtgcttctgccctcactgagcacctgagatatttttagagccccatgtcccaactactagctttctccaggttcattagatcacgttctctccactgtacacagatagaagagtgtactgttgtccttttgtgatacacactttctgagcccattgagcttttataggaacatacgaatatccagccctaagaactaaaaacaagctatgtgtgaaaaaagcatgagtgcttaatgcaaactctgagtgcttaatgcaaactctgtggtgtttctacatttttgcagatttcttagattgactttggagaaacctcctcactgttgttgtttttttctagtttctgcttattttgatatttaaactccttcctttctttcctgtattatttacaggaacttttcagcctgaaccatcagggtcatttgcatctgctgtgcccagtttgggaattggctgtctttgtcctcaggcaacttttcttgaagtaaaaaatgcgaaagttgctaattcctttgcattacatctcttaagttagagatgtgaagaagaaataatagcctccttcttgaaaaaaaaatattagaacaggcttttttttttttcccttacaaagtgtctgtaagttagagcttgttcatcagccatgtttcaaaacaaagcaagtctgcttcagtctcttttagagttatcttggtgccatttcatggagaacttctctgtcctggatgggctctacctaatatgtttgccaacttggggaagaatttgaaaatagccccaggtaataacctagaaattttgaaagttagggtggagaaggattatagagggagaaaatagagaaaatatttgaggtaaagtcagaggagccattaatgtttttactttatctagatgaaacagtcagggttgtaacagaaaacagatggcacactcaatgctgaaggacagtttatttcactaggactgtttacaaagatgtgggtttaggggacacccaggactagttgtagctgtgctgttgctgcccttgggcctgaaggtaccctcgacagggagagacatcactttactctccctcccttccccatttcctgccagagtcctctgttagaagaacctgatgggaagcagagagcaccggagcctgttgatgcacaattatgcattgcttaacaatggggtaatggactgagaaatgtgctgttaggtgattttgtcattgtgtcaacatcatagagtgtactaacacaaacctagatggtgtagcctactacacacctagtctatatggtacagcctattgcttctaggctatagaaccagtacagcatattactgtactgaatactataggcagttgtaacacaatggtaagtatttgtgtagctaaacataaaaaaggtaaagtaaaaatatggtttaaaagaaaaaatcatacagttatattgggcatttattatgaatggaccttgcaggactggcagttgctctgggtgagtctgtgagtggtgagtgaatgtgaaggcgcaggacatgactgtacactactgtagactttatcaacactgtccatgtaggctacactaaatttatataaaaatgttttccttcagtaataaactaaccttagcttgctgtaactttcttactttataaacttaaaattaaaaaaaatttttgactcttgtaataacacttagcttgaaacacaaacacattgtatagctgtacaaagtgtttctttatatccttattctgtgagctcttttctatttttaaaattttttaattttttaacgttttaaacttttagtttttttgttaaaaactaaaacagagtcaggatcatcaatatcactgtgttccacctccacctcttgtcctactggaaggtcttcaggggcaataacatggatggagctgtcatctcctgtgataacagtgccttcttctggcatacctcccgaagacctgtcttgagactgttttacagttaacttttttttttaataagtagaagacatatgctctaaaataatgataaaaagtataataaatatgtacaccagtagcatagtcatttattaccaagtattatgtactgtgcataatcatacatactacacttttatatgactggcagtgcagtaggtttgtttacatcaacatcaccacaaatgtaatgtgatgttacaacagctctgagctatggtgtcactaggtgataggaattgttcagttccgttttactcttatgagaccactccaaaatgcttttgtgcagcacatgactgtagttcatcctgggcagccttctggggcagatagcaggatgaaggcaagtggacagatctggagaggcaaacagaagctgtcactccaggtttacattttcttttggaagacttgttcacctaaagacactatcaatattgtgagctccttgagggcagacactggcctattcacttatctgttaggtcactatttaaatgattgttgaatgaatgaatgggtctgtttatttccttcctttctcttgacttgcacttatggcagctgactataacagtataattttgtcttggttagagccttgtgttctgaatagttaggcttcccataggcatggttaactaactcagcgaaacattccttccagtgtaattcagcttttaacaatctcattattaaaactgctaaacaaaaacaggtcactgtattaatatcttgagtcttttgtattattattattgtttttttgtggatatccaggtttagcgaggcataacattcatgaatctttcgcccttctcagtgctaatcagttagatttaattagattctctattaaattgaaccctgttatttcatttctcctcttacctggagttccactggcatgcagatggataaactttaatttaggaagcccacaaggcttttgtttcctacccaggctgcttcaagagaaccacacaaagggctaaagtagcttcattaactatctttagtagctttaaaagaagatctgtaaataatgtcaggtgtctcctaactgtccagagggcagaagtctgaatagacaccagcttattggttacacactttggcaaagtttcccatgcagtcaaattgtcttccctaatgattctcagtcattagggttttgaaagaagggatagagagcaaaatgtcacaagtgactagtttggaagtccctgggtttcttgtggtgctcaagtgtaagagcaaaagaaaatacatggtagagacgggagtgaaccccttcttcattagagctttgctgatctagcttgagggttttcaggttgtgtgtttgtgtttgtggggtacagtggaaaagccttagaatcacttagccatcaggtagaaatatgcctttgtcctttgctaaagagaatggtgttcctgaattcattttgatctatccatgaagttagcttccagtatgcttcttttctttatgcttttgataatgttcttttgatagctactccttattctcatgaaatctattgagattttacataatttaagtaggtatggagtattgattcagtgtctttgcaagtcactctgtctgattataatccttggaggacattttatggttctattttcagtgtcccaaaggacagacagaaaaagcatgaatagactcactcacatgtctccctcacatcatccataatgacagcattctctgcttccttttacagtgtagtgctgttaaggcaccagatcccttcattaatggttctctgagttcaggtcatgctatctctggcttaggccatgggcctagctaatttatttattaattatttattatttctttgatttctgtgggcctaatttttgtttaccatcagaagaatgcaagcttttttcttaatagaatctgaggttttttttttttttttttggtttttgtttttttaaccttttgtttctagtttctttttttcttttctttttttttttttttttgagacagagtctcgctctgtcccgcctgcaggctggagtgcagtggcgcaatctcggctcactgcaagctccgcctcctgggttcacgccattctcctgcctcagccactcgagtagggcgcccgccaacacgcccggctaatttttgtatttttttttttttttttttttttttttttttttttttttttttttttttgagacggagtctcgctctgtcgcccaggctggagtgcagtggcgggatctcggctcactgcaagctccgcctcccgggttcacgccattctcctgcctcagcctcccaagtagctgggactacaggcgcccgccactacgcccggctaattttttgtatttttagtagagacggggtttcaccgttttagccgggatggtctcgatctcctgacctcgtgatccgcccgcctcggcctcccaaagtgctgggatgacaggcgtgagccaccgcacccagctgtttctagtttctttatatatcataaccatttaggatttgacctttctggccgggcgcggtggctcacgcctgttatcccagcactttgggaggccgaggcgggcggatcacgaggtcaggagattgagaccatcctggctaacacagtgaaaccccgtctctactaaaaatacaaaaattagccgggcgtgttggcgggcgcctgtagtcccagctactcgggtggctgaggcaggagaatggcgtgaacccgggaggcggagcttgcagtgagccgagattgagccactgcactccagcctgcggacagagtgagactccgtctcaaacaaacgaacaaacaaaaaaggatttgacctttctgcttatggtactggggtgaagaggtagggccgctggggaaaccagctggtgggcctgcagttgaatattttactacaggcatgttttattttgtgagtagagactccctgcccctgtaagtagacccaaatgctttaaatcgggcatagggctgggtgcggtggctcacgcctgtaatcccagcactttgggaggccgaggcgggcagatcacgaggtcaggagatcaagaccatcctggctaacacggtgaaaccccgtctctactaaaaatacaaaaattagcctggcgtggtggcgggcgcctgtagtcccagctactggggaggctgaggcaggagaatggcgtgaacccgggaggcggagcttgcagtgagccgagatcgcaccactgtactccagcccgggcgacagagctagacactgactcaaaaaaacaaaaacaaaaataaaacacaattggacatatattttcctgtttgcctcaggcttcattactccttaatgttgaattggctgttttagaggaatccagattctttaaattctctttccctgaacacttaaaaaatggtcttgtattctatagtaattataacttgtctttacatttggcttgggacttggctgcttttttatgtaaatcagatgattccttattcatcatgtaaagataacaccaactgtgtagtactttagagcactataaggtgcttttatttgaagttttaaactttagtttcttggatcattacaataatcctgtggctagggaggtgggtatttttctccttattatggataggaggtaatatatggtggtggttaagattatgggtgctggagtcagatcatttgagtttggattatatctttaataattactagcctagtctcagctaataaacccactcagtttcctaatctgtaagccacagagacctattttataggtgtattagtccgttatcacactgctgtgaagaaatacttgatactgggtaatttttaaaggaaagagatgtaattgactcacagttccacattgctggggcagcctcaggaaacttacaatcatggcagaaggcaaaggagaagcaggtactttcttcacagggcggcagggcggagtgagtgcaggcaggggaaatgccagacacttataaaatcatcagatctcccgagactcactcactatcatgagaacagcatgagggaaaccaaccctgtgatccaattacctccacctggtcctgcccttgacacgtagggattatggggattacaattcaagatgagcttttgggtggggacacagccaaaccatatcagtagggttgtgtgagaaataaataattcaggcaaagcaattagaacactacctagcacataataagtgctcaataaaccttaactactaaaactattagcattgttaatagaatatgaatacatggaaaaaataattaataagcataaatttctcaaacttctcaatgttctggttttttcctcttaagagggaggatacttaaattttggtgaatctcatttgtcttttcatatccctttgaggtagtgaaaaatagattacatcatctccattttgcagggactggttgaagtccagtgagaaaagaatacaggctttggagtcaggtgaggttcaaatcctggcacttccacttctggttatatatctctaaacctcatttttctcatgtctataatggggataagcagaactttgtttggaggtttgaaggagataatgcttacaaaagaaataatgcaaggtacttagtatacttaccacatactgtgactcagtaaatgtggctgttattgctgttgaggggaggggactttttacactggcccagggtcacagttagttgggcacccaggttccatcatctcttacataatgatgaatgtactgcttcatctgggtatgttgtttctctacattttaaatccaagtgttttgatcttttggttactaatttatttttaatgtacatattatggacactggctctgtgtgtcagcagactatgaacaatgcctattgcatcaaaatcctaagtttacctcatgtcacaagacaaaagttaatgttagtgaatccacatgaccaacaaggaatatgacacttgcagaatctgtcagatggtgtttgggcagctattctcagaaattgaaagcagcaggtgtttattaatatttactatgtgttcggcattatgtgaagtaggggacacaaaagaaacaccatactttattcatctctcacaagaaacagatgtgatagaaacatgaaacaattaacaattaaggagcaataataacactgtgattcacagacatgtagataaaaagacaagtagagccacacttaaagcatattcaatacatgataatagagttattaacagggagtgctgaggaggagttatgtggtatgtatgcatatgggtggtggtgcaggttccacggcaaggtgctgcttgaattgttgactagttgggaatgcggtggggagtattgagtgaagagaatggaaaatcatatttgtaaagacaatgagatgtgaaagagcctgcggtagtaaagaacagcatttgtttagtatccctcatggctggagcttaggatttacaggaggagtggtgggagagcaggctggagaagtgcactagggttaagtcattaaagaccttgtgtaccatgctgtagagtatgagcattaaggtgttggcaaccaagcaggcaagagatgattatatcagtttttcagaataattattctagaaacatcatatagtaaaacagaaataagggcccgaataaagtcttacaataaattaaactgaatagatgaatgaatgaatagtagtgtgagtattagacgatactaacttaaatgttttaggagtttagaaaaaggggacaccatgatgggaataatattcgaagaagactccatgatgaagaaagattttttatttttttatttttttttgagaaggggtcttactctgtcaccaggctggagtgcagtggtgcaacctcggctcactgcaacctccgctgcccaggttcaagagactctcctgcctcagcctcctgagtagctgtgactacgggcatgcaccacaatgcccagctaatttttgtatttttagtagagatggggtttcgccatgttggccaggatggtcttgatctcttgacctcgtgatccgcccacctcggcctcccaaagtgctgggattacaggcgtaagccacagtgctgggccatgaagaaagatttgagtggtcagcccagggatttatctatagtagctagccaataaactggatattggacaaaagtacaatttatacaggacagaagacaggaagtaataccaagttgcataaacatgtgtgaagtggtcaaagagacaaatctaactggataagaatggtaaatgatacaatttcgtatgcataatggtcccagattttggaagccttcgaaatgcctggttgaggcgtttagatttatttcttaatcaataggaagccattaaagattcttaaacagatatttcaagattttcagtttgggttagaacatcttggttggaggaagatgagcctgatgagatgacaccagttctgattcttacatttaatggaaatgccagagagacttcattacttttggacaggaaaataaagtttaatgaccccactttggttatgggtagactgtggaatagtagttcactgttgggagacaaaggaagctgaggcaaaaatgaatgattgcccatatgagattttcagtgataccagtctagggaaggatagagtaaatagaaagatggtagaaactgcttgctctgtggagactattagggatggcgaaaacatagtgtgcacggtcaatatcttattccatacccatagcagacattgttaattgattttggtatattttcctatagtctggagccctttttaatgcagtgctccaggcaggctactattagttgatcagagttggtgctggaattcaaacctgtttgtcatgcctgtagtaagaaatgaatgagaaatgggttatgactactcacagtacaaatcagtttttacctttccaggtggaacttgcagaaatctgtgccaagagtgagcgttacattggcactgaaggaggaggcatggaccagtctatatcatttcttgcagaagaaggaactgtaggtagcattccaagtaggaaccattcagaaattcctagtgggaaaatttacatggagaagaaggccctgagagccccaggatgcttggttatggacagcctactatattaggctctattgtaggatattatttcccaactgcttgtaactcaaggctgccaccagttaatctactctatttcatgttgattgcctttctcttacgcttccagaatgatactcaggtctgtttttctcatgtgtctagctttttcccctcttctatttttcttcattgttaagatgagctttctcaattccctagttattggaacctcatttcctgctcctatcctaaatcacttcatctcatgcatttttataatctcttgttggttttaaacccaaatcatagttctcttaccacatatattcacagtccctctttttataatttactctttggtatcatttttcctgtcaacatttttggggcttcagtggtgggaaaaagaatgttgccagtaagccaggaatgaattccttagctggataccgcttccccttggctatcaactcctttaggcagagcagaggttttagttgttgctcataagctgctcatttccaaaatagagcaaacatttctttaaaacattttcttagtttttcatcagattcctacaggcttggctattttccaagaacacctggattccttcttagtaagaatatttgttattgattcccctaagccaaagacatgaggcatgaggaaatttgttttaatactaagaaaatactttgggtgttttggatgagacgcaacaggcagacatgagggccagagtcctgatgttaatgtaagttagctatagagtctgaacacagtctaagttctttgggcttacaaaacacttcaccatctgacccctgctttacccttctatcctaacctctcaccacttctcacccctcaaactgtaagctctaaccaaatttccatgcccgtagctccattaacattccatgttgttttttgcccctggacttgcctaagttcttccctcttcttgacatgctttttgaggaaagaaaccctctgtctgccctacttttttcatcttttagaactcagtttagatttctctttttcaactgagtggaacctacagtaggctgtactgatgagatgcttcagctatgtatccatatagcatctgtgctttgctaccattgtaacacaacttggaaaggtatttgtctgtctactagactgtctttcccacttgattgcgggctctatgagaggaatgacagtgtctttcctgttcactgttgtatttccagtgcctagtacagcgcctggaggtcaataagtaatatttgaatgaatgaatgcatttttgacaaaacactttaagataaatacataaacacttgaacattttctgcattctaataaattatatttctcctttcatttttcttctaacaggccaagttgatagaatttagtcctctgagggcaaccgatgtaaaactcccaagtggagcagtgtttgtgattgccaacagttgtgtggagatgaataaggcagcaacttcccatttcaatatcagggtgatggagtgtcggctggctgcgaaggtatgaacttggcaggctagtgaaacttgaagtagggtttttcttgtctttattttcattgttctctattactttatctctttccccaaattttagggcaacattctgactgcacagcattccaactgaaggtctttgggtacagagaaatctgatttctaactcagaagacagatgaaccagttgagtcttctggggtggcactgggaagaaaagggcagcttatatatgtgaagcagaattataggttaggtctatgggtggagaaagatagttggggacaattgatgggaatgaccacagctggtcttgtttcctcaacaaaagtgatggcagcctcacccctcctggtcctctaagatgcagtttttttattgggttatcattcgttactccaaaaatacaggattggtgaagtccccccagaccccgtacccagaaagaagatttttacatgtctactagggaaacacaaaccagcagggagtcttggaagtctctctttagaaaactgccacagttaaaccttaaatctatttaggtagtattcattgactagctattgtagttctagcggcatgaagatatacaaagggacataggacatgggactagagagagtggacagtagagttaagagttcaagttaagggattatgaaacaggaaatggttaatatgtgatcagatagtaagtaatccagtgatccaacaagtgacacagtaattaaatattataaataatccagaatagctcataatacgactagaaagttggagagaggactgaggctggaggctaggaagtggattctgggtcaggagctccactgtgctttcttccactcttgctttgatctcctgatggatactgatggatatcacctaagacttatgatcaacctttaccaggtcttaaatacagcctgaaatctattttctcagtagtaataatttcataccttctttacttctctcaaatacccattacttgattcagcctaacttccaaaagtgattttctcccatatttcatgttggaaatagatgtggtcacatagactttggcttcctgtcatcatatctgtatgtctctctatatctgcatctcctgtcaaagccagcccttccatgtgtggctgcagggaactcactccatctttaacttgttcctcgcctctatttctctactaaatcctttctatcagactccacctattctagtattttgtattagaaaagtctaccctaagcctcacaactctctccatctactatttctatttctactttttcattctcttcacagctaaacttctcaaaaattgctttatatatgttatctttactcctctacctccctcttattccttaatttactaaaatctcacttctgcgttctccacaatgttgaatttgctctttcttaggccaccaaaggttttttcattggtaaatccagtggatgcttttcagtcttcatcttatttctcattgttatttcttatctttcaacagagttaaccagtctttccctcttgaaatattctcttccttaggtttccagtatacttcacttcctgttttttcttttcccccttatatttttgttgctatttctttttagttttagccattccctccaccgacccaccctgggcagggatgaagggatggcaggaattcactcctcctcccacagatgtttaaatgttggtgttcttcaaggccttggccttggtcgtcttcttctttctagtggtctttcttctgttggtctcatgccctcagcttcaacttccatctctatgatgatgacttcctaataaacatcttcaactaaggctttcttggttgagctccaaacctctatatcccatgccttattgaccatctttacttgaatgaatcatagacctctcaaactgagcatgttgaaattgaactcagtctttcacagaccttatatttttccatcggtcccatcatcacttattgactatcacattagccttctcactgttccttaaattcatgctcatctctttcccaatcattctttaaataacagcatgacggcttagaaatttaaatctgagcaatttaaattcccctgcttaatacctttcaaaagcttcctatttcgttggaataaagtaaaaggtccatatcacgacctggagagccaccatatctgagacctgtgcacctcatcctcttcatctcttagcatcacctgctttccttacactccagccatgagactcattctcatctcagagactttgcacctgcccaggacattcttccttcagccctctttgaagtcttagtctaaatgtccctcaaggaagccttccctgacttccttactcctagactaagttagagccccctttatattttgaagcacttcatttttcagttatggcacttatcacaatcatttatttaatgtctgtctcttctttcagattcagttttacctgagagctgaggctgtgtttgtcttgttaactcttatatccctaatgcttgatgtgatgcttaagctgaagagacacaggataaacatttgttcaatagatgaatgacaactccctgtatcacctgctctgtagtttattttgcacaatttcacagttttttacaagtacctattgtatgcttagcactggcctagatcctgtggaggtgtgtaaagtatagttttcccttgttactgacttagcacttctcctcttacttctatcctctgaggttgggaaattcaggaaattagagatatactgaacgaggaaaataaaagctttttgtttctggaatatttggggggcatacattttttgaaaaattatgatttaaatgttttgaatttttaatttacttattaagatagtgtctaaaaataatgtaatagaagtgctttaacattgaactcttcatagtatttgatcagtgcatatgtgcagagaaacagttctgtaaactttttaatatcaagggttcaatgaactttttttcttttacgacacacttcctttttcaggagatggaagaaattagtgtcttatttgtttgagggcttagtcttgttgaccttttatcttgaggttgatgagtaagtgttgccttcctaaggagacctcaaacatacacaacattgttttcaaagttttatcacgaaattagatatcctctaccagatccataggtgagctgaaacaagtattagacatgtaaaatcagttcatgttgtgactactctcccaaagatacaagaagaaaatgatggataaaattgtagtgctgagtctctgtagtaaaagttattgggatgtgggaatgttttttgagagttaactagaaaaagggcatctcctttggaagcagtagtagctgaagatcttaatccactgcagaacctcctgttcttgaggatgttttctcagtttaactgcgtaaccccatatgcattttagaggtactttggtcagcaaaattggcatctgaatttggctttttgctacacactcctcccaattgacgtagataaacacactgttttaaatactctgaatttttctcttttaaaatgtggaagaaagaaaaatgaaagactttatcaagatggaaaatgttttctaaatcatgttgctgcaaatcactaaaatcccaggttttatacaaaagggaaatgaagataaaactgctaatgtgcactttactcagagatattgatattaggaatatgcttttgcttaggaatataggctggaattctactaagcatattttctttgcaatatggttctattcttccatttttggcaacatgtgaatgaatataattattgtttgaagatggtctcattaaataaataacctctcatgtaaaaagtttaaaaaaaagcttatctcaatctgaccaaactttctgttttccaacaacaataatgaagtgtcagttgaagaatggctaatcaagatagttttgaaaatgagactgagactgatcagctagggctccacatggcaaagttgtaatgaagaacatttatttttcctttcttcctatttttctcagatccttttttgaaaatgagtacctttttttaatcaagttaacacagagaagtacactaaaccagtaaagacaatttttctttgttttgcattaatgctagcaatttcttctattctcaacttctttctcatcttgtttctctgtctctgtctctttctctccatcagctttcaaaagctaattcatgcaaattcataaaaagtcagagccttgtagagcatttgactaaaattaaaaatttttcaaagcaaactcgagatttataattactacttgtataaatgatatcttaatgaagcacatttttatgataaagtagccaaggatctttagtaggtacaacatttttcatattttacacacatttggggcttaaatgtttccagaagtgcttttcttatacagtatcccttagttatgttgaagaataaaatgtgtgatacccatgataagtattatgggaagtcaggtagggaagagaaattatactgttgctttttgcataccctgagctccttgtggcaacatgagaagcagtgaaagagagagtttcatatgttcctttgacacttcaaggaaaatttacagtgattctttacagggcctgtctggtcaggggccatcagtcacccagtttttcagctcctttcatttagtagttggtatgaaacttattctttgtctggtgatagaatgggaggagaagttggcataatagtctcagggttttggcagtttccttgaatttgagcagagaaaaaccaaatactcaagaatgtagccaatttcacgcagccagttgattcaatagtgcatactctgccaagactctggcatggagtattcaggcaatggtgagtccgagctgcatggcagaggacatacatactggggaataggggtaatgtgtttagtggaaccagattgtggcaggaccttcagtgctatgctcagccttacccaggcttggctttgaaagcagtggttgttagcaaggtattttagaaatattaatatgacagcaggagcttttgccttggttgaagagaagtaggtactagagtatcagtgaggatgggataaaaagggagagatgtgagagaagctctgactggacctagtaagggttgggtacaggctctctgtgattggatttttgttttccttctggcatatacttcattactttgaggaagttttccttgactacctcctgacctcagttaggtgaaacactcttttatgtgctcttaccatgtcctgtatttttctattatagcagtttatcataattggattaagttctttatgataaatgtagttttaatttaacctctgtcttttctggtgggctgtgagctgcacgtggtcaggagccatgtgtgccttactcactgctgtctgcctggagcctgggaagtaataggcactcagtagacactcactgtgagcagatgcacatgaatgaaggaaatgaagaaaaggtgttgagtcaataagggctgcagcttcaaggtgcaatggttggtgaaaagcatagtgctgccattgataggttttgagaaggcaggatggactagaagttgactaaaaagtaggagatgatgagaattcttcatgaatatcttaacactttctctaccataccctcttaccagaagacccagggagtctcagaccaagaacagagggcttagtatttttgtttgtgtctgggacaacctgaaagtgctagggagttaatatccttgagagccacctcaatcagtggtaactgggagttattgggtaaatactttggctttcttgcccatggtgggacatgactgagctttacacatacaggttcctgagaacctgtgatttgaagctcagcgggcccagactcacctgccaatatcagtacacctcatattggcgtcttttcctgtttcactttccattcctctcttaatgcttcttaggatcaccttcccctcaaattcttaccctcaaatttttgtcacagggcctgcgtctgagagaaaccaacctaaaacagagttttagcaccatttatcagtgcctctttccatgactgtggacaaagcacttgttgcctgcttttttgtccacagagcatggaacagagctcaggaacctctcagaagtggtatctgataggaatacttaatgtttgccatggtgaaaagaaagtggtgaatgtggacaaagaactgccttctcttatttccccaccctactactgagtgagaaagttgtgacaaaataacctatagccctgacttatagccctgcttcacaaatgtgaaggaggccagtcacctgggccacaagtgcctccatgaagctctgtctttgaacaatggtgatcttatccacccatttccttcatctgaaagtcatctttctgtttttcaagccaaatttcaaagggcttaagaggcttttctatttgactccctcaatgtagtgtaattcaacagctcacgggctgtgcagctgtcattgagggcatatggtagatttcatccttaattgaaatacacaccaaattggctgtgtggattctccagctgagggctcactggacaactggtgtcacagtaaagtgggatattgctggagtgaatgtgaactctatgttagtgcctcaatctgcagaagagcacatcaggaggctgcctttgaaaactgaatcttgtgggctgtagccatcccttgcagactttctccccacacatcactggcccagttttcttggatcaagtgcctggggcaatgtgactggttcaagagagaatgggaatgggaacttggagattactgtggactgaaagcttcttaggaagagcccactgtcatctcttgggggcagttctgtgatgtttttctttttttgtttggaaggaacccatttatcaaagtgtttttaaattactggaatgttcacttctagcacagatctaggtttgtgttttgaaatgcgtttctaagacttgatcggtgattttaattcatgtgggtaacatgatatagttatcatgcatacctcattgagaacgtggcctaggggcagcaagaaagagttataagacctggattcagtttccaactctgttattaactagttgagttactttgtttttttgttttgttttgtttttttgagaccgagtctcacttcatcacccaggccggagcacagtggcatgacttccgctcactgcaacctctgcctcctgggttcaagcaattttcattcctcagcctcctgagtagctgggatgtcaggcacatgccaccacgcccagctaatttttgtatttttagtagagacaaggtttcgccattttttttttttgctttttgttttttgttttaaatgacaccatgttccatgaaataattgaaccgaaaatcatagttctattgttttgtttcccagtttggccttaaaatcattaactcatttcaaatatacgagccagggttttaaaaagaggattaaattaatataagaacttctgttattaacattcttcagaagtcagtggctgtaaccagagtacaatagtcttttggtaaaccccgcttcctgtcaaaaagagaaaatcatcaacataatggaagagtaaatcagatgcacattttcttgaagactgatttccccttctcttgtttctttttgctgcttaaaatgcccctctgtcttcacacccaggcaatgaatattgtagacctcaggataagagaaatcctcactgttttgattgccacctactctgatattgcttggggagaatgacagaaatatattctggattggggttcccatgggtggttacagatttggtttgtacttaacccgcactgtcagattgaggaggtacctcaggatgcagttagaagccaaactctttttcttgagggtagaggaacatatagctctactaccaccagtgacctaatgaagtgcttcccataaagtcaccaatgaggttttcatttcaaatttaggactttaccccaaatgcccatataatgccattttcaaagagacatatagtaaacaggaagtaccctaattggatgtacagtatcctctcaggacccaggtcacatgagatttaagtagttttctcttgacttcctagggaggaatgcagtaggcatgaactgaataaggataaaagagtaaaattattcaaagaaacagccctgagggaaagtggtgacaggccaaaaaaaaaatcagtgagagattagttgtgtgtgtttgcgtgtgtgtgtgtgtgtttcaggacaaatacctacctagtctgtgagtgtaatacagacatgtttaattccaggcatctgaagccagtatgcatttccaagtaatggtgggaaagttggataggttgaaaggaaaacaacaacaaaacaaaaaacagcttaacgttgaatctggctaattaaaatagtacacatcaaattctgaatcaaaactgaccattatcttgatttgaatttgcagctcctggctaaatacaaaagcttgcaatgggacaaagtactgaggctggaggaggtgcaggctaaactagggattagtctagaagaaatgctgttggtcacagaagatgcccttcatcctgaaccctataaccctgaggagatctgcaggtgtctgggaattagcctggaggaactccgaacccaaatcctgagtccaaacactcaagatggtgagttggctggagaaagtatgatatatgttattccctcacttacagctggaaggtttcaatttctccactggttttagagaatacttgagggaatttggagactgtgttttggcaagcttaattatttagaatcttagcttcataaatgtattcattcattctttcattcaccactatgctgggtaggcaagggtgaatgagacatgattcctgtcttccaggggcttataattcagtaagcttctcttttttatcttttttttcccttatccatttttttctggttattatgctacttgtataaaaaatggactaagttagagaactgctctaactctgtgaaacaatactcggaacactataaagtgttcacgtcttaggttgaaacttgtggcctactttagtgtggaagcttatttctatttgtggtctgctttcaattaactttatttttataccaataacatcagaaactgagatgaagcccaggtaaatgttgcaggcacaggatggagtcttgggctggcttgttcctcttagactagaggttatctatttgtgacaaatcagtactgggggcaaggacatctagttaagatccagttgcccttagcggatggttatgggggatgagtaggagattaatacaaacatcagcctcagggacccatttctgtctcattcagttcagttctacaactggttgttgagttgctactgtagatttacccacaaagtaatgtcttaaaggctggaagtactgaaaactttgggatgagataagggaatcatttggaagtagggattgggttttagtttctaacactgtcgatccaatttaatttgatgaagcttgattgagtctttagaaccagaataagcaaactatggcctactggccaaatcaggcctgccatctgtttttataaaataaacttttactacaacacggccatgtattagctatggctgcctttgcactataagagttgagtagttgtgatagagattaaatagtccacaaaacctaaaatatttactatatggttctttgcagaaaatgtttgctggctctcgttccagaaaggcagtagactaaagtttaccttagttttgccatgaaaataggcgtaacaggaatgcctctaagaataatctgtataatgtgctaagaataatgcttggtagcagaggtactaatagagtgatgagtgtggtgatggagttgtacttgggtctagggagaccagaaaacaaagaagtcaaagccagcttaaggccgggtgcaggggctcatgcctgtaattccagcactttgggaagccgaggtgggtggatcacttgaggccaggagttcgagaccagcctggccaacatagtaaaaccctgcctctaccagaaacacaaaaataagccaggcatggtggcaagcacctgtaatcccagctagtcaggtggctgaggcatgagaattttttgaatccaggagacagaggttgcagtaagctgacattgtgccactgcactccagggggagaccctgtctcaaataaataaataaataaataaataaataaataaataaataagaccctgtctcaaataaataaataaataaataaataaataaataaataaataaataagcaagcaagcaagctagccagcttaactaaggagttagcaaccagccaaaagttaaataataaataggtatttcctaggtaggcaaacagtcagaaagaattccagtctgacaaaacagtagatacagaggcagaaagaagtgagagaagattatatgtccagggaactacagatagttgagtgtttcttgaaaataatgtacatagtagagaatgatacagtatcaggccaaggttgtggacagacccagatcaccaaaggccttattaaataatttgtgtgtgtgtgttgtataggtaatgtgggaggtaatcaatatttattgaatgaagaagttgggtaaggtattggatagggagaggttcaggggaattgcctttctcctttgacctgagatattgatttctttaacaaatcgtattgacttctgtggactggaaattgtgctagatgctgggatacaaagataatcaggacacagtctctactttatagtgacttagtgtctaattgggggagagtgccatacaacaatcacaataaataatacctgctataataaaggtatttatcaagaaccctaagagtatggagggaaaagtggctcaggtcctgtagatggtggttcaattttgagctggatccttagagaaagttatgaatttcctagacttagagagattaccagcctttccaggtggagagtagagcttgaatgaagacaaagtagcacaaggagtcgagtactggagaacatgcaccaagaggtattgtgtgcagtatgagttagaagacaaaaagactgcctaaaaggatgccaattaggaaactattgctctatactctatactgaatgagaagagcctgaagtaggatagatggctcaactggtagattctcaagactgtaaaatagaattcagttgcaattggcaattgctggtatctaggagtgaaggaaagaagaaagagaagaaggaggggaaggagggagaggaagaaggaagaaaggaagggaagaagaaaagaaatataaggtaaataaatccaaggtatggataactgggaaagttaggaaattatagtattgaagtgattttggcagtaagatgacaagctcatttctctctctctctctctctctatctatatatatatatagatagatagatagattcatctatctatcattgaatttgtctggtgtgatagcaagatatctaaatagagatgtaaaacaggtaaagatccaaatgatataataattagatttgggggttattgttgaaaaggtgagaaagtcttaatagacattgaaaatgttgactatgaaatgattttaaaagagtcatttcatggtgtcacttagttcagaagccttcagaggcttaccattacctaattgcctgagctcttctagtcctgtcttaactaagttctgtcctgtgtcccttttgagcccatacttgcctgtgtggacagtgttaccttggttggaccattccacttactaattggaagcttggtcttccctctgggcttttaatcctaaataccactgtgcttttataaatgaattttctcccttttctgaaatgcagtttctacctgtcttaaaagcttaatataattcttatcttctgcttatgcttcttaatccacaacctattctcttgctctgtatccatcttcctttctttctgcatctgcctgtcttcctttcttttagattttttttgaataagtaaatttcccagaatgctttggaaaatacaaagagcaatttgcttatcaaacaacatgtattgctctctctctgcctctctatgtatatattcataagcttttcctcctgaagaataatgacttcatggtttttgtaaaaatgaggcatgcttcatcttatttctttttttccagaacttttatttattttctttttcaacttaattttaggttcagggcatacacactaggtttcttacatgtgtaaattgcatgtttctggggtttggtgtacacatgattttatcacccaggtagtgagcatagtatccaaagggtagtgttttgactctcactctcctaccactggccatcctcaagtaggccctggtgtgtacttttcctttctttgtcaccatatgtactcagtgtttacctcccacttacaattgagaacatatggtattttgttttctgttcctgcattaatttgtttaggataatgtccctcagctgcatccatgttgctacacaggacattatttcattcctttttatggcagcatagtattccacagtgtatttgcaccacgttttctttatccagtcaactgttgggcatctagtttgattccatatctttgctattgtgaatagtgctgcagtgaatatataagtgcatgtgtctttttctttttttttttttaagacagagtttcactctgtagcctaggctggagtgcagtgatgcgatcttggctcactgaaacctctgcctccctggttcaagagattctcctgccacagcctcccgagtagctggggttataggcacctgccactacgcccagctaattttttgtatttttagtagagacagggtttcaccatgttggccaggctggtctcgaactcctgacctcgtgattcacccgccttggcctctcaaagtgttgggattacaggcgtgagccactgcacctgtccacatgtgtctttttggtagaatgatttatattcatttgggtatatacccagtaatgggattgctgagttgaatggtagttctgttttaagttctttgagaaatctccaaactgttttccacaatggctgaattaatttacgttctcactagcagtgtataaacattcccttttcttggcaaacttggcaacatctgttgttttatgactttttagtaatagccattctgactggtgtgagatgatatctcattatggttttaatatgcatttctgtaatgattagatattgagcattttttatatgcttgttggccatgtgtatgtctttttttgagaagtatctgtccatgtcctttgcccattttttaatggagttatttgtttcttgcttgttgatttgtttacctttttcatagattctggatattagacatttgtaagatgcatagtttgcaaaaattttatcctatctctgtaggttgtctgtttactctgttgacagtttcttttgctgtacagaagctctttagtttatgtctcacttgtcaatttttgtttttgttgcaattgcttttagagatttcatcatgaaatctttgtcaagttctatgttcagaactgcatatactggctgttttttctagaatttttatagttttaagtcacacatttaagtttttaatctaccttgagttgatttttgtatatggtaaaaggaaggggtccagtttccattttctgtgtatgaatagccacctatcccagtaccatttattgaatagggagtcatttctccattggttatttttgttgacttcgtcaaagatcagatggctgtaggtgtatggatttatttctgagttttctattctgttgcatcagtctatgtgtctgttgttttatgctgttttggttactgtagccttgtagtatagtttaaagttgggtggtataatggctccagctctgttctttttccttaggattgctttggctatttgggcccattttttatttgaatttttgaatttttttttttctaattctgtgagaaatgacattggtagtttgataggaaaagcattgaatctgtaaattgccttgggcagtatggccattttgataatattgattcttcaaacccatgagcatggaaagttttcccatttgtttgtgttgtctctgatttctttcagccatgttttgtaattcttattgtagagatctttcacctccttggttaactatattcctaagtatttcattctttttgtggctattgtgaatggtattgtgtttttgatttggctcttagcttggacattactggtgtataaaaatactactgatttttgtacatggattttgtatcctgaaactttactgaagttatttgtcagttccacgagcctttgggcagagactatggggttttctaggtatagtatcatattgtcagtgtagagagatagtttgacttcctattttcctacttggatgcattttatttctttctcttgcctgattgctgtggctaggacctccaatactatgttgaataggtgagaatgggaatccttgttttgttctggttctcaggggaatgcctctagcttttgcctgtttagtatgatgttgactgtgggtttgttatagatggctcttattattttgaggtatgttcctttgatgcccagtttgttggtagtttttaacataaggagttcttgaattttattgaaagtctttatttctattgagatgatcatatggtttttgtttaattctgtttatgttgtgaatcacacctattgatttgcctatgttgaactaacctttgcatccaaggaatgaaggctgcttgatagtggtggactagctttgtgatgtactgctggattcaatttcctagtttttgctgaatagttttgcatctatattcatcagggatattggcctgaagttttctttttttgttgtgtctttgccaggttttggtattggaatcatgctggccttatagaatgagttaggcaggtgtccctcttcttcaatttttggaataattccagtaggattgctaacaggtcttctttatatgtttggtagaatttggctgtgaatccatctgctccagggctttttctggttggtagattttttattattgattcaattttagaactttttatttgtctgttcaggaattcagtttcttcctggttcagttcctggagtttattcatttcttttaggttttctagtttgagtgcacagaggtgtccacaatagtgtctgagggttttttgtatttctctgaggtcagtggtgatatcacctttgtcatttctgattatgtttatgtggatcttctcccttttttctttattaactaggcagcagtctgtcaatcttatttattcattcaaagaactagttttggtttcgttgatcttttgtatggatttttatgtctcaatttcatttggttcagctctgattttggttgtttcctttcttctgctagctttgtggttggtttgctattgttttcctagttcctttaggtgtgatgtttggttattaatttgagatctttctaatgttttgatgtaggtgttcagtgctataaatttcctcttaacactactttagctgtgccctacaaattctgatatatatttgttttcattagttttacagaattaatttcattgccttaatatccttctttacctaaaagttattcaggagcaagttgtttagttttcatgggattgtatggttttgagagatcttcttggtattgctttctttctttctttctttctttcttttctttctttctttctttctttctttctttctttctttctttctttctttctttctttcgtgctgtagtctgagagcgtgattggtatgattttttttttaatttgttgagaattactttatggctgggcatgtggtcagtcttataatacgtgccatgtgcagatgagaagaatgtatattctgttgttgttgggtggagtattctatagatatctgttaggtccatttggtcaagtgctgagtttaagtccctaatatctttgttagttttctgcctggatgatctgtcagtagggtgttaatgtctcccactattattgtttggttatctaagtctctttgtgggtctctaagaacttggttttataaatctgggtgctctaatgttgggtgaatatatatttaggacagttaagtcatcttgctgaattgaaccctttatcattatgtaatgcccatttttgacctttttgatcattgttagctttaaatctgttttgtctgaaataagaatagcaacccctgctctttttgtcttctgtttgcttgatagatctttctccatccctttactttgagcctacatgtgtcattgcatgtgagatgagtctcttcaagacagcatgcagttgattcttgcttctttatcccactcatcactctgtgtcttttaagtggggcatttaacctgtttaaattccaagctaatattgacatttgagggtttgatcttgtcattgctttgttagctggttgttttgtagcattgattatataattgctttatagttgatatggtttggctgtgtccccacccaaatcttatcttgaattgtagttcccataatcccgacatgtcatgggagagatcctgggaggtaattgaatcacggtgccagttatccccatgctgctgttttcatgattgtgagtgagttctcttgagaactgatggttttataaggggcttttccaaccttcacttggcacttctccttgctgccaccatgtgaagaaggatatgtttgcttctcattccgccatgattataagttcctgaggcctccccagccatgctgaactttgtcaattaaacctctttcctttataaattactcagtctcaggtatgtccttattggcagcaagagaacggactaatacagtagtgttggtgggctatgtacttaaatgtgttttgtggtggcaggtaccagttttttgtttccatgtttaacacttccttaaggatcttttgtaaggcaggtccgatggtaatgaattcccttaggctttgcttgtctgaaaaggattttatttcctcttcacttacaaaacttgtttgtctggatatgaaactcttggttggaatttcttttttttaaggatgttaaccttgaggtgacagtgtagggagagatgttcaaatcaagcagtggcttgaagcttctgttaaactagccagacttccaaaggcccatgcgcagttcttattttctgtttccaaatttctaataattagatttagaaatgctcagtggccattcaaattaaacacacacaaagcaaaatccttcaatcctttagatgttgtttagaaacttttaggaatagtttcaggcttatttgccaggccttacccacaggtaggaattgtctaagggtgtggtagagtggtctggagtcttggagcctcaggggccagacttaattgggagggatgtttcccatggtgtgacccaagaagaaaatttgaagctgtggtcagggtaaggagagataggcagatgtatcaagcgtataactcaagaacacacattggaggacagaagaatttctgagaaggtaaatgggcagtgaagtagagagaatgggtcagttggtttagattctagcttaaaaaaaaaaaggaatttgttgggagcatttcttttgggagtgtccaaactgctctgggttggggtggcccagctgcttagccacactgtgctggggtagacccaaatttcattacttcagttatcaactttgcctgtgaccacatgctgacaaagtgctggtcagttcctgactcatttgtttgccttgtatgatctccagagtcatgggtgataatcatgacttttaataaagaacaaagccctgatgtagattgctttttaggaagacacctagagtcaatggtaaagaaaaaaagaacaaaacaacttgttatacactttatagttcccacgtgaccatttacacacaccttctaatttgaatctcacaacaaccctggggcacagggttatctgcatttcacagatgaagaaacagaggtgagagaatttagtgatttgtcaagaccacataggtggtacgagctggagccggactccaaatcctagtcttctaacttaatccagtactttttctgccatcactttttaaatcttggcacacttataagctgcccttagcaatcctgcaccaattacgggaggtgatatcagtattttgactttgcttggctctaattttttcttgagactaaggagtaatgataaagataggtagctttatgtccaaagagtttcctttatggctatttcccattctagtgttttggccttagaagagataagactgtgtggcatctagaagcttgctttatttaaggaacaactcaacttggccataatatgcataagctgttgtgttctagaagagccatgagaagtgctatggaattttcacgtttaataaaaatgcagttctcatagattatcttggttaagtctaagaagattagtttgtttttatctaataaaaagtataaaggtgctttacaatgtaaaaagggtcagttgtttagtaatttaaatgtccagttgagggttctcaattatgaaggaaattgatttaaatgtagcttataagatatcaagcactaaactctgtgatctcaacagattccattgttcttcttgtaaatgttttggaagaaaagttttccatagaaagctagacgaaactccaaaggaagttttagacccttctagagtttacagatgttggttgaacagaaatccttaaaatctgtgagatggacttctaatgagaaagccaataaaatgggtcctttggttttgtctattgtttttgtttttatgagaaaaataatagactgttgtaaaacaaagtataaaagaataaatcaaataataatgatttttctttcacacaaaagatattattctttaagttgttttggaagtcaagtttgcagaaaatttgctttcattagtccttttttctttctctctctgcctggtcacttccttttgcccatcagcttctattgacttctcagttgtctggctgtggaggacaggttcatgccaggaataaaggttcctaccttgtttcctagggaaaaaaaatgggcttacctgatatcgcagataaccaggaaattccacttcctctttcagatgtgtgcgtgatatgtccctattcattggttcaccttcccccttcaaaactaaaaatgaatgtgaacataccttattaagtaggatttttaaaggcacggcatcataaaacttgcaacttctgtaggaagagcctaggacatgtgttggaatcacaccagtgatttgtgttgtgtgttggtcagcttctcagccgctggtaggtaggtcagtactcacagtgtgactcttgtcccacaaggctaatggtgaccatggttctggcttctgaggccagcagagaagtaacaatgtgcatgaactgccgtggcaccagctgctcctatgtagacctttgaagcatgaaaaatacatgtctctcatcattcttagtatatttacttatttgctcattttccctgtatgtacctggtttcctgaccctgccaactatcttcttcactccagctgcctccttggccttggcatcactggcctccttggtctcctcagctctgaccaccaccttggtccagccttgcaggcctctttgtttctgaccctgtagttcctgtacatctcctcagccccagctgcttctttggctctagccttgctggtcttctcatttgtggctgcctcaaggggaaggaagggaagaaaaggaaaggaaaatgtataatttctaaacttgtaaatatatgtatttaagtctaaggaaatgttactcagtattccctttgcttaaatttatcatggatgtatctctgtctttcaggagtgaaattatcaaaggatcagctgtgaagttattagatactatgttttgagtagaatgaggcttctgcagatataaggacatctcattgtctcctctgtcactcctctgctggtttggaaacatctataggaaagcatcttctatagtcatcatcaacctaagaggccaacatcttgccatcctattttccttttttgctacttatgctttcatttttacattttgtaggtttccacataagtaagtgttctctttgtatacaaagcagcttttcttatggtgaaattcatttattttggtcaaagtgattgtcctgtactggtaagctcaaactgattgtgcttcagtaacaaacaatttcaaagtctcagtggcttgaccaagcaaaagtttatttcttactcactctttatatctaacataagtcagcaaaagagtttgttcatctaagacacttatggagctgggctcagagggctccatctcaacacgtttgtccacaatcatggcaggaggaaggtaatgttgttaattgctctctggctcttaacatctgccagagtgactggcatcacccctatgctcattcgattggccaaagccagtcagatggatgtgatgaacttcagtgagggtgaggtagtacagtcttaatatgtgtgaggatagctggaatatttggaagcagcctaatgacaactgtactttcccatgttgagtggctatgagtctcatcccatcaaatcttggtgataccaatgagaaccaatttactttctcatatacaaatacgaagttgacattttttccaaacatctgggacaatgaatattgctcttgatcaaatttcaagttattttcatttaagaattagacagacatactgtgatctctttttatgttacacatttctctcatactggcattttatctgcacatgatctggtgaaagcttacttggtaatgatggcttgtcactttcttccctgtcttgcagagttcatggtctcttttcaggagccagtcattctaatatcctagttcaagaaaacatcttcttctgtttattagttgttcaatttctgtagtcctttttcaaagtacttagcttcaggtggaagaaagtttcctaataatttctaaattagaaattgtatgctattttctacctactgtgccatttgtttccaggagagtcagctgaggcgagtaactgtggatggatctagtgcctttttgcaggttattgccaaatattaatagtaatgacaacaaaaataatgacctattgtatgtgtatagacactaacagtttaaccatatgagatctcatttgatcatcattcatgtggcaggtttcagacgaaaatatgacaggccaccactctatattcagggtagagacgctccatagttttttagaaaatgtttgaggaagatggtttcttgttttgtctttagaaaggattagaatgggagagaccacaaagattaacacccttagtccattaggacttctctaatattgggaaacccttattctgtcaagggccactgatggaacagtaaaaaagaccagagaccacctacataggaaagcaatataatttagtcttttaatgagaagttataaaatgttccaagaagaagcaatataaaagtctacttaattaacacaagaaatagcaagatacatgcttcatttctctattttagcctaaaaagggaagggggacagagaggatgaagatcacaagggaaagagtcatatgaataaagaaaacaggaaagagaatctgataaaggggggaaggttgcttatggaaaagcacataaacacaaatgcagagaaaccacaaacaaacacacctgtgtgcattcacttcccaactggcttccggagaactacataagcacatttgtaatcatggagtgctgtgaaatagcagcatcttgatttattctttcagggtattgccagttatagtgtaaacaccttgagaataggaacatctctagatgtttgtgaaagtgaaagatttttatcttcttaatgctgcactgcattttggaaagttcaggtatagtgtaggtgtattgtccttcaataggaagttcggagaagggccacatttggcacatgattcagagctccctcactttcagtcaccccaggtcactcttcctgttctgctccagtacctaccttccaaaagcaaactccggacaacagcctatgtaatctagtagggccattttacatgccagatagcatagtttcatacttgcttaaactgttgacgtaatctgttcactgactactttttcatcattttgggaaataaataacataagtagagatagatttttattcctttatcaacaaatgtttgagaaccagctatttaagcactgtgctaggtactgtgtattagaagtcagtaaggccagcataatccttattattatttaattttgtgggaagacaacaataaaataataactaaagtgttctaatagaaatatgcttatttcacaggtaagcactaatttttcttttgcctctctttcacccctttttattcccttatgtatttttcctgtaattcaattaatagaagaaatctaggataagagcttattccctttcatgtaaaaataccaggccaggccagccctaggcaagcatgaccatgtttctcatagtccttcttgcagctctgcattgaccacgattccttcttaactctctaggttcctttttaaatggcttgaaattgtttcctcttttcacattttgcaagaatgaagttttagggaagttctggaaaattaatgggaaagtaattccctcaagagagtgagacacaaaaatgtggctcatccagggagcagcttcagattcttcccttgctaataagatgagagcaagatgatgtgtattgagaacctgccatattcaagacactctattaggttccaagggggctataaagataaagagggcacagtccctgccctccagaagcagtatatggtaactataattagaaaggaacacaaagtaattaaagaagtgtgccgagatgggaggtatggatgcctctgactgttatgtttttggagagttttgtgaaagaggtggcatccaggctgatactgaaagagatgtggggattgcagaatcggactgggtaggatgctgatgcagcatcttcattctggtactctgcatgctgccagtggacaggcaatgatggtgcggggcaggtatctcaagtcaacggggagaggatagtgtcacaaccataccatttgggggactgttgatgtttcttgatgaattgaaatacgggggctttcatttgttgggcaatggaaaaatacgctagatttcgatgcaatgaaatattcacaaatgccacaatcaaaatggcaatttgggaagtttgttatggtatgtatgagcaggttgattagaggggagagggataccagttagaaggtagtgcaatggtacagacatgggatgataagaatccaaactacaaaggtagagggtagaatggaaagaagagagtgatgggctctgtcttgtaatgtgtatgaccctggagttatttacagaagcttagcatatgccagcgtgtaaaatgcaggtgagggtgactacagtggagtgaggcaaaggttttgatcagcggagtaaaatgtactatggaacagaccttgaaggctcttgctactttggaaatctgagaaagggaagccataaacatgaggagcactgttactctccataaaacagcattatgctgttgattttcaaatattcacaaatgcttcttggaatgtacttttccatggattagtgtgttttatgttgaaagtgcattttttttcatcagcgagtttgcttttaaaatcaggtaaagatattttccctttaaatgtaaaatgctaatttaatttagtctttgcagcatgggaatgggatactaatgtggctgaaaacagcagtttattttttgtgggtttgaccatttcagaagtttaacatttttaaaaaatattatcactaggaaaataaatttgaaaccacattccagcttcaatgaggattattcaagtgtttttcaattatattgcttaaatgctccaaagagtctttgcctcagagcacggactttttattatgacttcactgcaaagggaaacagaggactctgttctgggttctgaagtggttttcctcatccatctctggattgctcttcttggaaaccaacttttggtttagcctagtggagctttctatttgttagagaaattgaccagtaatgtgtagttatatgattgtgcatagccagctacagccacaactacttttagcccctcactcaaacagtgggaaaatattctagggtatgaaagtctcagaaagattaattatacacgtacatgataaagatttccagttatctcagaccagcatatttattctttatgattaattatcctgagatagtcttcattcaaggtaatgaaatattcttaaaatacttattgctttttagcttgatagctgaaaaccaatgctctgcattcttctgtatttataaacctttatgcagtttggtgatatgaggctacgtggagaaactcgctgcataaagaatgagggagatgatggtccagctctcccttgcagtcatcagctgacgtccagaactgcattcaggcctgggaaccacccttcaagaagggcatacacagactaaagtgtatttggaagaataaacaggtgaaggagactggaaatttgatcatgttggaacttggaaggttgctctggagagaagactcaaatagttgtggtatttcactgctgcagtgggcagatggcagcagccatagttttggctacctagcatctgggccccttttccatctcagggaaatctgctgtgtgtatgttggtgatggagaaggtcttgcattctatggtagaagctgaagggtcagatttgtctcttttgagtcacttgacatctgcatgtggacaagggtactaggcttcttctggtgtccgggcacttgtttatggctggggctttgagtctaacaggcataggtcagttgataaagtgtctagattccaatgtcatatccagactgctcttgtggaatgattttggcagtgttcttcactggctgcttcccttagcttctaaccacttcccacctggtttcacgttctaatagagaatggaaatatataatcctaaaagattttgtgagcttctcaatatcttcaaaacaagtttcttttttgcttaaggtagttggtgtaggtttctgttgtttacaaacaagaatgctgactgatataattactaaaaacataatgatttcttatttctaactggaattattttattttttactatttagtgaattttttctttaatttttagttaacatatgacaattgtgcatatttatagggtacagagtgatatttcaatataggtatacaaatgtgtaatgatcaagtcaagataattaggctatacatgacctcaaacatttagcatgtctttgtgttgggaacattcagaatcctcttttctagttgcttgggttttttttttgtttttttttgagatggagtttcattcttgttgcccaggctggagtgcaatggcatgatcttggctccctgcaacctctgcttcccgggttcaagcaattctcatgcctcggcctcctgagtagctgggattacaggcatgccccacgacgcccggctaattttgtatttttagtagagacaggtttctccatgttggtcaggctggtctcgaactcccgacctcaggtgatccacccaaagtgctgggattacaggcatgagccactgtgctggacctcttctagtttttttgaacatgtataataaattcttgttaactgtagtcactctacagtgctataggacactagaacttattcctcctatctagctacaattttgtaatcattctcttcctacttgccttcccccactacccttcctggcctctagtaactataattctattctttacttccatgagctcagttatttttagctcctgcagatgggtaggatcatgtggtttttaatctctctgtgcctgatttatctcacataacataatgccttctaggtttatccatatttctgctaatgacaggatttcattcttttttattgttcaatagtactctattatgtgtacatgccacattttctttattcattcatctgttggtgaacatttaggttgatcctatatcttggctattgtgaatagtgctgcaataaacatggggtacagatagccctttgatatactgattttctttcttttggataaatacccagtaatgagattgatgaatcatatggtagttctatttttagtttttttagaaacctctatactgttttccataatggctgtactaatttacattcgcaccaacagtgtagaagagttcccttttctctgcatcctcaccatcacttgttatttttttgtctttttgatagtagccattctaactgggtgagacgatacctcatggtggttttgatttgcatttccctgatgattagtgatgttaagcattttttcatattcctgttggccatttatatgtcttcttttgagaaatctctattcagaccctttgcctattttttaattggattttttgttgttgttgttgttgagttgtttgagttctttgtatattctggatattagttccttgttagatgaatagtttgcaggtattctctcccattctgcaagttgtctcttcactctattgataggtttcctttgctgtgtagaatctttttagtttcatgttgtcctatttgtctatttttgttgttgtcactggtgatttttgttgtcttacgcataagttctttgcctataccagtgtcctgaagcatttcccctgtgttctcttctagtagttttatagttttgggttttacatttaagtctttaatccatcttaagttgatttttttatatggtgagagacaggagtctatttgtcttcttctgcatataaatatccagttttctcagcaccatttattgacaagcgtatcctttcctcaatctaactggaatttttaaccaggattcaacaatagctttatggaatctgtgtgtatgttgtgttatatgcagtattttggttatttgttcattcacatgggggagagagtccattgttttatttacttctcaaaaggttctgtaatccctaaagggccaagaaccacttatctgcaggatacaatttaaacatcttagcatgacatacaaagtcctcattatctggctggcctcagcccattgctttgattttctctcctgttacattctctgttgcttctatttctttatcctcttttcatgctccagtagtcaaagtactttgtttctctaaaagcacctaatggtttataatctcgacgtctttgctcttaacgttctttctgcccaacccttttctttgcttcttatcccaccatttcattggtttgctgaacacctactcatctatttagacttcactggtttaattcctatgtggatgtaatgattactgtgctatatcctcttggatatatccgtattgtactttatattctgatttcagcattgctggcagcccatgttaagctagcagcttgtatgagtgcctcttctttgtagccattgtgcgttctccaaagtcactaaggcagatgtgttacccaggcacatctttgtggagaagttaacccttctagggggaaacactcaaacaatgagaatgtgaatgggtcaatgccccaggcttcccattgcctgtgggccaatggtaggcacattcgacatgactcttcagagagatccctgagagattgggccgggggctgtccacacagttaatctgctcattaagccccctttattggcttgctttctttcctgaatcacttttcttcctctttcactcctgctttctagattactgctccctgcatccaagtctttatctcaagctctactctcaggtgcatctagatccagacaccctcttgactgtgtgcatctattttagctgtgagatgctgctttagcatctcttgccctttgttgatctcatttaatgatttctttctagtagactattacttgtggggcgtaaacagcttatcttattgtgatgtgagtgggcaccatccaactggctgccagtatgggtagaacaaagcaggtagaagaagggagataggttttgctgagtcttcttgctctctttctcttcctgtgtcagatgcttgtttcctctcctcaggaaggacatcagattctatgttcttcagccttggaatctgggacttaaaccagcagccttctgggggccctagggcctttggcttcagactgagggctgcactgttggcttctctggttttgaggttctcagacttggactgagtcatactactgtcctctctccctccccagcttagagacagcctatcaaggagacttctccttgtgattatatcagccaattctccctcttttgtatacctatatatcctgttgtttgtgtctcactggagaaccctgattagtacacttattcattattggtccctaagcaggtacatagtggaccctcaacaatgtgtaaaaggcacagtgcatgagagctgtcttcagatatctgaagggttaccttgtgtttacatatgtctggggaacagaaccaagaccaaagagtagaagttacaggaagacagattataattcaatacattgtttatcagtgcacctatgggaggtgatatttgatagcaacagtaacagtggctcattatggcatgatgacccactcagggaagatatttgcccactcttctgctgagaagtcctattatagaaagttttatagaacaaggaccacaagcacatacctgcaaggaccaggctggcatataaactagtgaggcaggctaagtgtcacatagttgggaatggtgagaactgtgtggaataaagtgtgtgtaccctgactcaaaggggtaggtactccttagctccagccaacagttgctagacagtaatgcagatccagcactgtcagaccttccagttttccaaaagtaagtagaaatccagattcttaggtaaatcttccaatataaagacatttgagtcaagaaggcatcaccgtggctggctatggcacatgggttgtttgtaatctttgtgtagtggatgtagctgaggatgctaaagcctcagatgtgaggatagctttctagagagccagattctggtcagcttgctctcttcaggcccatgaacacactctgcctgttcccaccttgggcctttggccatcctctcttcacagaagggacactgtgtggctcaggcccctctcctgtgacatctcccactactggtccttccccagcaagccctgtcttcttggtgcaccttcagcatttccagcactcagatgtctgctgcaattgctcactgtctagtagtgtcatagtttgtcttatctgtgtaactaagttataagttcccttaatgcagaggttctacttcatgtggctttcctgtcatttggagcacagtattgggtgcatagcaggtgctcaataagaactgttggttaacttttgctagatgactatcatactcagtgcttatggcatccctcttagtagaagatgaggtaataaagaagaggccaccagctcttgcatggagaacttaaaattaaatcagtgaagctctttcagatgactcagtgcttttggcattgctcttagcagaagatgaggtaataaagaagaggccactagcccttgcatgcataggttaaatttaaatcagtgggactctttcagagatgaaatagacatgtcctctatctactgttgacctgctgtcctcagagcttaaagtggcgctcagtgtgcctcacctgtcaaaggctttccctcaccatttcccaccagagatccaataaaataaccaattatgtgtgccctgatttagattccttgattagagatgggttctgatcataaactatgtaaccatcttttaaaggaaaacgttaataggcaactctttgttacaaagattgcctaaaagaaaaactaattttaactgtttacaattatccatttttatattctttctcttttatttgaaacagattttgttttagaaatctcttttctctcacatctgtaaagcaaaatacaatataaacaattctcagtcatctgtgataatgaatattagggtatactttgggcactgaagtttactaattgtttccaaactttattttagcaaactttccccactttttggtgaggatgctagtgagtataaattgttaaaatagtatgtctcctttatattccatattgtacttgtctcactactgtttatttagcctagtttcagtgcagttttgttacaaggagaaggatttgaattatgcattcaacaaacatttattgaacccctactaagtgccagatcctattttagctgctagagatagttatgaagaaactagacaaggcccttgctttcttggagctgagcttccattggtgggagacaaccacaaaccaatgaacaaatgaacacacaggaaaatattggatggtgataggtgttgggagcataaaatagaatggagaaaatatgtatgtgtgtgggctactccagattggagttgagtctcttcaaagctgtgacatctgagtgttgaaccacaagaaggaaccagccatgtgaagatcttggggaagagcatttcaggacaacaaaacagctactgccaagggcctgtcacaggagccacatggtgtgctggaagcacagctcggaggctgggcagaaggaatttagccaatataatttattatacaagccaaaattattagcaacaaaatgaaatatttattttgcagtttaagtatatatagccatgaacatttagatttcagaatttgtgccatgatttcatgactagattcagtaattatttaagattcacattggagaaaatcagtgttctgaagactatgacgtatatcccgctttgaagttttggatttttcttgaataggataggccattaacaatattggaggaaaatatcatctagtgttatattcttaaattgaatttgccttggaagtaatcatgcatgcaatgaacatagtaagaaacagcttctttcatcctttaatgtaataattgctcccaaggattacaagagcttatagacagctggaacatccagctataatgttagctggacagggaagaaagttgttatggataaagcttcagattttcttggattttttggtatctgtataacagagacctgatgagttgccagcacataacaagccagaaccctggatccagagagcatttgtgacattcagccaacacagaactgctttcccacccaaagggtggtctccaaatctgttgtagcttttggcaagatttttatatcacaattgaaaacagatgccctttctgccctttcccttgttgtctgagttactaccgttcaagagattgcaagccatggcaatctctcatgcaccttcagaatgcccagcaagagtcctcgttagacattcctattcagaagtcctgctgtgacacacttcctctgcaagaagagaacagattcaggaaggtgccaggattgtgaggttctggtagtctgcagggtgtactgtgaatgctttttgtcaaaatcaaagcaccagtcctgggtttaatagaaaacatctctctggatagtttctattttaaaatatttaatcctaaaataaaatatttaatcctaaagaaatatgtaatcctaaaggaaaaccaaagtgtactctccctgatggactatattgagttttattacaggatatggccctaaaatgtgcttggatgggatattgaaaatccagagtatcaaaaatcactaaactactaaattcttgattgactaaaagagacttattagacataacaactgaatataatgtgtggaatttgtttggatcttggtgtaaaccagttgaaatgtaaactggtggacaattgggaaaatttaaatatggactgaatatcaggcaatattaaggaaccactggtaattttgttaggtgtgataatgatatagtggttatctacgaaagtaagagttataaggacagtgctgtggaggggaaaaatgaaacctgaaactttaataagatttattggttcaaacaccacatgttctcactcgtagctgggaattgaacaatgagaacacatggacacagggaggggaacatcacacatgggggcctgtagtggggtgggggtaggggggagggatagcattaggagatatacctaatgtaaatgacgagttaatgggtacagcacaccaacatggcacatgtatacatatgtaacaaacctgcacgttgtgcacatgtaccctagagctcaaagtataatacaaataaataaataaataaacaagaaaaatcaagggcaaaaaaaaaattattggctcattagtagaaatgtaaaagtgcttcagaaaaagtaatcatagtttaggggagaggaacctaggggcagacccaggaggagagaaagtcatgtagaaaaggagattttgaaggatgttcagtgtccttcagtggaaagacactgccagctctaaatggctctgcaagggaggagccggggaataaatcctctgacatcactctcttccctcccatctattgctgatcttttcctgctctcaaatctagatggcaagggactcactggtgtagtctatacaggtcagcctttggggctgatagtagggtggaaaagggcagagagtaggactggggtgtaaacaaaagctaccagtaacagcatcttctttacaaagtataacaatatggggggaatgttgaaggatagatacttttggaagaagcccttcatagaattataaaatgttagggctgggagtatcctgagaagtgattctcaacctcattttagaggtgaggaaataaagggagcattatacaggtagcaatttgtgtacagctagttgtcacagatctgttaagaaattacagactttttgatatgaacagacacttctcagaagaagacatttatgcggccaaaaaacgtgaaaaaaagtgcatcatcactggtcattagagaaatgcaaatcaaaaccacaatgagataccatctcacaccagttagaaaggcggttattaaaaagtcaggaagcaatagatgctggagaggatgtggagaaataggaatgcttttacactgttgttgggaatgtaaattagttcaaccattgtggaagacagtgtggcgattcctcaaggatcttgaactagaaagaccatttgacccagcaatcccattactgggtatatacccaaaggactataaatcattctactataaagacacatgcacacatatgtttattgcagcactattcacaatagcaaagacttggaaccaacccaaatgcccatcaatgatagattggataaagaaaatgtggcacatatacaccatggaataatatgcagccataaaaaaggatgagttcgtgtcctttacagggacatggatgaagctggaaactatcattctcagcaaactaacacaggagcagaaaaccaaacaccacatgttctcactcataagtgggagttgaacaatggacacatggacacagggaaaggggaacaacacatactggggcctgtcagtgggttgggagctaggggagggatagcattaggagaaatacctaatagagatgacgggttgatgggtgcagcaaaccaccatggcatggtatatctatgtaacaaacctgcacattctgcacatgtatcccagaatttaaagtaaaattaaaaaaaaaaattatagactttttgattttcagccctgtctctttcccctaggcctgggaattttcataaattttccaaaattttcccagacccaccacaccagctcagcaactgttcagcatgggtgaaaatggtaaggaagtctcagttgttattcacaggaatgtgtaagcattatagacatagccattgcaatataccatgtttctgtagctgaaattacagtgtcactgtgggtaatctggaaaatacatatatgtgtcaaaaggaaaataaaatcacccataatggaccacagagataactaatattaacattttcgtgctttcctatcagttttttaaattaaaatatacataaatatgtgtatgcaaaattagtatcagttgtacatatagttttgtaggttgttttttcacttaataatgaataatttcctatatatcaaattgccttagaatctgagttttgatagcagtaatatttcaaaaatgaatatagcataatttttaaaagtcctctgttattagatatttgtttcttattttcttctatgataaataatgctgcaatatatatatataggtacatatataaacattatatatcccatataaataattgtgtttatctgggacatataatatttttatttaaaaaattgccaccataagaatttccagtggtcctttctgttggggcagagtggaaagaacatggctctagggccaggcatccctgatctgtttggcttccgccacattctggatgtgtgtccttaagcatgtcacttcactctattgagcctccttctcttttctgttaacagggatcatactgcacatccctcagtgctgtgatgagaactttatgaggtagtacttttctttctttcttttttttttttttgagacggagtcgtgctctatcgcccaggctggagtgcaacggcgtgatctcagctcactgcaacctctgcctcccaggttcaagcaattctcccacttcagtctctcaaatagctgggattacatgcacccaccatcatcatgcccaggtaatttttgtacttttagtagagatgggttttcaccatgttggtcaggctggtcttgaactcctgacctcagatgatccacctgcctcggcctcccaaagtgctgggattacggatgtgagctaccgcgcctggcctacacaaagtagtattttaaagtgtttggcatgtagggtgtactcattacatgttaggtctgtcttcatttgggatggattagattgcacacaagtatatgcacatgtgtgttgagtgaagtgaaggaaatatagttacaagattttattcagtatcaagaaaaaagtaaacctgacttgccgatagacacatttcaattgaaagaatcctttcagcaagagagacctattgaagtttaagatactgataatgaaaacagaaatgaaagtctttaaaagtgtatttttctttatactgggttgtccagtaactattcctaacctccttccccatcctcttccttcctcagtgctcatcttcaaactctatcagcgggcaaagcatgtgtacagcgaggctgcgcgagtgctccagtttaagaagatatgtgaagaagcacctgaaaacatggtccagctgctgggagagttgatgaaccagagccacatgagctgccgggacatgtatgagtgcagctgccccgagctggatcagctggtggacatctgtcggtgaggcagcctggtgggggccaagggatgccatcaaataatattgtttaaattaatggaaaaaaatgcaacatttcataatctacgggaatgaagatcattccccacttcctatatgaggagtctctgatgatacagagctacacttgttcccttctaaatacctgtaggatgaaagatttgctacctggctccatgattttatgaggctctgggtttggagtcagtttggagtcagctctttacatcatgagaaagacctttccgtctttggatgattaggcctttcaggatggtaactttgctcagagctgggccctgttaactttcttatgatatgttttattatactgctgctctgccagaaactcctgtccagtgtcctaattaagtttagtagttctactcagaagaagggagaaaactgacagaggatctcaagcttgatgggagcatgtggggagatttgctgaaggaatcacccagaaagccagcatttcctgccttctaggtttagtttaggcagtttgaggaaataaaggctgaagaaagcccaggtgatacatggttaatagaggcagaaatgtaaagaggacaactctttcacaaagcctaaaatcagctttcctaaaattgtgaaagaatggagataacagagttagtcctcttacccaggaaggagctcagtgaccctgggagaactgaaactgggaaagttctcaaacgctagatgttacttcactgtgagaacacaatgctacactacaattagtaatggaaatgtaattaaccacttggcacttgtggcttgcctcagtcattgccacactcccagcctgaaaagtttaaaccaagtaactccagtgatcacaaatggcctgggtaatccagcttgtcaaaagacttgaacacagcattgatgaagatcactctgctgacatgtttgctcactcatttccaaaagccttccccagcttgtttcattttaagtacccttttctgaaaatatcaagggcctagtatatggaagggacaaatattgttcagttctggaaataagaggaagtggaattatttctgcagagatcaggaagaaatgtctttgcctggaaggaagtgggatggttggaatcccacctgaaaagctgcggaagggcatttgccagcttcctggaattctctaataaactttctcttcctagagtggtcaacctgtacttgttttcatggagcttacattctcgtggggaaagagagaaatgacaattaaaaataatttgaatggtagtgataagtgctatggaaaaaaatgagaaggaatagagactacaggtttgggtgggtactctttctgtggagtggttgaagaaggtcactctgacgaagagatctttgagcagaggcctgaaggaggtgaataaatgagaacagcaaatgcataggccctgaggtggatacttggctgtcaggtgtgaggctcagcaggatcagcatggcagagggccaggaaggaaggagaggtagtagatgaagtaaggaaggaagtggggagccacaccatataggccgtgtaggccatcggaaggcttctggctttgagaagagaaagggggcaatggaaatgctaggcaattctatgccaaatatgcctgcaaggaagacttagataattgctgtgtgggtataagagagaaatcaagacgactcctgggtttttgtcctgagaaactttccttgtgcctctaaaagccacatttttgaaaagcacacttcaccactgtaggtaagagttatcttagagtaccataaaatattagatcaggaaggggtcttagagatccaggaaggcactaagagatgaaataatttgagtaagtttcacatatgagttcattggaaagcctggctcccaatccaatgattttgccacacgtgcctctccccttgggttatactaagatgtgattacacttaaatgtgggtcatacatacgtgtgtgtacgtgtgtgtttgtaacctattttcatctcctagctttgaagctttatgatggaggcctttgttgtcatagtttccagcatttgaacattaagcaaagtcatgttgagcaggaacgtaatgtgtagagtaggatgaaaagtgggctggaagtgaggaagcttggattccgactctcttttcattctgagctctgtgagctggaactgttgcttcgctttgtgttctccattggctttttctgttctagcagtctacagacctatacatttaaaaaatatggttctagtgaaaaagcttatggctatgtcttaaatgggtttggaagagtaccttttatttatcttttcattttgtttgtttttggaaaatcctttcttaatggcagctaaagtgtttcattttcatttgctgtatttattttctgagaaaaattcagttctgtgaaaaattcaggagctccatcactttttcatgattgttttgtttggaaagccaattgctaagtatcaaagttattttctacttattcgataaccatatagggtccaagttttccatattgaaagattatcttctggcttgttggccagaatagttgtctggtccttaaagcttcttatataattaattttttctttgctgtcactgtgaccagcagataatattcttcaaatgtttcagttggctgcaagttactgaaaggtcctaagtggcagagcaacctcagaggaggatagccccaggggaattaagttgatgcaggcattatgtccttccctccttcaatcaatacatattttcacatgggtatctttgtaccgtgtgaaattgcagtctattctctactttcaaaagctgtgactttctcttgccgggcccaattgctcacacctgtaatcccagcactttgggaggccaaggcgggcagatcatgaggtcaggagatcgagatcatcctggctaacacggtgaaaccccatctctattaaaaatacaaaaaattagccgagcgtggcggcatgcgcctgtagtcccagctactcgggaggctgaggcgggagaatggcgtgaacccgggaggcagagcttgcagtgagccgagatcgcaacactgccctccagcctgtgggacagagcaagactccatctcaggtaaaaaaaaaaaaaaaagaaaaaaaaaaaaagatgtctggaaagtaatgaggcaagaaggaggggttcagaagaatgcagaaattagtgggaataagataaaggatggataaaggatggggaagacagacggtacaagagtagcaggtagtaacatggggaaaggttcgaatgaacagtggagctacttgtaagccctagttccttctgaagccttgtgactgtctcactgggtcaggcagagaaggtgttggacatactggaaggggtcctggcaaggcctggtgtgagccactggtgccacagacacaacctctagcaaagtattgctttgtttaaaaaccaccaccacctccacaattaccctgccaccattaaaaatgttaacatcagtagggaaggtgtgactaagactgggcagcctgagcaggttgcttgttttccccaaaagagggaggaggagggaagctgaaatgggttcaaggaggagcactgccaaaaataatctttacatcaccctccctggtccacttatggcacttcaaaattcctttagtgtttctgaagggcttcttggaaactatttgtatgaaaagacaactaattgagtgagtaaattaacggcttgaatacctagaatacctaagttgctatacacaagcagaaaatcttacagtgatctgagctagactgaattaaaaaggcatctcctacttagcatataggacaatgtatagaacaactttgtgacccaagtggagagaaggggggttgggaaagagcaccactgctagctgtctttttcagttgaaccttttcctgctcttcaagagaaaatcagtttagaatctaaagaaaggagcagggaggatgaaggaaactatacttacagagtgaggcttttttaaaaaattaaattaatgttagaacttaaattatatgaaacaaagtaaataatgaaggaaaaagataatgtttgctgaattataaagtatcttttgtagccaaacaaaatgtaaacagaaagaaatgactaaattttaagtagaatttactggagaacacaaaacaattttgaaaccaagtcagttatatgtgagacagctcattcactattggttccctcgttttacttaagacaaaatggttaatgccttttgtttttgttttgacacttgttgaagttagagaggattaattgctgcattatcgcccaagctattaagggagatgaatgacaaattttagtggatcaactatgattacaaaagttaatttactttgtcttcctcagaagtctttctgcaatgtattccatggtgaggctgctcagcctctcgcatccattcttcaacaaggtcataatggggaagaatgaagtgcaaatccattgttgcatgctctttccccatgaccttaagtgctaacatgcataccctgtcaaaaaaaaaaaaagagggagggagccatttcacctccccttaggggttcacttctctttgggcctctttgacttatgaatatacatgccatttgcaggacccaaacccactgctcttcaatggcctttaagtggcttacatttctaaagtagacatgtgggcatattttcttatcctttctcatttgaacactgaaggctgtggtttcttgactgtaaagcaatttgaaggcacggtgtctaacctggctgtaaaaatcatagaaactgctagaagttcccttacctgtgactcttgccatttcccagagagcagaagctagaagtcttctcaagtaaaaaaatacactgctgactgcttatattatatataatttttaaaatattttaagggaaatatcgtagtccagcagccatttattagaacctagaatttctagaattgtgctgggctggggtcagagagatggatgtgacctgttcctaaattctagatttcctgaaataatttatttcatatccatttgtataatatatatttacttatttagaaagaaatgacacagaatttaaatacaaggcataatttcttaccttccctctttttcaagtgtgtagtgcagttgggtctcctggatctcctccccaccctctccattgctctgtatcttgcaacttagtaagtgctttatggtcgaattagttcacttaaaagtaggaaatttgactttggctatattgggtgcctggatagttaattctgtgaatacacaaggatcaaagagtaacattcctcataatctccatccctcatctgccctagcctttgccatcgtgctttataaagtagaggctgcctttgttgctttaacaaacccttctacattattcccaatctagtcatcacaatcatcaaagtgggatccgagggattttagggttttggtttttgtaattcttgtattgcctctctgatgtgcaatagctcaggagatatatttttaatgttttattgttcttccagaaaaaggcgcaaacatgaaaagttcactaaacacccttggttcacttacttttctttcttaatttaaagggtatatcggtctcctaactttcggtcttctcagaatttctatggcatatgccaaagggcctattaagtaccagcagggaacactgcagacagacctttctgcctttataagtgtatacagctgcgcaggctgctgaccagctgctggggcagccctgacttgtgatcagatgtgccactgacttgggggcagaaggctatttctaatagcacttatcattctttatttgggaaatttgagccctgatttcagaccatgtgattgatgcaattcagtccattttcatctgtagcaggcagggtggtgacagagcagctctggagactcagtagcaaatatctttacctacaaagacttccagcttctgctccctggaaactagtaaaagtctcaggaaaatagacctctggcccagttcctataggttttacagccagattaaaaataatactctgtttgctttaggttcaattttgaaaaaccacagctttcaaaaactgttcaaatgagaaagtataataaaatatgccttttagaagttggattgaggacccttaaagacttgataacttgagtccagcaaaacggcatattttagatcttagaaaatcaagtaagaaggcacagtattcttctctagaccatgtcatggctggctttaatgcccatattttagggtcttccagagacacttcagtgacacctcagttttccccagcatcttccacagtaagagtttgatacgactgcatatgacaaccatttttttttttttttttttttttgagatggagtctcactgtgtcacgcaggctggagtgcagcggtgcaatctcggctcactgcaacctccacctcctgggttcaagcagttctctgcttcagcctcctgagtagctgggattacaggtgtgcacccggctaatttttgtatttttagtagagacggggtttcaccatgttggtcaggctggtctcaaactcctgacttcatgatctgcctgccttggcctcccaaagtgctgggattacaggcgtgagccactgcacccggcatgacaaccattttttaaatccaacaaactgcaaacaggccctttgccaacctagaaatttagaataatccaaggatcccaaggtcagagaaattttttagcctggatgatgggatttcaggcttagtcactgggccataaattgaatgttaaagggataggaggagatcagtgatgtttatttgtttgtaagcattttttttctttcttaaatacctatgttcatttgaaaagcgtattttaatatatataataaagcagatgataaaaagaaatcaactgagaagaatcactgacaggaaaatcaattactgacatgcagtaattctgatgttctagagtagaggtagtattctattgatatgtccaggaagtaaaatatctcatttagattgaaaaaaagagacaaaattgtgctaaattaatcatagagcctttaatccactagtaatttggagtgaattttattaagaagaattaattgtaagtacatgttaactttcgtgtcaggataaattgcatcttttaaagctaagtgatctgtgtacattgtgatagggcctttcactttggttgaaatcttaggtttgaaactgtgcctggtttacagtaactaaaattaactctagctgtgtggtcctttatatagttgttgtcatcccaatcagatatatctcatctgatgtcaacttctgagtccaataatcagactagctccagaaggcacagggaaggtggtgtggacctctagggactgccctctgctttgtggaaaggcttggttaattttccattagagattcaaccaaccaccgacccaacctggagtttaataacacgctttttgttgataagtttattcagtgaactaggctatctgttctaggggactgattcttctttgaaacagcccggccttaagaatgcagctgaaatagccattggggaaaacttgtataagactgtacattttaaattttgatttgtcctcatttggagtgaccttctgattcagggttgcctacatttcttttaccattgcctgttttatcttaacgcctccttcctgatttacgtgtaagcttgctatacaactcttcaagtggctactttatggaatcaatattacagtgggttattgccagtcatgaaatgggaggagtactgttgacttaccacttggagtcaaaaccagggactagatttagatacaatgaaaaaattccaaatcactctctgaaacagtataaatgtcttaatgtcctaaaatgtttgatgacacctaaaaaccccgcatgtattttcttcttagaacttagataggctatgtgttctacaaacaccaagcaaatcccttgtattttcatttataggttctaatatttttttcctcactgttttaggaagtttggggctcaagggtcacgacttactggagcaggatggggaggctgcacagtatcaatggtacctgcggacaagctgcccagctttctagcaaatgtgcacaaagcttattaccagaggagtgatggaagcttagcaccggagaagcaaagtttgtttgctaccaaacctggaggtggggctttggttttgcttgaggcctgaaaaaatgtaaaaagtctgagagaaactacttagggcacttaggaattggcaggactttctgtgccacagtaaattaatcttccttctgttttgtattatgatgaacggttgctattatatcaagatatattttcaaagaaatggttgaaagctctctatgcttcataatgattctttttccatcttaaaatatggttttactattaagagccaagatcatgcttggacagatcttttaagaataacttactgagatttattgatttgaagattttaaagatgaatggtaaaacacactcttaatactgattacatggattggacttgaattaaatatattgttacaattaaactgataccactgaattgtatgcattattcttgaatagagttcatttctggtttctcttagtattcttcttcctcaaagttgtagttgtctgttgatgatggtgatgatgatgatgatgacgatagtgatgccacacattctctctcaatttcagcttcggaacgctatgaaaataatacatgattaaagtttcacagatcttcttggacattgtataattgaatttgaatgtgagatttctccagttatcaagagactaaggatttttttttttttttgacaaaaggaggatacaggaagaaaattcagactcatttgaatatttgtaaaccatgtaatatataaataaccactttcaattcttttggccctgagctatctccattacttaatagaaaaacttagataaaaaacactttaagactcttctattcacattgaaataaagaattatctagatgataattcagataattcagtttgttcatagaattactttcttatcactctttttctactactttttctcaaatacctctctaatccaagaggcacttccaagaaattccacacattccttatatcccttttttgcttgtctagcaaagcttgtttgtatatatgcaccccattgtaaagcaggtatgcaggtatgtgggtgaaagtgactatgaaaagacttaatgaattctgggatttgtaatggtattgatgggtatctctgtatgtatatcaagagtgggcagaaatgtttggctggtgatggcaaatgactggctttctcttgtggatggactataggaagcactttctgaattatgtaatgatttggaccaaaaagtattttgctgaaatactcaggtaattgagatagcaatggttttatggcatgaattatccaaaaaaatatcagaattacttattattctgtgatttcattagctcattaatgtttaactcacagattgggcatcaccatctagaatttcagtttaagggaggcctgcgcaaagctagttttatttcttaaaggataacagtcatacatagaatactaggaaagccaatattctatttaaaaataaacttctgatgcattttcattcttagcagaaaggtaaatgcttgagaaagcttgagtcaaatttgttaaaagaattttgagttctataaatccaaaaatctgaaacctgaatttatttaaatttataatcctttattttttaataccgtgccattttccacaaaggatttgtggttggtatataattctttaaagatacctggatcagtgtaaaaaaaaaaaaaaaaaggcacctgtcattgttttgctgttccatttacaattttcaccaggtgatttcttcttcacaaaaggtgagtaaaaatttccaatgtgcactcttctttgggggacacacatggtcattctaagcgagggatctattctatatttgttttgatttctctcgataaaaagaactatgtttcagtcttactatcactgtgtggtatctagatattatgagagatgctaaacttacctggaagggatagggccggggccattagaaaaaagatcatgcagtaaatggactttgagcatggccctaaaagatgagtagagtttaaaagctgtggagtgcacactgcagatgagcaaagcctatgggtataggcaaacatggtgtgtgtaggaggctcagtgagagtgaaggctttgctttggtatgtagtgaagaataagattgactacactggctggagctagcttttgaagagtcaaatccaggcagcatttagatcaggggttatagcccagcagcccatgggccacatctggtctgcagatgtatatagtttggcccacagaatgactaaaaacttgggctccaaatcaggagattgtacaagcagtatcagatattctggattactcagaatctggattactgagtggtggaatatctgatactacttgtccaacatttctacagggcatcaatgaactagggctgagatagtagctgccttgttagatgaggcatggctatccagtgcgctacagtttccacaactgcttgtataatagtttccctgacactcaaatcatttaccacttaccagctgaggtcacttgccctttatcaggacacttgcactgttgttttcctattctaattaggtatttctctgtgcccatgtccctatcaatagtagggaagatagaccaaaaaaaaaaaaaaagagagaaagaatgaatatttttgtgtgtggatgtaaaaaatagtccttagctgggagtggtggcatgtgcctgctgtcccagctactcaggaggctgaggcaggaggatcacttgagctgaggacttcaaagctacagtgagccatgactgcagcactgcactccagcctgggagacaggtgacagagtgagaccctgtttcaacaacaacaacaaaaatgaatagtcctgtttgcttattatactgtcctgtttgtatattatacaacacccaggtgtttcactctttctatcacttttctgccccatgtaggaatttgatttgatccatttttgacattatactagcagccaatgggattgctctagatttttgaatggaagccttgacatgctgaaagtaaaaggctctcctctatccctgacctccaattgtccagcattcagacatattgtacactagtctctacatgttcttgtctgttgggagagaagaagcccttcagacttaacaagaatgcccataagtaaagagaagcaaaagagaagatgacaaggaaaatcagaaagatggaacaggctcctttcttttctttctttctcatacttgagtcctgtttagaaccttatcatattctgccttgataattgagggcagggaccattcatctaacacagctgttggtacccaatatgattttgttgaattattaatgaaaaacttacaattttaaacatcagtgattattagtttgtaattctaactgcatttggagcttttcagttacataaactgttcctggtcagaagctggaaatggggaatgtgaacatgagttgtcactaaatatgtaaaacagattttcttacatgtgcatgtagatgattaagtaacaagaatgtatcctctcctgccactgtaatttgggtgtgccaccatacattgcttatgaaatattgtccagtctatataaaagaagctagagagagaattctcaattattttcagaaagaaaacctaccagtttatgtaggaacttctcaaagtcctgtttcacttcatgaggtttcttggtagcctttgcttggagtctaatcatggaataaagaaaatcagtaaccaaactaattgtccttatattgacaccatctaaatagccaacatttattaagaatttaatatgctgggcattcgtcaagcactttacatatattaattcaattacccttaaaacttctgaagtaggtactcctattatcctattttataaatgaggaaacaggctgagataggttcagacacccacccccgctgcatgtgcacacgtgccacacacacacacacacacacacacacacacatccacaacagtcatacacttagcaaggagacagtctgaacccaagcactgtgactcaagccttcagttccacccactgtgtggttctcatcccagcagtggcacatcctcttcagttagatggtttacacagtattgctttaactgattccactcataaggctctagcccagactttaaggagtgacagtggggagagaagagtaaaagagactggcaaggtagagacacaggaaagaaagagagggagatggaaaaggccagtgggtgacagcgcttactagactgtaagctcattgtgagcagggatccaggaatctcatgatatctgtcaccaagtattcattcaagaaatatttatgaaggacttgaatggttgaaatcaggaagcagcaggaacctttccagagatctaagaatgaggggagaagcaatggtagctaggcaaggaaggatagaaacttgagagaaggagaaacattagtaaaagtaacacagatgaggaagagaaacggaataaaggatatataagactattaatttcactggcaattttcaagtgaaatatttaaaaactatttttccatgaaattggcaggaagtaaaattttctgcaaatcccaaatacatgttgctgaagcagcaagtttagatgagctatttaaccccttgccaggcctagccaaggtttcttcagcagttagactagtgcacccctgaaggcagagtgggattacttagtcggaggttctcttgcatttgtgctctgtgactggtacatgccccctcactcattctctctctgcttgttttgtcttctcaagctgagtttcctccttgctgattgctctttaggcttcacatttttccttccatgccagtctcaaatctggctcttagtttctcagtaacaccttcttagaatctccttgaactgcacagtatccttagaatctgtctcatctcactaagttaaaatcactccctcttccaagtcactcttttagtttacaatctcccctctttaaaaaaaattaagttttattgagatatgttacataccataaaattgacccattaaagtgtacagttcagtggttttagtacattcatgaagttttataacattactaatcctccctctttctgattgcctttcctctcatgagtatctcttttgaagattacaaatggaagctcatacattgtgcctataactttaacaagcacgtgagatttatatatccaaatatgtatgtttcaacaatgtgccattgcattaatcatatttgaatacttcttgtgagttactctgagaattgtcctacattcttctgcatattctcagtggtgaaaattcttgtcctatgtggatttgatttttggaaacttgtaagagtcacccggaatggaaccttgtaacaggtgttgtgaagcagaaagctgggtgataaagtttttggtgaaaagtgagataagatcctaaagtagtgggttgaaattttctgatgtgactggaaaactagctttataagttctaaaatagtatttagaagtgtgaagtgtgactggcacaaagttatagtctccctagggggcttgtctgaagggctgaacttgtctgatacttcttattctgcacgtgcttacgggtgtgttggaagaagtaggttaatctcaatactttatagttgttcttcctatagtttaatttataaaataaatgagcccaatttttcttgcttcattgaggaaaaatgtttatatgcatagaggaagaagggaaataaaaaactagcccaatagagaccagctaaatctgttgtttttctagtttacaacttccataggatggggaaggcttataggtttattttgaaaaggacttgagcttaagtcctatggctggagagtaaaaatagatgatgataatgtttagcaattaattagcagagtagatgattttgtgattaaagaaagttaaaatgttactccagattaactgttaactagaaaacttttgcagttttgtggttttatgtaacatctcttcaattaaagatgatcttaagcactaccaagctgaataagagacaaacctatcaagctccttgtcaattctttcctgctgctgttttagaagttttatttcttcattaattctgagcttttccctataaagttaaagtttgaagttaaattttaaaataatgcaggcattactaattgggaaagaataaatcaacaatttactgatatacacgtgttagtaaaagccctctacaaaccaattcattccctccctatgcactatttagtgtaaagaacccctcagcacattccctgttacaaacatatgccaaaggtatcacccacaacacctgagtacagctggactccaccttctgctaccacaggggccctctagaaaggtgtccatccgtttttcccactaagcacaggaagtctaagggatatgtgtgtgtggacgtacacatgcgtctgtgggtgggtgggcaggagacgggaatggggacccttggaaagcaggggcgcaggcttttagatctgcccgctggataggacataactggtggtcctccatttacttctcttggaggtgctccttggacagcaggaggcacccaaaagggaggatcatcctttctccccttaaaggcaatgacatctcaaggcagtaaccttgacagcatggatagaagaactggaccctgcccatttgttcttgtaaaaattgatggatattctctcattaacccattcctagcttcctagcacataagattaccatgactgaccacaagcaattattttataaattattatgaataactgcaaatgttcccccaagaaaacatttcaggaaggactttgctgtcttgatttccttgcttgacaccagcccagctgccaccccagctccagggaattccttccactgcagggaatttttctgctagtcttccagggcttatctttgtaaatggacgatactccagtctccattccctggagctcttgcctcttcctgttggggtgcacccctccagtcacaccaagcaaagcttccttcctttcttctgtccctctcacttgccatggctccatggttacaacatacacccttgacacttacctgaaaagaatctctgagtctataagatgctcagacatgactctcctcatcattaaggaacttagtttagatgatttctctgattgtttccagttctaaaaaagtattattttatatttaacaatagtatagcatcaacttacatcctaaaatccttttggttccttgcaaattgtctttttgcctcctttataacatcacggtatgttggagcaggtagtgtgctaggcttattattaaggaatgattttcaattaggaacatttgggaagtaaacagtacccttcacagaggaaccaaggggaccgtgtgaccttcacttttcagtaatgaagagtctcaagtataaacatgaatattatgtctggagttacactcagaggactgaaagaagaaaacatcactttaaacttgtgtcccattatctcaaccacagcaaccatagggcactatgatttaatagtttcataaatcctgtaattaccttttgtatgtgtttgttttaaaagcagcaacttgttaaaggtaaatattaaaaattaccaaaatattaaaaatgtaccaaaattcatttttttcttatttattcattttcgagacagggtcttgctttgtcacccaggctggagtgtggtaacatgatcatagttcactgtgacctcaaactcctgggctcaaaggaatcctcctgcctcagcttcctgagtagtagacagtttctcgctatcttgcccagactggtcttgaacttcaaactcctgggctctagcaatcctcctgccttggcctcccaaagtattgggattacaggtgtgagccaccacacccagctttcatttttacatatactgagaaccttaaagactctttaattctaagaggctttgggggcaactggcagcatgcgtggctgcctcagttagcctggcttctgccatcttcccagaagaaaggtggtaatcagaatgtccaagtatgttgctaatgaagctggattcctctgtcctgtctgtttctggtgcagtctgtggatatgtcctaaccttggccttaacccatgcctgatctggcaaaacagacacttccctttgaagtggcaattggccagtattggccaatattagcaaggagacagctcctcagcttgtgttaaatgaagaccttagcctcagtgttacactaggagctcttaaacctctgccatcactaagatataggggatgaactgtcctcttacagccccactcccattgtgaaacaaacttcagtattacctttctctgaatatagtttgcccatttttagaaaactttattttccatttcaaggctgttcctgatgctcattttatttatttttcactaagtattttattcaatttatttaaataatttatttatttttcccttggtaagtactttctaaaaaataatttcaacttttattttagatccaggggttacatgggcaggtttgatacatgggtatatttcacgatattgaggtttggggtctgaatgatcctgtcatccaggtagtgagcacagaacatgatagatagtttttcaacacttgctcccctcccttcccttctcttacagtatgcagtgtctattgttgacacgtttatgtccatgagtacccaatatttagctcccacttacagttagaacatgtggtatttggtgttatttacttaggataatggcctccatctgcattcatgttgctgcaaaggacatgagtttgtcctttatttatgactatgtagaattccatggtgtatatgtaccacattttctttatccagtctgctgttgatggggatctacgttgattccatgtctttgctattgtgaatagtgctgcaatgaacatatgagtacatatgtctttttggtggaataatttatttttcttttgagtatatacccagtaatgggactgctgggttgaacggtagttctgttttaagttctttgagaaatctcaactacttttgacagtggctgaactaatttacgttcccaccaacaatgtataagctttccttttctctgcagccccatcagcatctattgttttttgactttttaataatagtcatcctgactggagtgagatgatatctcattgtggttttcgtttgcatttctctgctgacgagtgatgctaagcatttttgcatatgtttgttggacacttgcaatgtctgttcatatcatttacccactttttttttttttttttttttttttttagtattatactttaagttctgggatacatgtgcagaacatgcaggtttgttacataggtatacatgtgccatggtggtttgctgcactcatcaacctgtcatctacattaggtatttctcctaatgctatccctcccacagccccaccccctcaacaggccccctgatgttcctgtccctgaatccatgtgttctcattgttcaattcccacttatgagtgagaacatgcaatgtttggttttctgttcttgtgttagtttgctgagaatgatggtttccagcttcatccatgtccctgcaatgttttttatggctgcatagtattccatggtgtgtatgtgccacattttctttatccagtctatcactgatggacatttgggttggttccaagtcttcgctattgtgaacactgccgcaataaacatacgtgtgcatgtgtctttatagtagaatgatttataatcctttgtgtatatacccagtaatgggattgctgggtcaaatggtatttctcattctagagccttgaggaattgccacattgtcttccattgttgtgtcttttaattgggggcatttagcccatttacatttaaggttaatattgttatgtgtgaactggatcctgccattatgatgctatctggttgttttgcccgttaattatgtagtttctttatagcattgatggtctttacaatttggtatgtttttgcagtgcctggtaccggttgttcctttccatgtttagtgcttctttcagctcttggagggcaggcctggtggtgacaaaatctctcagcatttccttgtctgtaaagattttatttctccttcacttatgaagcttagtttggctggatatgaaattctgggttgaaaattcttttctttaagaatgttgaatattggctcccaatctcttctggtttgtagggtttctgcagagagatccgctgttagtctggtgggcttccctttgtgggtaacccaacctttctctctggctgcccttaacattttttccttcatttcaaccttggtgaatctgacaattatgtgtcttggggttgctctttttgaggagtatctttgtggtgttctctgtatttcctgaatttgaatgttggcctgccttgctaggttggggaagttctcctggataatatcctgaagagtgttttccaacttggttccatactctccatcactttcaggtacaccaatcaattgtagatttggtcttttcacatagtcccatatttgttggaggctttgttcgtttcttttcattctttttttctctaatcttgtcttcttgctttacttcattgagttgattttcagtctctgatatcctttctaccgcttgatcaattcagctattgatacttgtgtatgcttcacgaagttctcatgctgtgtttttcagctccgtcaggtcacttatgttcttctctaaactggttatcctagttagcaattcatctaaccttttttcaaggttcttagcttgcttgcattgggtcagaacataactcctttagctcgcaggagtttgttattacccaccttctgaagcctacttctgtcagtttgtcaaacttattctctgtccagttttgttcccttgctggcaaggagttgtgattctttagcagagaagaggcattctggtttttggaattttcagtctttttgcgctggtttctccccatcttcatggatttatgtacctttggcctttgaagttggtgacctttggatggggtctctgagtggacatcctttttgttgatgttgatattattcctttctgtttgttagttttccttctaacagtcaggcccctctgctgcaggtctgctgtaggtccgccccagaccctgtttgcctgggtatcactggcagaggctgcacaacagtaaagattgctgcctgttccttcctctggaagcttcgtcccagaggggcacccgccagatgccagccagagctctcctgtaggaggtgtctgttggcccctactgggaggtgcctcccagtcaggatacccaggtgtcagggacccacttgagaaggtaggctgtcccttatcagagctctaacgctgtgctgggagatccgctgctgtctttagagctgccaagtatggacgtttaagtttgctgaagctgtgcctacaaccgccccttgccccacgtgctctgtcccaggtaggtgggggttttatctataagtccctgattggggctggtgcctttttttcagagatgccctgcccgtagaggaatgaatctagagaggcagcagcggccttgctgagctgcggtgggctccacccagttcgaacttcctggaggctttgtttacactgtgcgggtaaaactgcctactcaagcctcagcaatggtggacacccctccccccaccaagcttgagggtcccaggttgagctcagactgctgtgctggcacgagaatttcaagccagtggatcttaacttgctgggctcagtgggggtgggacccgctgagccagaccacttggctccctggcttctgccccctttccaggggagtgaactgttctgtctcactggtgttccaggtgccactggggtatgaaagaaaactcctgtggctagcttggtgtctacccaaacagccgcccagttttgtgctggaaacccagggccctggtggtataggctccagaggggattcctggtctgcaggttgcgaagaccatgggaaaagcgcagtatctgggctggagtacacggtacagtccctaatggcttcccttgggtgggagagggagttccccggccccttgtgcttcctgggtgaggcagtgccccgccccccccctcccccccccgctttgcctcgccctccttgggctgcacccactgtccaaccagtcccaatgagatgaaccaggtacctcagttggaaatgcagaagtcacctgtcttctgtgtcaatcttgctggaagctgcagaccagcgcttttcctattaggccatcttgccagcaaagtccttgcccactttttaatggggctatttattatttgcttgttcagttctttaagttccttacagattctggatataagaactttgttggatgcatagtttgtgaatattttctcccattctgtagattgtttattgactacgttgatgttttatattgctgtgcagaagctctttagtttaattaggtcccacttgtcaatttttgtttttgttgcatttgtttttggggacttagtcacagattatttctcaatgccaatgtacagaatggtgttttctaggttttcttctaggattcttatagtgtaaagtcttacatttaaatatttaatccattttgagttaatttttgtatatgatgaaaggaaagggtccagttccaatctttggcatatggctggccagctatcccagtaccatttattgagtaggaagtcctttccccattgcttgtttttgttgacttttttggagatcacatagttataggtgtgtggctttatttctgagttctctattctgtttcatcagtctatgtgtctgttgttgtaccagtaccatgctgtttgggttactgtagccttgtagtatagtttgaagttgggtaatatgatgccttcagctttgttctttttgcttaggattttttttggctatttgggctgttttggttttagaatagtttttttctaattctgtgaaaaattacattggtaattggatagaaatagcattgaatctgtaaattgctttgggtagtatggcaagtttaacaatattgattcttccaacccatgagcataggatgttttttcatttgtttgtgtcacctatgatttctttccacagaattttctagttttctttgtagagatcttgcacctcctgggttagatgtacctgtgattacaggtgtgtgccaccatgcctaatttttgtatttttagtagagatgaggtttcaccatgttgcccaggctggtctcaaactcttgagctcaactgatttgcttacttcaatctcccaaagtactgggattacaggcttgagccactgtgtctggctgagatctttctaactttttgaggtaagcattagtgctataaacttttgtcttaacatggtttttgctgcatcccagagattttggtatgttctggttctgttttcatttcttttaaatatttttttcctttctgccttaatttcattgtttacagtcaggcaggggcaatttgtttgattttcattcaattgtgtggttttgggaaatctttttggtattgatacctatttttattccaagagtatggttgataagagtttggtttttttgaatttatcaaaactgctttatggccgagcatgtggttaatattagagcatgttctgtgtgcagatgatagcaatgtattttctgtggttgatgggtgaagtattttgtaggtatctcttatgtcctattggttaagtgtctaaatcaagtcctgagtttttttgttgggttctgcctcgatgatctgcattatgttgtcagtacggtgttgaagttccccgtcccattattgtgtgactatttctttttgtatgtgtaaaagtagttgttttatgaatctgggtgatccaatgctgggtgcatatatatttaggatagttaagtttcctggttgaattgaactttttatcattatgtaataccctttgtctttttttgactgttgttggtttaaagtctgttttatctggtataagaatagtgactcctgctcttttttgttttccatttatgtgatagaactttctccagtcctttaatttgagcctaggggtgggtgttgttacttgtaaaaagggtctcttgaagacagcagatggactgatcttgttcttttatccaacttgcaactctgtgccttttcaatggagcatttagactgtttacattcaaggttataattaatatgtgaggctttggtgctatcgtgaagttgttagctggttgctttgtagtttctattgtgtcattggtttatagtatctgtggctatatattcaagggtgtttctgtggtagaaggtatcctcctttgtcttcccttttagaactcccttaaagatctcttatgagacaggtctagtggcaatgaattcccttagtgcttgcgtgtctggaagattttatttctccttgcttatgaagcttagtttggtgggatattaaattcttggttagaatttcttttctttaagaatgctgaaaataggcccccaatctctcctggcttataaggtttttgctgagaagtctgctgtagcctgaaggtgttccctttatctggcctttttctctagctgcttttaagattttttctttagcactgaccttggaaagtctggtgagtatatgccttggtgatgttcattttgtatagtatctcacaggtgttctctgaatttcttgaatctggttgtctacctctctaacaagataacaagattagggacactttttgaattattccttcaaatatgttttctgtgttgtatactttttctcctctctcaggaatgccaataatttataggtttggtcactttacataatcccatatttctcaaagattttgtttatttttcttaattctttttttaattttttgtcagacttggttattttgaaagactggtcttcaagctctgaggttttttcttctgcttggaacagtctattgataaaactttcaaatgtgttttgaaaatttcagttgagtttttgaattccagaagctctgattgatttcctaagatgtgtatctcttacttcatttcctgaattgatttaggagtttctttgtgttgactttcaacacactctagtgcctgtgtttaaggctgttgagcaagatggaagagtgactgtattttcacttacatgaaaatagctctacccaatacgattttatttgttgcctggcagaggccatcccaggaagtttcttcccagttaaggcctcattttgggatgagatttgtttccattgtgttcctgagggcaactcattttactccaggagagaaatgtaatagtgatgtaggttgtattcaaacagtaactaactgaatggccaatttatccactggaatttcctgctttcaacttattgttctggcaacctgtagtctgaaagacagcattgtcttcaggcatcacatgatatccatgagatctgatcatactacacaaattaccctgcattcaggaatctcctacatgatattgctggaataagtgtccatatgaactacagttttgctgatatgaattaattctgcatggtattatttaaaaataaaacatccttaggctgaatccaggttactttcaaattttggctttgagatttcattctgcatagtaatattttttatcatttaataaacattcaacattaacacattagtcctcaaatctaaaaggaaagtagtggaagcctcattttaaataattgaagcagcgaaaactaaaccttatgaaatctcatattgatgaatgtttcagcatgacttaaaaatatgattgtacaaagaatattatagaagcattaatgtaatcaaaagaaagaaaattatcataatcccattctccaaaaaataaaaattattttcatttttctgtgtcttttcatctgttacatacaaatacatattttacaatattgttataatggtatggttgctttctttacccaacatactatcataatttatgcattcaagttttataataattattttaatgtttgcaaaaggttacactgaatgtacatacctaaggtgctctatttctctggtaatatagcatggtactaactttattgtgtttctttatgtgaaatcactagtttctcctctcatccccaattgtgtgttccaatatgacactttccccacaagagcctagcgagggaggactgtaactcttttatctgaaatccctctgaattcgaaggaaagatagccctggtcttgcttagcttggacttggagcaatacacataattgaaaatagaggtggtggtcctgctcattacataaacaagaagtctgcaatctcagttatgccaggtttccatctttagcttttttccccactttggctgtcacagactgtgaaggagtctggcagccttcaaataaaaggttcagcaatcttcctgaaatgactgaaacttgaagatatcaagttacttttaatgcccgtcttactccctcctgctacatcaagtgactgaacatctaaaatcttttctgagtaaaagctgcagaaaattgaatattattcttcttgtagaatgattaatacaaccaatgatacactttttctaaagtataaatggtgttgagctgcttaaactttatttgcatacagctattacctgctactatttaatttcttcctcagagtgcctgttagaacttcaaagattttattcttctacaaagttattgtgctctcttgagtatcatttccatgattatttgtgagggaggtgatgtatttgtcactttgaacaaattttggattttctttgacttgtacatttattatatactattggtattgaaatcaagaattatgttttatttcttataaattattaattttgaacatatgactttattgaaatgaactgggtagacatacgttcctcataaagtcattctaattgtaaaatttggtcatggttgtacatttgtgctgtataatgaagtgctgggctgcatgatgttggtgttgactgaaatcttagcattttcttgtacaactcagtggtgatggttttcagtagatttctgttgaagtgtgttaatgaatatcttaacttttattctttttagacacttataactataaattttttccgaattagataaaacagaatacttagaccatatacattatgaacaatggttatattctactccttggggatgaatgtggcaacatgtttttcaattccaccatctgaattggcctcatactttatattcccatgcactgctatatggtaagccactgaatggaagattcacttggggacaaataaaatagtccttttctgggacttcacaacagtggttgggatgtaacaaactaagaccttctcaactcaggactctggggtctttcatctccctttataatcacagaatattagagaaacaaagggttttggaaattgtaggatccaatttaattagattagaaatgaagaaactgaagcttctagaagtgaagtaccttgcctttgagagattgagtgtgtgtgagagactcaggaaaagaatggcccaggggcaaatttcgtacttatctgccaaaagtattgtcctagaattgaaaccaagaggttaatttgatcaggtctgcctgccctgcttgcttttggtcacttgcttttgttattttttttttttttcctttttccatgaagctgaaagccatgctgctgaacacgaaacttaacctttactggctgcttgatagataccatccatagttcaccaaaacaacacttccgttgtttttcagaaacttgggccagctcctgtccaattcaaactggttgagaccaccagcccttgagctgggcctgcgcaagtgcgcaacaaatggccttttgaccatggagggccaaaaactctaccctcaggttgtgctaacacgattttctatacatatgtcctacaaaatgctatgaagcctgactatgcttgcacagaatgaacctgttacttcattttccccattgccaatcacctttccccacacctaaggccacccccatttccctaacccaaaaatatccctaagccttattttaggggaagtagatgtgagagctgttctcctgcctccttgcttggcagctttgccaataaatcttttctcttttgcaaaacctgtgtcacagtgattgattcactgtgcatgggcagaacagacctggacctcggtgataacagaatgaagcttcaggaggctttgctgtctatcttgtatcccttagagatagtctttggattatcctcagagttgtttctgagcatctcaggcttaaggcgaaagtgcccattatacacataatgctaattgtataacaagtaaaaggaagctaggcagcaagctgtggccagaatctcctactttatacactagaatgcacttagttcttaatcctaaaaactacattcttgaaataagcttattagcatgtggcctaaactgatcttagagcagttatattctgtttaatgtttacctttgcctataagtaaaatattttaatgttagatttgtagtttacccaacatccatgtatcaaaaacattttttaaaaggttataagcacatgtgacttactctataggaaataacatcattgttggaatcttacccagattctaaatggcctagaattatatgtaaaataggattgcagttctagtaagtttcactatttaatacatcattatcagcagttttgtagtatactcaggaaattgagggaagggctattgaaaacattaacacttattcaagtaaaataattcaacaaaattgccaggacttgtattaggcatggagacacaaaaataagtagagacatggtgttttgcccttaagaaattagtaagaataagaagtgacaacatttttgaagtaggagacagaagaactataaaatttaggaataaagactgtaacagcttagtgatctatgcttttagtgcagggttgtttaaaagtagatgaaggtgcttctcctttctactatagcattctatgtataggacagattattgatgaccctatttccctgtctttgctattagattgcttagcaccctcatactagtatcagtgctggtatgtaacaggtatttggtaaaacaaacagtaaatgtttactgttctttgcatactgaacgagtattcttattggtatctaggtgcagttgagttatagatttcatcctgagaagcttagttattatcataaagttaattagtttttgctactttgttaaagaagtcagagaagtattgataaccttcaatgaaaacttccattaaaatggataacattggccaggcatggtggctcacgccagtaatctcaacactttgggaggctaaggtgggtggatcacctgaggtcaggagttcaagaccagcctggccaacatggtgaaaccccgtctctactaaaaatatacaaattagctgggcgtggtggcagatgcctgtagtcccagctactcgggaggctgaggcaggagaattgtttgatcttgggaggtggaggctgcagtgagctgagattgcaccattgcactccagcctgggtgacaagagcaaaactctgtctcaaaaaaaaaaaaaaaaaaaaaaaggctaacataaaaagtgttagtgcttcaaatgatcagctttagttatctggaaaatttaattatgggccacagatcactccctgataaggctggataaacaagttgttgatttacagaaattccagcatttttataatttatgtcctttaacagagacagctccaagggttgctttgaaggactttggctattcccattattttcaatcacccctctaccctccacaaagctattccaaataaatatacaaacttcgggtttgctttgcaaatacatgttcaagacaagttccctagctctctgcttgaaacttaattgaatatctaagtccttcatataaagatagaacttctggaactcccactttgaaatttgatatatcactaaaaaaacagaaaacagacacatgtgaggcaaccaccaaaaggagccaatttcgtttttccttcaataaacaggactttagctctaaactagaatataggtttctactttctgaaattttggagcacctcacagaatcactcggagccagaggctggaagtgatttttgtggggcaaatgcatggtaatagagtaggttttgtttactttctcctttgtctgcccacctcctaagagagaagtaggttgggtgaacacaaaattattatctgatcaatatttacttgaggtattgcttttgagtcctaaattccaagcattcaaaaggtttggcttttccacctgattttattgaccaacaatatttatagcaagaaggcttttaccccagcctttgatattcacttaaactatttgaaaatgaagttttcttctcttatttgatacaaatgtggctttaccacatttctcctaaattgaacaaaccaacctattactaactctccagaatgagaattcatatttccccccttattcttccgttgagtcatgtttataatctaaagcccaaattgtgctttaaaaaatgatgtaactcactccctggaacctgattacctaaagcaactgaagtcttttatttaattcactagttagtgttaataacaagttggtgaattgtagtctgtatcttgtatattttattaaaagaaaatccctaactagaacttaaactgagtttgtaagaaaaaatagccagatattacaattttttaattgtctctggctcaaggtggctgacaatacttacaatactcatactcattcatgtgaaacaaaactcctttgttcatcaagttcttataaaaattattaatttcattttcattttaaaactcatcctccccctcttaactggcagagtttataaaaggaataaactagcaatttactcatcaaagtttagaacagcttcaagtgtaagccatcaaaaataaaataaaatgtctttctctaagagcaaaatttaaatacttgatatatcctttattttactatgccttgccaatatttttatgcttattctctattacataagttttaaatgtatttttaaaaatctgaaattggttcctttatggaatccctgggagtcaagtaggggagttattaggttattttaggtatttgatatatggtagcatcaaagggaattgagcagagattcactgatcagaaatattctaactgtaaaaaggcaattgcagacttttatacagaggtaggttaccaatagtcattgacctctactgacttctgggcttatacagagagtgactagcttttttctatgggttgaagccatgtgtatggaccaaaactctgcatgatgctgacagtatttttctgtaagcaaaaacgataaaaaacaaaacaaaacaaaacacaaaataacccgaaactagaatgaaaggggaaaaaaaatccaaccaaaacaaaatgagagggagaatttaagaatttagatgggaaattaactttgttggtaactttgttggatggatgaataaggtaatatgtaaactcttaagcccctaaacttctaaaattagaaggctgcacgtgacaaagtaaaatacagttctgtatgtgttggctttctgatatccctaggtggtatatcaatttctataaaataaattaaacttttcttcttactcaaggcagtgttgttcatagtactttctgtgacaatggaaatgtctgacatttgcattgtccaatagtcacatatggttaatgagcacttaaaatgtggcgagtgtatcagattaactgaatttctacttatacttaatttcattaatttaaatgaccacacatggctagtggctaccatactggacagtgcaggtctagaatgatgacaaacatcataaatacctgtgtgcacatacttatatttctttaaattttgctctaaataatctatattgcattttgggtaatgtaaaagtatcattgactggatcacatactaattctcgatctgttaaacactgttaagtttttactgggagatgctaccaaggttataagaatagtgggggaaagcaaatagtttaaactgtcttttatgggctagttccacaaaactgagcttaaaagtaagaacaaatggttcatctcttaaaacaacagattcagaacccctatgagggtactgtgatttgccttttcccgtaatctaatttttgaccttggtgggtcttcctgcaccatttgccttttataatccctaacacacaggaagcttctctcttatttgctccaaggtgaatatgacttttcctttcctaacagtgctctctaagatatgcgagccaaagacaaagtgagctgggccaatggtagggataaatgggagtgaataagtacaaaggagagactgctgataggctcatcctaatccactgcatggaacagctttccccgtgtgcatcacattcccccttaaaagcacgttgttaaggccaccatgtaccactgagcacatatatgctacacagttcttagagggaccacactggccagtgcataacctactcaaccatacgctgtggtttgagctctacaatcaatgaatttttctcattctttcctatataaactatccattgtgtagatcatttagttttgttagccttgtttgcacttatttgaattcaggtagtagagaaataagaactgcataggcacagtgtgtgattatacactgtgcttctatacaaataaaatattttcagtttcaaatgtcttccacacaatgcaaaaatgactactagctatggaattgttagtttaattcagtacttagccactccttttagatcatgttaaagtctttcctggaagatacggaaagaagatacggccaattccgcccaaactctggagcatgcaactccaagtcatgacagcaaatgagatcttaccataggacaatgttgatttttttctaaaacatgtaattcccatatagtttttaaaaatctgcttccatctaatcgactattggagatctacaagaaaagtagtgagcaatcaatggattgttttctctgtaatggtgagaactgaaactaacacatacaccgtcccaagttgggttttccggaaagcggacctaaagacaaagatcagcgtgtaggaggcttatttgagtgctcttggaatcaatacctgtggtttcaagggaataaagtaacattggacagacagaaaagttgaaccctgataacagtcccaatggatgtctcagctgaccctataagggaggtctgaagctcagatgacccttcagaattgttctgaattggggctaaggagccagatctttgtacatcaccttagtcagtggatgtgggctagcttgggaagggaatatggtttagttgtctattgctatataacaaacaacctcaaaaacttaggggcataaagcaactctaatttatattattacctctgtagttctaggtgttgactgagctcagctaggctgttctaagatggagtctatcatgtagttgaggtcagttgttgactgggactggagccatctcaaagatttcctcatttatgtgtctggggctgatacttgctgtggctcatcctcagctgtgactgctaactggaacacagactctccatatggtctgaacttgttactcatatagcagctagttccaagagcaagcatcccaaaagcaagagtgaaacaggcagaagctgtaaagccatttagtaccttgtctcgaagtcacaaagtcaaactctaatggttgaggaattacaaaagactgttcaaactcaagggcagtgaacattgatgctatctcttgatggaagaattggtgaggtcacattgtaacaggagcatgtgggaagggcaatattgttatggcctcttgaaaaatataatctgccataggacttatgttaagtaagtccactatcagcagctgaggaaatccttgtagggtattggtagccaagggccttctgccttcagtatcatcccaccccagcagctgaaggatgtcttttatttttctttatctaggcttcagagcgcctaccatatgtattttcctattctgtgttatgcataatttttttgtccctatgtttaacaatattgagagtaagcaaaaataacttagttacttgctccagaacatccttttccctaaagataagacagtgaacaaattaaaatagcttggtcatcacagcgcacttcaagacccttggtccactggtccctccaatccaaaattataatatcaaaacctctacccaatcccaagcagttccctatcttgcaaagcctgcctcaaaaatcacctacctcagtccttaaaaccccataatatcctcctggaatttcttggttttgagacattcctaaagctctgttacactggtgttctgtcttactgcagtgtattaaacttagctttgcttggtcaacaggttattctggtagtcttttaggggactatgcacagacaatggcaaaaacagtgtctaagcattctttctcttagtgtagcttcagaagaacttggttctatggtgagttgatgaaatgagaacgtcatcatttcagggaaaaatggaaatagttgccaattcagccactgatagtgtggaaagtcaaattcctccaacaaaatcatagggacttgaaatttatttagtccaattcatctgcttaatatgaatggagaagaggctcaaatttgggctcaaattagagtaaaattttttcctatactgctgaagagtcctcttcagtgcaatcaagggttttatgtttcctctctgatcctcatcttcctcttcccttcgcctgtttgggatcacactgtgtctctgtttttcctcttttcagacaattagaggaaatatcaattctccatcatattttggcagaggaagtcttttatctctacgttgccacaggatttttaggcctgtatgttttgaacaaaaatatacttttaagatagctcacatttcatcaagttaacgtgtgctttccattatctgaaaaatctcattaacagataattttatgacattgacacccaatttttgaagttgaaggaaaataagggtttttttttttttttgtaaaatctcataaataatagaacaaactttcttgcagtataggctttcctattcacttcgcccagagtattttagaaggactgagggaaaaaagatattttaccttgtatatattggaaaaataactagatgggagggttctggattagttgtttttttcagatatttgtatttcagctaatttatccttttaaaaatgtgattgcattactaggttcttaccatatgttaattaagtagtcaatgacttgaaatgaaaaatacaattgatagttactttagtaataacttacaagttgttattcacatattggttaatgggaaaaatgtgtgttcatgtgatgaagattattggaaatcattatataaataatggtaaaaagaatacagagctggtgacacttctggagtctcagagttctttttttcactgttgacaattttcttctcccacatcacagataattcacaacagattatttctttatatagcttttatttttatgctaggataaatgctgatatatcccacattattttcaattgttgagtttaaacaagtcattcctgaacactatttacatgtttaaaaagtctgtgtatggggaggagccaagatggccgaataggaacagctccggtctacagctcccagcgtgagcgacgcagaagacgggtgatttctgcatttccatctgaggtaccgggttcatctcactagggagtgccagacagtgggcgcaggtcagtgggtgcgcgcaccgtgcgtgagccgaagcagggcgaggcattgcctcacttgggaagcgcaaggggtcagggagttccctttccgagtcaaagaaaggggtgacggacggcacctggaaaatcgtgtcactcccacctgaatactgcacttttccgaccggcttaaaaaacggcgcaccacgagattatatcccgcacctggctggaagggtcctacgcccacggagtctcgctgattgctagcacagcagtctgagatcaaactgcaaggtgggctgggggaggggcgcccgccattgcccaggcttgattaggtaaacaaaacagtcgggaagctcgaactgggtggagcccaccacagctcaaggaggcctgcctgcctctgtaggctccacctctgggggcagggcacagacaaacaaaaagacagcagtaacctctgcagacttaaatgtccctgtctgacagctttgaagagagcagtggttctcccagcatgcagctggagatctgagaacgggcagactgcctcctcaagtgggtccctgacccctgaccctcgagcagcctaactgggaggcaccccccagcaggggcacactgacacctcacacggcagggtactccaacagacctgcagctgagggtcctctctgttagaaggaaaactaacaaacagaaaggacatccacaccaaaaacccatctgtacatcaccatcatcaaagaccaaaagtagataaaaccacaaagatggggaaaaaacagaacagaaaaactggaaactctaaaaagcagagcgcctctcctcctccaaaggaacgcagttcctcaccagcaaaggaacaaagctggatggagaatgactttgaagagctcagagaagaaggcttcagactatcaaattactctgagctacgggaggacattcaaaccaaaggcaaagaagttgaaaactttgaaaaaaatttagcagtatgtataactagaataaccaatacagagaactgcctaaaggagctaatggagctgaaaaccaaggctcgagaactacgtgaagaatgcagaagcctcaggagccgatgcgatcaactggaagaaagggtatcagcgatggaagatgaaatgaatgaaatgaagcaagaagggaagtttagagaaaaaagaataaaaagaaatgagcaaagcctccaagaaatatggggctatgtgaaaagaccaaatctacgtctgactggtgtacctgaaagtgatggggagaatggaaccaagttggaaaacactctgcaggatattatccaggagaacttccccaatctagcaaggcaggccaacgttcagattcaggaaatacagagaacaccacaaagatactcctcgagaagagcaactccaagacacataattgtcagattcaccaaagttgaaatgaaggaaaaaatgttaagggcagctagagagaaaggtcgggtcaccctcaaagggaagcccatcagactaacagtggatctctcggcagaaaccctacaagccagaagagagtgggggccaatattcaacattcttaaagaaaagaattttcaacccagaatttcatatccagccaaactaagcttcataagtgaaggagaaataaaatactttacagacaagcaaatgctgagagattttctcaccaacaggcctgccttacaagagctcctgaaggaagcactaaacatggaaaggaacaaccggtaccagccgctgtaaaatcatgccaaaatgtaaagaccatcgagactaggaagaaactgcatcaactaacgagcaaaataaccagctaacatcataatgacaggatcaaattcacacataacaatttaaatgtaaatggactaaatgctccaattaaaagacacagactggcaaattggataaagagtcaagacccatcagtgtgctgtattcaggaaacccatctcatgtgcagagacacacataggctcaaaataaaaggatggaggaagatctaccaagccaatggaaaacaaaaaaaggcaggggttgcaatcccagtctctgatacaacagactttaaaccaacaaagatcaaaagagacaaagaaggccattacataatggtaaagggatcaattcaacaagaagagctaactatcctaaatatatatgcacccaatacaggagcaccaagattcataaagcaagtcctgagtgacctacaaagagacttagactcccacacattaataatgggagactttaacaccccactgtcaacattagacagatcaacgagacagaaagtcaacaaggatacccaggaattgaactcagctctgcaccaagcggacctaatagacatctacagaactctccaccccaaatcaacagaatatacatttttttcagcaccacaccacacctattccaaaattgaccacatacttggaagtaaagctctcctcagcaaatgtaaaagaacagaaattataacaaactatctctcagaccacagtgcaatcaaactagaactcaggattaagaatctcactcaaaaccgctccactacatggaaactgaacaacctgctcctgaatgactactgggtacataacgaaatgaaggcagaaataaagatgctctttgaaaccaacgagaacaaagacacaacataccagaatctctgggatgcattcaaagcagtgtgtagagggaaatttatagcactaaatgcccacaagagaaggcaggaaagatccaaaattgacaccctaacatcacaattaaaagaactagaaaagcaagagcaaacacattcaaaagctagcagaaggcaagaaataactaaaatcagagcagaactgaaggaaatagagacacaaaaaacccttcaaaaaattagtgaatccaggagctggttttttgaaaggatcaacaaaattgatagaccgctagcaagactaataaagaaaaaaagagagaagaatcaaatagacgcaataaaaaatgataaaggggatatcaccaccgatcccacagaaatacaaactaccatcagagaatactacaaacacctctatgcaaataaactagaaaatctagaagaaataatggataaattcctcgacacatacactctcccaagactaaaccaggaagaagttgaatctctgaacagaccaataacaggagctgaaattgtggcaataatcaatagcttaccaaccaaaaagagtccaggaccagatggattcacagccgaattctaccagaggtacaaggaggaactggtaccattccttctgaaactattccaatcaatagaaaaagagggaatcctccctaactcatttatgaggccagcatcattctgataccaaagccaagcagagacacaacaaaaaaagagaattttagaccaatatccttgatgaacattgatgcaaaaatcctcaataaaatactggcaaaacaaatccagcagcccatcaaaaagcttatccaccatgatcaagtgggcttcatccctgggatgcaaggctggttcaatatacacaaatcaataaatgtaatccagcatataaacagagccaaagacaaaaaccacatgattatctcaatagatgcagaaaaagcctttgacaaaattcaacaacccttcatgctaaaagctatcaataaattaggtattgatgggacgtatttcaaaataataagagctatctatgacaaacccacagccaatatcatactgaatgggcaaaaactggaagcattccctttgaaaagtggcacaagacagggatgccctcctcaccactcctattcaacatagtgttggaagttctggccagggcaattaggcaggagaaggaaataaagggtattcaattaggaaaagaggaagtcaaattgtccctgtttgcagacgacatgattgtgtatgtagaaaaccccattgtctcagcccaaaatctccttaagctgataagcaacttcagcaaagtctcaggatacaaaatcaatgtacaaaaatcacaagcattcttatacaccaacaacagacaaacagagagccaaatcatgagtgaactcccattcacaattgcttcaaagagaataaaatacctaggaatccaacttacaagggatatgaaggacctcttcaaggagaactacaaaccactgctcaaggaaataaaagaggatacaaacaaatggaagaacattccatgctcatgggtaggaagaatcaatatcgtgaaaatggccatacagcccaaggtaatttacagattcaatgccatccccatcaagctaccaatgactttcttcacagaattggaaaaaactactttaaagttcatatggaaccaaaaaagagcctgcatcgccaagtcaaacttaagccagaagaacaaagctggagacatcacactacctgacttcaaactatactacaaggctacagtaaccaaaacagcatggtactggtaccaaaacagagatatagatcaatggaacagaacagagccctcagaaataacgccgcatatctacaactatctgatctttgacaaacctgagaaaaacaagcaatggggaaaggattccctatttaataaatggtgctgggaaaactggctagccatatgtataaagctgaaactcgatcccttccttacaccttatacaaaaatcaattcaagatagattaaagacttaaacgttagacctaaaaccataaaaaccctagaagaaaacctaggcattaccattcaggacataggcatgggcaaggacttcatgtctaaaacaccaaaagcaacggcaacaaaagacaaaattgacaaatgggatctaattaaactaaagagcttctgcacagcaaaagaaactaccatcagagtgaacaggcaacctacagaatgggagaaaattttcgcaacctactcatctgacaaagggctaatatccagaatctacaataaactcaaacaaatttacaagaaaaaaacaaacaaccccatcaaatagtgggcgaaggacatgaacagacacttctcaaaagaagacatttatgcagccaaaaaacacatgaaaaaatgctcatcatcactggccgtcagagaaatgcaaatcaaaaccacaatgagataccatctcacaccagttagaatggcaatcattaaaaagtcaggaaacaacaggtgctggagaggatgtggagaaataggaacacttttacactgttggtgggactgtaaactagttcaacccttgtggaagtcagtgtggcgattcctcagggatctagaactggaagtaccatttgacccagccatcccattactgggtatatacccaaaggactataaatcatgctgctataaagacacatgcacatgtatgtttattgcgtcattattcacaatagcaaagacttggaaccaacccaaatgtccaaaaatgatagactggattaagaaaatgtggcacatatacaccatggaatactacgcagccataaaaaattatgagttcatgtcctttgtatggacatggatgaaattggaaatcatcattctcagtaaactatcgcaagaacaaaaaaccaaacaccgcatattctcactcataggtgggaattcaacaatgagatcacatggacacaggaaggggaatatcacactctggggactgttgtggggtggggggaggggggagggatagcatcaggagatatacctaatgctggatgacaagttagtgggtgcagcgcaccagcatggcacatgtatacatatgtaactaacctgcacaatgtgcacatgtaccctaaaacttatagtataaggaaaaaaaaaaaaagtctgtgtatgcatgtgtgatagtgggagcatgtgtttatagtaacattgtactcattatgacactgcattgagttcagatttttctaaactgcaacaaaatgtgaatgtttaaaactcatgttagcaatacagatatggcttatacacttttctttttaacgagacccatacagactacaccaacattttggctctgagttttcaattttttaaataatttgcattttgcatgttaaaaaaattattaaatttttgggtattctttggttagcttagtctcaacacataaagggcttgaggtggcttataaaaacatagacaaagtatgaagggagaattagcagctctaaatacattttatccaagattctgcagtttaaagatataccatgcattcagctctaaatcctagacatcaaagtttttctcctgttttactcataattcaaatatcaagtgaccaagtttttaataaaactccaaagatcatccaaaaattatatttaaatgttctgctaatgaattagtgtacattaactagtaaacaagtttatcatccttataaataaatatacatttaaaatcatgtcagaagacataagcactcctgtgatgtgaaatttcattgactccctccagtcctctccatacatacctccagtctactcagtgtttacatgtgaatccttacacatagacaataatgtcatcctccctcttgtgatttaggcaaatcactccttatcaatagaaatattacctgtggggttgcggaatagggaggttttggttaaagaggacaaagtttcagttaggagggataaatgataagtatttaaggtgatgaatatgttagcttgattcagtcattccacaatgtatacatatatcataacatcactttttaccccataaatatatacaattataatttgtcaattaaaaaattaatttaaaaaacttaaaaaatattacctatgatgcaaatttttttttaacttttattttaggttcaggggtacatgtggaggtttgttacataggtaaattgatgttacagggatttgttgtactgattatttcaccactcaggtaataagcataatacccagtaggcagttttttgatcctcaccctcctccttccctcctccctcaagtaggtcctggtgtctgttattcccttctttgtgtccacatgtactcaatgtttagctcctacttattagtgagaacatgtggttttagttttctgtccctgcattagttcacttaggttaatggcctccagctccattcatattgctgcaaaggacatgatcttgttagtttttatggctgcacagtattccctggtgtatatgtaccacgttttctttacctagtcctgttgatgggcatctaggttgaattccttatctttactattgtgaatagtgttgcaatgagcatacgcgtgaatgtatctttctggtagaaagatttatattcctttgggtatatactcagtaatagtattgctgagttgaatggtaattctgctttcagttctttgagaaattgccaaactgctttccacaacggttgaactaatttacattcccaccagcagtgtataagcattccttttctctgcaacctctccagaatctgttattttttgacttttccatagtagccattctaactggtctgagatggtatctcatcgtggctttgatttgcatttctcttatgattagtgatgttgagcattttttcatatgcttgtgggttacgtgtatgtcttcttttgaaatgtgttcattcatgtcttttgcccacttcttaatgggtttgtttgctgtgtgcttgttgatttaagttccttattaacatagtttggctctgtgtccccacccaaatctcatgttgaattgtaatccccatgtgttgggggagggtcctggtgggaggtgattggatcatgggagtggatttccctcctgctgttttcatgatagtgaaagttctcatgagatacgctggcttaaaagtgtatggcacttcccccttcactctcctaccaccacgtgaagaaggttcttgcttccccttcacattctgctgtgattgtaagtttcctgaggctccccagtcatgcttcctgttaaacctgcagaactgtgagtcagttaaatctcttttcttcataaattatccaggttcaggtagttctttatagcagcatgaaaaccgactaatacacttatagattctggacattggatctttgtcacatgcatagtttgcaaatatttctacccattctgtaggctgtctgtttactctgttgataggtcttttgctgcgcagaaggtctttagtttaattaggtttcatctgtcaatttttgtttttcttgcaattgcttttggcatctttatcatgaaatctttgccatttcctacgttcagaatggtatgtcctaggttatcttccagagtttttttaataggtttaggtcttacacttaagtctttcatccatcttaagttgatttttgtatgtcgtgtatggaaggggtccagtttcaatcttctgcatatagctagccagtttcccagcaccatttattgaatagggagtcctttccctattacttgttttgtcaactttgtcaaaggttagatggtagtaggtgtgcagcattatttctgagctgtctcttctgttccatacgtctttgtgtctgctttcatatcagtgccatgctgttttggttactgtagccttgtagtggaatctgaatttgggtaacatgattcctccagctttgtcctttttgcttaagattgtcttggctgttcaagctcttttttggttcaacataaattttaatatagtttttcctaattatgtgaagaatgtcattggtagtttgataggaatagcattgaatctgtaaattgctttgggcagtatggccatttaaatggtattgattctttatatccacaatcattgaatgttcttccacttgtttgtgtcatctctgatttctttgagcaatgttttgtaattcttgttgtagagatcttttgcttacatggttagctgtattcctaggtattttattctttttgtggctattggcattgggattgcagacttgatttgattctcagcttggatgttgttggtatatgggaatgctattgatttttgtacattgattttgtatcctgaaactttgctgaagttgtttatcagcttaaggagcttttgggcagagacgattggttttgctacatataggatcatattgtctataaacaaggatagtttaacttcctctgttcttatttgaatgccttttacttctttctcttgtctgattgctctggccaggacttccaatactatgttgaataggagtgttgagagtgggtatccttgtcttgttctggtttccaaggtgaatacttccagcttttgatgatgtttgctgtgggtttgtcatagatggctcttattattttgaagtatgttccttcaatgtctagtttgttgagggttttttatcatgaagggatgttgaattgtatcaaaagcctattctgcatgtattgagataatcttatgggtctgtttttagttctgtttaatgtgatgaatcacatttattgatttgcacatgttgcatgaaccttgtgtccaagaggtaaagcctactttgtcatggtggatttgctttttgacatgctgctggattccgttcgctagtattttgttgagaatttttgcatctatgttcatcaagaatattggccagatgttttctttttttattgtgtctatgccaggttttgatattaggatgatgctggcctcagaatgagttaggaaagagtccctcctcctcaatgttttggaatagtttcagtaggaatggtaccagctcttctttatatatctggtggaattcagctgtgaatccatctagtcctgggctttttctggttggtaggctttttatttctgatacaatttcagaacttgttattggtctgttcagggattcagtttattcctagttcaatcttagtaggttgtatgttccaggaatttatccatttcttgtaggttttctagcttgtgtgcatagagatgttcatagtagtcttggaggttgttttgtatttctgtggggttggtggcaatgtcttgtcatttctgattgtgtttatttctatatattatgtttctctacagctgaaaaaatgttcttaatataatacacatgcagtctgaagtaatttcagttctcaagtttatgaaaggattgggttttaaaaaaacatactacaaaaatatgcacttacatttattccaaaattttatatttctaacctctgcagtgataaaaggtccaaattttcaccgttgaactgccttcttgcatggtcttaaacagttatttctataaagcagataaaatttgcataattatttacagtaaaacccattcagaaactcactttgatagtaatacttttatctaccattagagttggaagaaacatttgagtaaaaaagcatagggatgggtcaaggcatttttttttttaagaaaaatatactctatgtaatacatcttggaaactacacagaccatatccttttatttaatgtgaaggcacaactttaacattaaaagcaaagcattttaattatttatgatgtaactgtcagtaccagctcataaaaatatatatttgcaaacatatcattgaagactttcagattgtcaattcaaaaatcaatttaaaaagtcaaagtctatttgtagaaaatcaatgacacattatagcagttccacataatattattgctggacaatctgttcaccagacatcacagggttttcttcgttttttgcataatacagatggtccatcatctgatagctgttacctttccagaactttttcatttccttacatttccaggcaacaactgaggcaataataagtgtgcaagttactaaatagaggagagcaggttgcccctttttcatcagcaccagaacaacaaatgtaagtatcatgccaatagcataggcaactgtagaggaaacatagtatatatacgaagaaccagtctaaacatcaactcttctacagtacgcaagcaacaggcctgtacaataatgtctccaaagcccaatattgaaacaggcatgatgcacacactcattactgagaaacagatcagctttggtactctgatgactactggcaatgtttcagtattttcaaaaggtccagctgcaagtttaaccatgatactctcaccattctttgtgatgaatggtgttatgaaaacaaaaaatacatcatagaggaggagaaggcctagaagtatcacacatgacttgaagctggccaacttcagtgttttaattaaattcagacagaaagcaatctccaagatatcttgtaaaatccaagcccacctgtcttcattttgaaacacagcccaaacaatagctattgctatgcacagtccagagagaaacataagtctcacttccatgcttttgccgcgacactcaattgtgcattgtccatatggcatcttatgaattagtgcagcaagagagttgtacagactcattgctgatactatgcagaaaattgctatcataacataaactaaccatttgtggaagaaataaagtaagaccatcataacacagtagatgactacaaatattacaactgtaagaggactaaaagttagatattcttccttttttttccctcatttatctatcttcagttgtcactgctttcaagttttccaattcaactagtccactccagtatccacctaatgccacagtgaacacagcaattacaaaaataaccaccatagtataatcaaagttaggccacgatggagaacacattttcacagtaatgttatttcctagagtctgcttcatatctataaagtctttgtcacttataaatgcaatcagtattttcacatcaggaaattcagatctgttacctgaggtaggaaataggatactgttattgacaaccaacattgcttcagcacctcttttctgtgcatttctggtgttttcaagaaaatggcagctgccccattgcaccacaactgctttgttctttatgtcaacaggaggaacatcagaaaggttgcatagtggtgcggaagtcagattcatcaaactaatggaagttgcattttctagggtacttggaagagctgaccaatgggggttataaagcatgcagtagtccttggatgtgccatttccagacgcatgcaagattgcttcctgagcggctgtcagctggagcaggaagccccagagcagggcggccgtggcaggggacagccgccgctgcggccccatcggactggtgggtggcgggtggggtggcgcggcgcggctcactaggtggggtaggctgggagtcccgccactgcgctgcctccgtggcgggggcggccgggctaggctgggatcgccgctgctgcaggggccgccactgcagcccacactctaatttagtggctagtgttctaattcctttgggattcatctgagtccttaatgaggactgggccaagaaaagttatactgaagataggactgtaaaaaacagaactctgggccctacccctgcttcaaccaaagagctccgattttaatttattttttattttacacataaaaataaattttttaatgtgtaaaaaatgttctgataaattttcatttgaacaaagaattccacagctaaaacatgcctaaaactctctttggagaaggctagaagcccatgcctcataattctgacaaatgtttgaaaccagtcactgaacagtaaagttgcaaagatagccttttatcagagaaccaaatatactagttttaaaagttctttgggttaatgtttgttttatttttcttacatgcaaaatcatagcattagatctaataaagaaaagccaaacatactaccaaagttttaagcataagtaaatattaatactaaacagaagcattgataaaacatgcattcaatttgtttctcaattgagacattcagtgaaatgttttgaatattatttttgaaagaaattatattaaagcaaagctttaaaaaggatatggttcctggaatatcttagtgagtttaatcttggttttcttaggtgctttggaaataccagccagctcatgcatcttaagataatataaaatcaatggactctgacctccaaaattgaagagaacacgattaaactctggaccagtactactatagtgcgactgtaagaggaagaaaataatcaagacaacgattacttttgtgtttctaaaaaactgtgaataaaatataacttcatatttagcataaagttaccatttgatatattaaaataaaggaaattctacaaagcatcttcttaattagaggaatttaccaaagtatgagtctataagtacatgcagtaaggctcttctactcttttgagttatcatcagacttgcatataggcaatagacattattcagtcttaagaacagaaaaaaaaaaaaaaaaa

SEQ ID NO: 322 - DNA, 135781 bp, Homo sapiens
  source 1..135781: mol_type = genomic DNA; note = NC_000015.10:c68432312-68296532 ITGA11 [organism=Homo sapiens] [GeneID=22801] [chromosome=15]
aggcagcgcgccgcctgcccaggtggcagagcggccgagactggcccagagcccgagccggagtggtgtccggcgcccctcccctccgctcgagccctcccacttcctctgaatgagccgcagctgtcagggagcccggcgccccgcgcagtgcaggctgcaggcgccgcgccgaggaggctgccgctctggcttgccgccccccgccgccgctgcacaccggacccagccgccgtgccgcgggccatggacctgcccaggggcctggtggtggcctgggcgctcagcctgtggccaggtaggtgcccaccctctgcctccccttgcctctcggagtccctccctgggccctcggggcttggatccagcggccaggatcgggacgcgaccctcctcccagggtcagacctcagctgctcttggggacgtgggtcccccagggactggccccagtctagcggttcagtcaagtttcgctaaagagggaggtgcgaaggctattgaaagccgggactctttggtgtgtttgggaagagttgaagaggcttgagttgaaaagctcccagatctggtggccctcctgggcgccttaggtgcctccaaggcccatgccggggttcccgcacggctgccaggggcactcgggtgtcccgggagcgccgagggcgcacggccccggctggggaagggaatcagcgccaagagagtgtgccctggctgccctcctgcctggctccggggaagcatctcaaagtttggagagccgggcgcggcggccccggagggctgaagggtgggggtgagggctgcgcagagtgcctccggccaaagacagagcaaagccccggggcgatggccggtaggcgggggctagctctcgtctgcccggccagcagcggcgggacacagtcgcgcagcgcaggacccccgaaacgttacctgacacccggggtagggacccggcattgcctcccaacccgcgctcggaattatgcaattattcaataatctggggaaagccgccgtcgcctagacgcgcgccgccgcctaatgcactccaggtgtcggggcgcggcaggaacctccggcccgaggggcgcgcggctgggagcgggaagccagccctgagctctccgccctagggtaccctggccccggccgtcccacaccgggctccccggctccaccctccacgcggggcggctgccagtgatgctgttctgcggaagacggccaagtgctccggcaagggccagcgcctcggttactggccgggtgtgggcgctcaaccttgcctccccttctgcgtgggctccaggcccgagctggggccagtagtgggggtcagatgcggtggtagtgggagaggtgccctcagggagctcaggtggagacccctatcccgcagccgcttgccccagtccccgggtaccacgcgaagcaagtccaccctcctgtcggcctacagaggagcttctcagagggcccatggttgaaagggcctctggctagtggaatcctagagtcacagtttaaaacaatcattgatacattgagttgtgggggcttggaagggagagcaggggaagaactgccaccaggccaatatgcaactagaagccagctgcgggaggaggccaagcccatttaggtgtgtttagacaggaggggagaatcttctccaggaactgtcctcatatcactaggagatccagccacaagaaaagagacgcactcctgtgtgactccagataggtggctgcatcagaaccttgggaaggagtggctgccttaggggctagggacagcctggacctcaggaagctaagagcaatggctttggaatcagacctggcttccacttctggctctgcaccctgctagctgttcaatcttggactggttatgcgacctttccaacaggtttccttatgtgaagaatggagacacaaattccgtgtcctgtaaagttgtcaggatgcactaaggcactgtaagaaaggcccttaacacagggctgggtgcacagtaggctttaatcaatggttgttaatgttgttgctactcaaggaggagggggcagagaatgacattaaaggacctctgaagacacaggatttgtgactcagagctccgcttatatggcgaaaaccactcctgagttatgtctggtcagttgcattcttgaaatatgggattcattaaacatatcaatcaatgttggaacaatgacatctgcttgcaaggagctgggggtggggccctagcgtgtgtgcaatctgggtcctgcctgtaactgagaataagccaaggccagggaaagctaaacagaggcaccagggagtgaatggcttggggaaaccaagggctgggtgttcaaacaagagaagttcaatttcagccagataagcaaggaaggcttcctggaggaggagatatcatttgaactggccctggaaaagtgtgtagagtgtgcatgggcctgaaagtgggaatgttcatattttggagtattattttctgagactagttaaagaagatgatgaatattttaaaaccactctggtcagtgtggactttgaagactagaagggtctcagggatcattgggttcactcctcaggctccaggacaggactgatgttgatacctcatccatgcatcacatgaattcaatgtgaggattaccaggaagcttgtctactggtgatggcagtttggctgggcagggaacctgtcagaggccaagttgagggtgagacctcagagcatctactctcccagagctccagctgcaggctggacagcgtgatggggtagacaaaactaacaggaaagcctaaaaaaaaagtaatcaagtccaaagagagagatccattgaccagagctttacagtcataacctatctgtaggaagggtgatgattcttagaagcataatctttgctgagcacctgttatctgccaggccccataaagacacaaagtgagatcagacacagcgtaagggtggaggccctggagtttcactgcctgggattggcctagcccctgccggttagggctctgtgctcttggcaagttactccatggctctgtgcctcagtttcctcacctacaaagtgggggtaataatagaacttagagttatcacaaagattaatgcttagaaagtgccaggcatgtattaagcactcaaggaggttgtcttctccaacatcatcagcagcagcagtagcactcaagatattgactattcaggatctaaggacacagagatataactttcaaactcaagttctcaagagaagtttagaggaagtacattgaagaatcagaggagacatacatgccagggccccaaatgagtgaagactttcctagtccctcccgcaaagccctggcccaaactcttgatcataataagaactcagggttgttgttttgtttgtttgtttaccatcggggctgtcttgaagtcagtatgctcttgatgtgggtgtattgtggtgtggaaaaggagaaggcccataccatgcaacatggcccttgtgggtaggggtcctacccaacagaaagcaacctgtggaaaagcacagtgctagacaccacaggtgtacaaaggctccagaggtccaagacttgctcccagcctctccttcccagtggagagcagggaagaagggaaagtttgtcactttgccaccccattgcccactttgacagccaagcccctcagctgccattagctgaggagcttctggatctttccatatcacaagcagaccctggagtctcactctttttctgcttactcaccatgaccccatctctaccccacagtggacccccagagaggggatgtctatctccatgctcttcccaccattcccagcccatccacacagggctgtgagccctggaagaactcagacagtatcttacctctcaaccttgccctctctgaacctctttttccaccctcctgtagtggggagctcttccttcttctaacagcagggaccttcccttgcattctccctcccttccaccaacacccccagctcctatcacttaggataaaaatatgttctaagctgagctggctttgctcttgctatgcagaagggaatttggggaattttaaaagcccctgtttcttctccacaatgcctgactttgggtgttattgtctcaccatgggcttccagagcttactttgggggtcaaagtcgaacattgttctaggatccatcataaccctccccaggcagtgatgggctctggctgactcagggaaggtcagctacaaaatgagccttaaaaatcctctaatatggttcaaaaatggtatctctgctgatcctcatcactgaagtccccttccaggcccacccactccccaccaactgtatgtaggctaccaccaaggattcatagccatttggaacttttccctaagcagctgtgagctccaaagacacccacacatcttcagcatggagtgctttctataggagctgtggtccaagggcgaccctccacaaccccatcatgcagatcctaactgtgtgaattctttgtcaaatgcccattaagtttgttaccactgacaggagaaggagaggaggagactggtgctggtcatcttgtaaatctaaaataagtgagctgcaaaaaaattccatggagagttttcatactatatacttaagatctgagtcacacgacgtgtgaaatcccacctggaggaaaaagtcagtgaggccaaaccccctccctgctgcctctcacttcctccttcactgaagcactcaccaagcagcagaaataattggcatgtgcatgggcttaggacctagactgcccggatgcaaatcctttctacctgggtgactctgggataagcccccaggcctcagttttctcaactgtaaaatgggcaaaataacaacttcataggacaacaatcaggttaaatgtccatatgtaattcatttgtgtcaagtgctgagaacagtgtctggcacccaataagccctcagctaacagaagcattattactcttcccatcatttaatatttgattgatgtcaggcactgtgtcaagcactttctcacatctcaataaggccttgctacagttgcacaaagtcactgctacaattctgccatttccaggttacacataggaagttaaaaggctcatccaaggtcatgtcgatagagtaagaggcattgttgggatttgtctgacccccaggccactgcctttttttttttttttttttttttttttttgagacagtcttgctctgtcgcccaggctggagtgcagtggcatgatctcggctcattgcaacctccacctcccaggttcaagtgattcttctgcctcagcttcctgagtagctgggattacaggcctgtgctaccatacccagctaatttttgtatttttaggagagatgggttttcgccatgttgaccaggctggtcttgaactcccaacctcaggtgatctgcctgccttggcctcccaaagtgctgggattagaagggccactgcttttaatccatgcaccatactctcttcaggaaatggaacttgagggcacagaaagacagtaagttgtccttgttaaaggaggtgtcttcaacagctgagaaatggaggaattggggaattgttggggaattgagatcagtatgcaaacagctacccccacaggggcaccagcttctaggcccagctagacagtgactcctccaacaagatgctgactcggtagaagtggtcctcctatgatgcttcattatgtgagaacgtctctccctctcccctctccccacccagctcagggcccaccaggctctgccacctgcccccaggtgcccagtgctctggaacactgacttcccaggggctgtcattccagcccattctcagggtcaaggtttggcgatcttctcctgtctgccccgcctgctcccattccgctaatcagaacctgctctgagcttcaggcctaatgagttaactcatgctgaaccgcactaataagtgatgacaacgtgatgtgttctacccaaagggatttccatttcaactggctgtgccttgagcccaaggaataaagggctaatggtgggatgtcaggcaccagggccagccagcagatgaaataggtgaggctggaagacctacctggtgtagtccaaccacttagccccctgccccatcactggtcagataccccctaccccagcccttgttgctgatgggcagcctcgttctataacatagaagaacccagcttgtggcttgggtgatgcagctctaaagcgggcagaggtttttccacgtggcatgtggggtgaattaggcaagttgctatagcaatgcactccgggcttccaaacaggatgacacagagaaggggttcctgcctgcgcagctggggctgacagctttcttcccccagcagcatcactcagctgggccagacaaccagaaatcctgaccctgcggattttcagggcctgtttcttccctgaagatcagaggactgggcctcaggaaggccatggaaaaattgtgaaatgggcaagtgggcgtagctctagatagtctgcaaagagcactcccaatgttccttctgtcagtcaggccgggccaggtgaggccagagttcctgctgagacaggtgtgtccattagatggatggagaaactgaagcccttgccccacctcctccaggcagaagggtacaaagcagtctccattccctctccatctcctggaattgctctctccctggcactatgcatagcccctgcgttcagagattggtggccataataaagtcccatcaatagtttgtagacagggttctctgagtttattcaaaccacatatgacacatgcaggaccagttacttaatctgaaggacccagtgcaaaatgaaaatgtgagaccccttgttttaaaattactaagaatttctagatggccacagcagggcattcaccaagtgcagggcctttctgaacatgaggccctcagccactgtacaggccaagcgctcatcaaaccggccctgctcacatggctctccccgtgggcctgttgtttggcaaggaagacaccatgatcccactttacagatgataaaaaaccaagtggcctgtccatttcaccagcatgtgctgagcgcccactaagccccaggcacctccaagttctgggaattccaaattagataaagcgcggtctctgcctcaagaaacatggagaaggcaccccacagatcccacagactgcagggctcattccaaacactgatgtacacagagggcaggggtgtctgtggagcagttctaaaggcacacgccagagctgtgaggtcatttttaagccatggaattaagatacttctgtctccagttattgcctcaagactgctttgggaacctttttaggggatctctgcatcttcaacattgggctctggagcttccaccttggcagacttgagaagctgggacttaaaattcctggcctttcggcagccccaagtatttgtattggcatagtcctccagggtcagcacttctaaataagggttgactcctgttcacctgcccacatgggcttcgcatctcattctggcatggaattgtagagggtcagcactaggagggaaggcagggaccagcagatccagtggtcctccatcctgggtgagggtgagaatgatgatgtagaagaaaactgtcgtgcagaccccaccccagaacacatcatcactctccacattggggcccagcagggacattttttgaagctgtccaataattctaacgggcatccaagatggaggatcactggtataatgtaaacccagccccagtcaagcaaaaaaaaccaaacactctccagggaaggaaaatgacttgcctagggtcacacaacaccagtggtaaagccaagatttaaccagttctcctgactctcagtccttctggaactgcccagcctgcagtgccacaggattcacagctgggttgggctggagacacagcttgagagtttgagaagctgagtgcaaggtggactttgcagattggagctggtaggtgtggagtgattcattggtgatactctctatgtcccctacaaggcataagctacttgatccctgtgtggccccaagggggagaccagaaaaaccaaagaggagctatagataaattgatttggctgaggatgccagtcagagctgtccacagacagatgcaccggcactggggcggggggttctctgagtttctcagagatgttggcaggggttagtcgaagtccattagggtcattccaaccctgtgatcttgggccctgctgaaattgaagtgagggttcaggtgaaggaagcacctgactcaggatgggacaccgacaacgccaagcccaggctgggtgaggaaggaatactccatcaacaagaaggaggaggccggcctgcggggtgggacaagcagggggacacctaggacctccctgaggtccccagctcaggtttcattgtccctcttgcccccattcatccagagctttctccacagccgtcaaagtgaggctcaaaaacaaacagagttgtcttactttcctccttaaatccttagtagctctctacaaccattgggttgagtccagactctttgacagagccaaccagaccaggtaggaatggccagccctggcctgcattcaggactcacctctaacagagccatacgtttgggcacctgcacacgccaacagcagccccaatgagactgagcttcttagtttcttaaacacactgagctgtccctggccttcactcctgttgttgcctatgtctgattctaccctctgcctcatttctcctggctgcccccaacttattcttcaggtctctgcttgccacttcctcctgaaaacctcccctgacctcctcaatcagtcaggtggggccccacttgtgtgattccaaggtgtcctgtacttcccccgccatacagcattccagttgcctggacatctcccctactgaaaagggagcaccaggagaacagggaccatatctgtaattagccactgtatccccgggtcttgcacagcgcgagacatagcaggtgctcagttaagatgtgttgaatgaaccaaagaactctctgtccaggtaaatggaaagctatttaagggcagggtagatgtcttcaatttctttgcacatgcactccaggaggtaatagcacaatagcctttggaatcaggccctgggagatgctctgggggataaaagatgagaagagataactcctgcctttcaaggagcttgtggtttagcaggagagagatttttggataaataactacaatgcaagggaggaagtaatgactgtgagccagctacagataaaggactctgggatttgagaggtgggagagagattatttgtaaatgcaagaaggactgggtctggcagcaagagggttagggagagagttcacctgggtaaactgcctgaggtttggtgggcaggatgccggagtgtgtgctgtgaggaatggtaagaacagaacagtgggctgaggcctctgagaggaaaccgaaagccaactaaggcatttggatttagcagatgggagccatggaaggtttttgagggagagcagtgacatgttctatctgtgcttggaggagcttcctcaggtgggagggggaggctggatacagcagggctacgatggggagcaggtagaatgataagatggctactgcagcgacccagcaaggggacaccagagtgaaatgaggtggtgagatgcaaaaggagtgaacccagggggatagaatttaacagggcctggtcaccagagaaggaaaggtgtctgggagaccaaggacggtgtcaccaacctgaagagaggcatgagaggatgagaggtttgacaggggaagttgagtcaggcctgaacgttgactttgcagtgctcgtgggcaggtggaggtggccctcaggcagtggagaatgttgctagggagcgtgcaagtgagtagtcggacttggagtggtttgactgggagctttcacacagacgtgcctcagtggtgcgggcctgagtgagagggagcgccccacggcacagagcctctatccctccaccccttttcaggcccagaagcagtgattcatgccccaaacttaaagagaattcaaattcggactttaaaagccttttagaacagaagaaaccaaccagagggccaggccagaccacaagccaaacatcagctgtggaatgtgcttgctgctgatggtgaagccagccaggggcaaaggcaccagcaggcttgccagcagcccctaccatcgtcctgaacatgtcccggttgccactgggagtatcaccgctcttaactctcttctaaaaaaattttaataaacacgtaataataattgtacatatttctgggctacataatgtcctctcttttcagcgtagatctgtctgcattctagcccatctgaaacccagcccctcacccccaccccccacccaggctggccccacatcacctttgtgtgaaggctctgatctcccatctatcttccccactctgctcagcccaaaagaggaagaccagaaggcaggttacacgaggggtcaggggacagaaaagctcccatggcctgtggccacagccccctcactggcctccttgcatccgcccttgtaccttgaggctctcccacccagcagccagaggactgccaccagaatgtaggtcacatcatgtcatgtccctgctccgctccaaaccctccagggctccccgcttactctgagtaagaggtcccgtgtgatctggctctcctgcatttctgacttcctcctctgtgccttccccactggctcactccgctccacccctggggcctccgggctgttcttcaaacacatcaggcaccttggactttgcacttgctgtttcttctgcttcgaatgctcttccccaagaacctctctcacttcctgcaggctgctgtatccagcctccccctcccacctgaggaagctcctccaagcacagatagaacatgtcactgctctccctcaaaaaccttccatggctcccatctgctaaatccaaatgccttagttggctttcggtttcctctcagaggcctcagcccactgttctgttcttaccattcctcacagcacacactccggcatcctgcccaccaaacctcaggcagtttactccaacatgcttctcccattgaggccttgcctcgggctcctacctaaaattcaacccccctgcatgcattcacatgcataaactcccctcctatcccccttccctgctttagtctctccgaggcttttaatattatctcacattattacctgttttatttattcatgttgtatattgcctgctccgatggaatgtaatcctgagagcaaagatttttgtctgttgagtttacttacgcatcccagggcccagaacagtgcttggccagagtacacaagtgataaatagttcaagaatgaatcaatcaatcagttaaaatctccccacccgcctgccacagttgctagaaatcccatttactaatcaatcactccttttagataagccaatcctcctccttacgaccccaggctactaggtaggtatacattcagtcctgacttttccctgtccacttgttatcaaaggctttctttccagacaagaagaggttggtggccattgagcatcgcttacaaatgggcagagcgaggaaggttgctgaagggaggaagggctctggaagggaggggaaccttagaaaggagtaaattggctcacagcaggcagtccaggtcagcccagctggccccatgctattcatcactatttactatgactctgagatgacacaaggagacaggggaatggccttgtttttacacagtgaaaacctagttatataatgggacttcctaggaaacaagggggcagggagcatgcagcagaaattttaaatgcctcatttcccacaaaagggtagtgattcagacatcatctatatgccacagaatgtggccatgttgtttagcacccaagaaggagctgggagtgcccagaaaagatggtgggagctgaacatagaccccagattacagtccaatccctgggaaccaccaagccagaatctgtcctggtggcttgggagatgacatgaaacccattgcacaggtggagagactgagtctgagcctaacaaagtccatattaggagcctgttccactgacataaggtttcaacactggtctcgacacttaatggcaacagtaatactagctaacatagaagttaagtaacttagccaagatcacccggatgataaagtcacagcctggcatttgaagccaggcagtctgactcgagagactgcaattctgagaggtcaagtgtcttgcccaaggtcatacatctgctgctaaacaagagagccagaatccaaacctctcaagacttccattcgatctcttctaaaataaatgtttggccttcatgtttctaaaagccctttaggggctatgcttccatgctgccatgaacatttcctgagccagaacctcaatcctgattgtaaacccagatgtaacaggagaaagaagttgacaacagggactctatttccaaacaatgggtacactcagtacggggttggcccttcctcatccacaggttcatgaggggtcctgggcctcaggggttctctgagaggcctcagcaccaagggtctgcctgggagggcccttaacagagcctgaacatcccaaacaaatggccactctaggcttgcatccctccagtgatgggggctcaccactttgcatggtagtccttcattttctagcaaaggcagatggagtcatgagcccttgactcctttaaggacctaaaagtagcagtagacatttgagatcgttttgcaaccatgaaaaattggcctgtactgaaaaccaaaaagacctctgcataaccctcagagaacaaaaacacttccactccccaaagtccgccatccccaccaagcctagacaatggcatctggtggatctctgttaaattccatgcagccagagaccttttcagatgggtgtgggtatatccactggagggcgggccctgcaggcttagaagggaagggcccccacaattcctttttttagtttgcattcaaagagcagggcagactggcccagtagttctctgagtcctcttcaccctacttcctctcgtctgagggaaagccctgccacaaattgcatatcctgagccttgtcttgctcttattttgcccaaacactctctgggctggggctcatcccacatgcacagggctcttgatccacacacccatgacaagcaggagacaagcttaggagttggaaaaccaaaaccaaactgtctgagctctttgagatggtcagtatgccaggaaagggagggactcactgtccaattcagctccagttgaaatggcctgaagccagaatcagtgtgggcagggccgccacgtacagctgtaccggctgtgcgctacatgatttacatcaactacaatgtaaacagcatcctctgcagttgtgtagtaaagtgacctcaggaagggggtgggggggtgggtaaagaaagtgataaaggtgtacataaatgggcttttaaaaatcctacacagggacttaaagcatcgagtcctgtgtgtgcctttcacagataaggcaactgagggccatgtgaagtaagaaactggtccaaagttgcaaagcaatttagaaaccatactggcaatagaaccaggatttctgaagccaaatccagtactctaagttccttccctccctgaggctctatcactttcccctttaaccccttattggaaggttagtgtcttagaagcctgaatacttctattcattttttccgtctcatttaacaaatgtatatagatcacctattgtgagctaggcattgttctagatgctaaggataaagtggggagacagacacactgattctggctcttgggatgggatagaaagaattcctatcattcttatttgtagtatttgccaattaccatgatgtaaatcctcccaccatggtcgttttcaagctgccaacatgacatcactgaatgggaagagtgcacacaatcagctcttgtatgcagactccagcacacattagtcccttcctttgtggaacttaaactccagtgggagaggagacagtgtccaagtaggcaaacagctcttataaccacctgtaattatttttaattgtaaaatacataaagaagatgttgtgagggagaagaacagattctccatagcaatggattctcctttctcagaggccatggcgttaaaactggaggttgagaaggagccagctgagaaaagttcttggggaagaatgttccagacaaaggggactgcaaatgcaaagatctcaaagtgggaaacagcttggtgtatctgaggaacagagaggaagacggtgaagctggaaggtagtaagtgagaaagcaaatccgcagggcctggtgggccctgggaagggtctagaatctattctaaatgcaatggaggaactctcgggggctttaagcagagccaggatctagttcacaccgttgaaagatcactgtggctgctgcaaagagcatagcttgaagctgagcaaaattggaatgagggaccagttggaaaactctagtgcaagtctaaatacaaaatgaagaggatggcttagtccaagtatggcagaagagacagagaggagtgggcacattggagaggaatggagggctagaacttgcaggatttgctgatgggaagtaaaggaaaatcataaggaatgacttccaagcttctggcttgagccatctggtgggtggtaatgccatttcctgcaatggggacaaaaccatttaagaagcgaaaacctgggttccttttccagcatgtgaaatgtgagatgttatgagacatccaagtgaaatgtcctataagcagccaggaaattgattgtggggctcaaagggcaggcctgggctgggtggggtgaaatatggggtcctcaggagctcgggccatgttgaggccaaggtcccacacactcgctcagacagagcaagactctgtctcaaaaaaaaagaggaggtccattttgatcacttttcctacacagagaaaatgataaatgatgtaagatggaaaaatacactagttttcataaaaaactgtgacccttgtttttgttttttacggagatggggtctccatatgtcacccggtttggagtgcagtggtgcgatcttggcttactgcaacctctgcctccctggttcaagcaattctcctacctcagcctcccgagtaggtgggattacagatgcctgccactaggcccagctaattttttgtattttagtagagacggggtttcaccatgttgcccaggctggtctcgaactcctgagctcaggcaatccgcctcccaaagtgctaggattataggtgtgagccaccgcacccagccatgacccttgttcttgaagaagatgatccatatattctctgaaggcatgagatggctgtccagggctcggaggaaaaataatgttaattacagtcagtctcaatgtgctgtttgctgctttaaagttttaggcctgttttccttgagcttgacatctgcttaaccagcccattggcaaactcctgagttctcagaaaaagatacaaaggactgccgaggctctcaccagcccttgctcgttctctgtctccctgtctccggatgcttctgtgagtctctgtttcagcctacatgccacctgccctagccgacatttgttctcctctgcaaccccagggaagggaccctcactcctccacaggctgcccagccccagattgattgtttttttctgatttggagaattcttcctcatatagagctgcaaatgcttttgatggctgaggggaggctgttgtgataagtcacttgttaacaagcattagtttatctaccatacaacaggacattgaggggatgggacagataacaggcaaggcttttgatgagatgacaagactgaagtagaagagagggaggcaggccagggtcagggtgctccaaggttgcaggcacccagtgtgtgtgatgaggatgtgccagggcctggctgaaaggggaggtggaattgacagaggacagtgggtgaatggcaggctgctctgcatccctctacttaggcccttcttggatgaatatcaagttcatctgataagctcacccctggtggcaggcagcacctgcttcactctttctgagcatccacatcaaggccagctgaatcttcaagactctcagctgacgcagaccctggaactcacctagtgatggctcccagcccctcatgacacacatgagctctctgcttcctggtgtgttctttttcacatgcttaacattcgagagggcatgtgagcacatccctatctagggctcctcctcccggggaaggtggacactgtggctgcagctccatgacacaggccttgcctcaaaccactggcgtgctcagagccactccctgccggaagcagcagtgggtgtggactggggacgtgctgtttcccaaatgagataatctcccccagagattctgctaagaaatgaggggtgtgctcataccatggggacagatgatgcttttccacagaagccccccgtgctgctgaaatccttctcctttcccttctgtggccagtctctctatccagccttcaaatggacagcaccctccatcccttgaacccctcccctttctctagactccatcagaagacacaatttcttcgtcccattattcctccccgtcttctccagtgagctgcgttctgacctgcacaaaggctggggaagccaagagacacatccagagatgaggaaggccagtggctggcggtgatattatagttggaggaataaggaataggagagactccatagcgcttccttcagaagaaaggcagggggataaggccaagttagcagagagacaagcagtccacccaggggtagtcatttggcagagaagtaagatgctgacgagttgatcagagaagctagaaaacaggggggtcttttgcaagagtaaagaggagggatgcatccctctcctggaaagacccaagtttggttaagttttctctagagcacaggagggtatcagggtggtaagaactggcttggcatcaccaggccagccctagtggcagcctgcaactgtagcagcagggcaggcccggctgggcgctaagccgtggggagaggggttacagctcactttcatgggggggcttgaggctgagggacacttgtttggacccaagtgctagaggggaaggagggaatgacctcagtcccaaaagccaatctgatagatacttgcggaggccctggccgttggcctgcccacgggagtgcccccggtgccagtctgcctgctcctcccctctgaggggagatggatttggaaataagtccagaggaggcggaacacacagactcagaacctcagtactggaaatgtttgtagaccacctggccctacttcctcattttctagaagaggagacagaggtccagagagggaaggtatttgtttcaggtcacatagccagtcgagaaaccaggtcttctgatgtccaaactagttctcaccacagtggtctcagcactcaggaggggctgttatactcccatgtcccctttgctgagtcctggaaccagctgtcctaaagtcagaagttcatcctgtggcctttgaccttagcattctgccctccagccccgtccccccagggaccattcctagaagacctcagggagactgagaagcctctgtcattccaaggccacagtcatgcctcaaaggagctggtgctccctgcctggtgtccgcaagttttgaattaagagggggtctgatggcagccatgttgccctcctgcccacttgccctaagtctcctcatcgaggtttcagcagcatagtccagctctggggctaggctgggctttctgtggaaaggtgaccacatcgcctggacccccaccaaggcctctgtctttctgacatctgggtgtgtccagaagccccagccagggcaggagggcccagccaagtctccatggtacaggcaaagggagagagagagctgggccctggacaatgccaaacgtttgatggtgattttctttcgttctttccttggcttgggaatgcaaaatattatcgtttttgcctggagatttcccttcctaaatgcgcatggctccggccaacattaagatgagtttgcattcctccacactgcctggtttccaattctaaattgtttgctgagactcaagacagatgctcgagtgccgacaactggaagtcagctggcgtctgcccaagggaacctcactgacatgtgccgtggtgggtcttcgatgttacaaagcaggagcctctcattttacagatggggaagctgaggcccagagaggcaccggggctctcaatggacatccagccaagttaatgacaaagctgagattagaactcagatcaccccaccctagtccaaacttctcctggcttcacttcaggctctgttgacttataaacatgtctgttgcctgcccagtggggctgtaagctctgaacaccgtaagtcgtgtctcagccagcttggtgtcctcacttcctaccatggaacctggagctccatagaccccaaatagaggtttattgaactgaagggccatagaggggactaacacagaaggagtggtggtgaacatagataagtatgaagagaggctggtgaccttggacacatttctaccccgctctgggccttagtcttctcacttatagcaacaagctttttaaactcgacagagcagttctcaaactgtgttccaggaaaccctaaggtttcagtgaggcatcttatgtctgctactgagggtgggaaattcctccctaccccctagtcctaaccccaacatccacttcttgtgtctacttttcatgtatatattttgttcaaaaaatgtgagattcgctgtagaaaaacaaagtttggaggctaatagattatttgatctggaaaattcctgcttgttcttaaagataaagtcctggctgggtgccagtggctcacgcctgtaatcccagcactttgggaggccgaggcaggtagatcacttgaggtcaggagttcaagactagcctggccaatatgatgaaaccctgtctctactaaaagtacaaaaattagccaggcatggtagcacatgcctgtagtcccagctacttggaagactgaggcaggagaattgcttgaacctgggaggcggaggttgcagtgagccgagattacaccattgtactccagtctgggtgacagaacgagactctgtctcaaaaaaaaaaaaaaaaaaaaaaaaagcgaataagttccccctccctaataacatatttgctacacaccacctttgacccaatggtagcttgtctaacggggagttcgtgtcatgccccctagcaactggaaagagagaaaatgaggtgaaggaggcctcatgctctggaggctccgttctgcacagagctgctccagagcccagaatccatgttgggtgcctggctggctgtgggtctgcgtctgtcattccctgagtgattcaggacaacccagccatcaggcccggtgtatggctgaggcaggaggaggccatgatttgctcgttaggccacacttctccctgacagggtaggcccgggcccagctctgcctaatgttgggtcttcctgatgagatcttgagtaggaaatgattggggtactaccccagcaaccacgagtccccagagatccccagctcctcttctccttgtctttgtccaatcactctgtgaaattgttcctcctccctgatggtccatcacttaagagctaagctgcatcaattatcaattgctataataatgtcctgtaaccaataatccccccaaatctcagtggcacacaataataattgtttagttcacatatctggggtcagctgagggtgggggagtgaactggtccaagctaagctcaactgagtggctctgctgggctcactgggcttgcttgtgagtttgggggtgctgacctcagctaggttgggctggggcaactcagctggggcagctctgctccgaatatctctcactcttttcctggggtcagtggactagccgtctcatgttgctgccagaagtgccagcaagcagaaatagacaaggcatcctaaggcccaagctgggaatgggcacacattatttctgctcagatggcctagcccaaagtcaaggttgggggaaatatactctcctcttttagaggcaggaattacaaagtcccatggtaaagggtgtgcatatagagaagtgaagaattgagactgatgatgcaagctggagcaggaccacttgtttttgtatcccagctctgccacccactagatgtgtgacttgggacaagttacgggatcgctgtgcctccagttcctctcttctgccatagagcggcttcctctggccatcggctcccatctgctgcttcatccagacttttaagcccttgggactctggctctgtccttctggcatacctggtctcctgtgctctgcctgttgtgatcagggagccaccaatcagttctgtagtgagcagagggcatgggcccaggatgggtgagtcttgaagaaggagtgtgtgggagggggataagcctgggtgaggcctctccagggttgtcgttgttgataatttgttgtggttgtcagagctgaaatttctactttaactcaacacatttttctgagcaccaggccttatggtgggataaagggataagtagaatccagttctcctcacattgctcagtcttagatggggagaagattgtgtggaatcagctctgctcagtgtacatgtctaatcctattacttaaatattcactccacaccctccatgtggcaatgcaggcagagttgctgctcatgggatgctcacagtccactgtgagttccctgttggccacgcagctgcccatgggggcggaaccgcacactccccaccagcctgggggcttcccagggtgagggcagagttactaggtctcctatgagagcagcaggtccccaagggcagtatccctgcttctccccagagtcagagggctccccaagctcttctgtaatgaaggccttcttccctcaactagctagaagcttctctgatgtagggaccacgtcccctcacccctcccttgctctatcgcactagtgcctactacaggagcctagactagggtccttgggcctccagcaatgctcccaaatctagcattgccttcctagatgcctctttgaaatgatggccttgggcagaagggaaggctggctggcagcagagcaagaaccctcacatgttccctgctcgccagggcaaaaggggcagcaatgcagaggatacgaaacagccagccatctgaagctcattacttcttcacttttgaatgggttgttttttttcccccatagcagcaagaggttcactttgccatatctttttgcctaggccagcttatggtcttttctccctcctcctctccctctctgtgatttgcttttagacgtgaagattcttggggcccaagtaaaactgggaagagtgagataataccagagattcttagtgataaaccccacctccctcaccccatcccagcgccctccctccaaggaaaatgaaagctcttgcttacacaggtgcatctgcaacatggagcagagcccaaagaaccagtggaggcctggggcagggctgcggagaggcttctgggaggtgttcacgcttaggttccacagatcggcttcctctggccgtcagctccaacctggtgcttcatccagactttcaagacccttgggactctggccccatccttctggtataccaggtctgctgtgttccacttgttgtgatcaaggagtcaacagtcagttctgtattgagcaggatcttagagcatgtgactgggatagatgagtctgaagaagaagaggtgtaggaggggacaagcctggctgaggccactccagggaggattcaagtgactgacgacggtcggtggtgtctgaaagggcagaggaagacttgatggtgatgggctggatggcacgggacccgtgaggcctcaaagtcatcctggccgcttcctagctgtatgaccttggccagttgctgactttctttgtgcctcagttttctcatctttaaaatgagaatgataatatacttactgcaaaacatggttataagcattaaatacattcagaatagtgcttggtacatagtaagagctttgttcatgtacacaattatttttattattgttatctaagtggtaggggactatcagtacctacctaatcaggtagtactgataggtagagtatcagtactacctatcagtacctacctaatcaggtagtactgataggtagagtatcagtactacctatcagtacctacctaatcaggtagtactgataggtagagtatcagtactacctatcagtacctactatcagtacctaagtcagggagctaggaggtaaactaaggcaggaggagccaacaggtactgattctgagaacagattctcagaaggtgagaaatccggtaggcaagtctatctgcaacttttgggcactgggcaaagataaaagccattcatggatgtggccttgaatagcatataacctaagagcaaggcagaagggaaggcagctgttatgcaaggcagggagtgacagagctatgagcagcccacgctgaaggccccagaggaaggaccactttgcagcagaggtgtcatcagaggtgggacttgaaagcgtaggacgaagggaagaaaggccttccaggcatggtgaacagcatgggcaaaagcgctgaggccagctcaaggaaccagggcatcttgatccagttcaattcaaccaagatgtattgagtacctttcctgcaccaggcagtgccagaggtttgctactccctttagtcttgccaaccacttttccagatagatatttttattcctgttttatagatgagtaaactgaaaaccagaaagggagagtaactccccagggtcacccacttatgaatgagtgctagagccaggcttctaaccaagtcctcccagaactgaaagcccatcctctcttcatgtctggcctgactctcaaggagcctggcaggatggcaggaggagccaggcaattcctgacacctccacccaggtaggctgttctcttcttttccccggctccacatttgcaccaggaaagcctgcctagcacctttgggccacttcacctattcctccacatggcccttcaaggccagaatcacacctccagaagcttcctgagcacccagcccacagggtccttctctctaacaaccatggcatctgcttgcagggcacacttgcactccacgtgcttcccgtgagccactctcccaagctgataggacccatctctcttcttgtcttgccctccactcatcccctgtgctaagtgctagacccaacaatgagtagcaaacagaccccatcctgccctcatggagcctgcgtcctgatgcgggagacaggagtaatcagacagtcacatccatggagtagaattactaactgtgagaagaaaaggagaggtcaccagtcacccattagtaaggcacaggggtgatgagatcattaagcaagatctgatgtaatcaaggtatcagggaagcttcccaggggaggccaggggaggatttgcatttatgctggggtttaaaggtgatgggaagctcatcagagaggctcaggcagaggaaatggcacatgcagaggccctgaggcagaggaagcaacgtgcatctggaggagcagaaaagggacctagaggaaaactcacacaagacaaggctaggcagaggctgaggggccatggggccacatggaacattttggactttctcccaagatccctgggaagctatatgggaggaggaggagaggcagggaaatggaacagcacagcagacgctccttaagctggagcgaactctccccgctgagctgttgaatggccttagccatacactggccagcagccctcagcacctgggaccaggactgccctacctggccttcaccttaacctgtagggagtggagtggctttgagaactgtgagccccaagtgatgctctggcttgatgctgtggtttccgtcccttcttgagactgactgatgctttttttgaaagacacacaagattctgagaaagggagcaacagttgacgtaactttggccacggcccacaggagagcagcccaggaattgtggtttttttccccctctgtcatcaatatcaagggcagaacagtggcaagctgcccaaccaggctcccaacatctctgcaatcagcctgttcattcccatcaaaacaactttattttatcatgttggtatttggaagtcatcaatctctgagaaaagtacttctcccaaacatgaaacccatctaccataaaaggaggcggccagagatcttgtcaggagccgaggtcagagagatggacttgactgacatcatttttaggaaatccactctctggttggttcggtttggtcagaagcaaacgccaactggtctctggagacgaaaccagcactttgtaatttaatgcctcttccttgtggccagatttcactaatcctgtccccagtgaggttggggctctgtctaggactagtcccaccttcccctgggcccccaccaccccctcactgggcacctcactttggctgcaggatggaatgcaggcagctggctttccctcccattgcgtctccctgctggaacccaaaggcagaggcaatgggacctagggcaggaagcggagaccctcttctctaaaaggaatcttcccttctccccagtgagtccttcttatgaaaaactgatctagggagggaagagaacacatcaccccggcaccccaagctatgtggtcatgtgtccagctaatgtgtccccagctgagtgatttggggaaactatttaatctcccagaggtgtgattgtatctgtctcatggggttggtgtgagatttaattgattaatgtaaaactcacggttagatgcctaggatcgtgcctggaatatatcagcgctcatcattatttcctttctccttttcctcactgaggggagagactgtcccagacaaatgaagatcctggtctctaactgttcagtcaaccagtatctacgagctggacctccattcaaggcactgaggatagagcagtgaggacacagcagagtcccgtggcacttagagactataggaatattctaaatatcagccatgtgacaataaacaaatgtcatatgtttgtgataaacgctatgaggaaaaatggagcacaggaagggatccctggggtgtttggtggcctggtgatggacaagatggcattgaaacagagattctaagactggagggagagagccttgcaggtatgggaagaagagcattccaggaagagggaacagccacggcaaagatgctgagcagagaacgagtctgaagttggaaggacagcgagagggtcagtatggctggaggagaggaggaggagagggtagaaattaatggggcagagtgaatgcggtgagattatggagggccttgcaatgaggagtttggccttggctttgatggggtggaaaactcattgatacaggggatggagctgaggggtgacgggatctcacaggtcttggaagggtccctctggccatggttgcacaacaagcactgatagagggcttggggtggacaaggccccaaagacacaatctgtggcttcaccttcactggccctcacccctctgcaggcctggaagtggcaggtggtctggatttcctgacagctagaacatactttccttttcctgctgggtcagatgcaggaaggggaagtcctagtctctagtgggcaccaggaagccaggcaaagtgccgtccacaatcagggtgtatgtggcctgtgcatgtgtgtgtctgtgtgtgtgtgcacgtgcgtgcatacatgtatatctgtgtgcgtgtgcatgtgtgcatacgtgtgtgttcattcctgggacagatttggagagagggtaagtttctctctgccactgcaacactccttcagtaacccccctatgcccaccaagctccgagctctgcacaggtgacactggtgtctctctctctctcctctgtgacattgcacatgtgacactgctgtctctctctctctcctctgtgacatgccttcactggccagggacctgtgttcttcaggaccctgtgctcaccggaacagagtcctcttctccaaggctgcccgctgctagccaggctgataagttcatttatggcatgggatttgtaaacaaagcactaacgggttcatatactcttcttccccaacccccactccagggccatgacactaaattcatgtgggagattaggaatcgtgacgatagagtgggcagctacatagtcacgtgctgccactgtcctcccctgtacccatagcaggtagtgctatcagtcacactcctcttgcctactgagcccagacttgacctcaaaatctttcctaactcagtgctccagaagtgctaatgatccattggcatgttcaataagataacacgtatctaatatccctacttgaaggtccctcagttttactctggggactttaattctatgactctaatgatggaaattttggctactgttatgtgtttgctgagcaaaaaaaaaaaaaaaagggagacagtgggaaaaataacttgtttctgtatgataggccttattaaagtaggtgccccagggcttcacagttgaatactgagcagggggtcagtgcccaggggaaggagagtggcgcactcgtgtgcgggtccaagcctcaaattcagaggccctacccagcgggcttgggtccttgggaaggtcagctaacctctctgaccctctgttttccctttgctgcttgtcatggagatcgaatgataacatacatgtgaatggtctttgaaactaaataagtatcccacatgtgaaaggggcaacaatgataaaaggtctattctgccaattcatttttacttatccaaaagttttggctcgtggcaagatcccacccctcaaatttaatgcgtcccaagtgtggatgggtatcaaggccagatgtatcctgaaaatgccttctggtggggaggcgtcacagagtaggtgtctgaggtcctagttctgatgctaccactgacctgctgtgcagccctggacaatcctcttaacctctctggtactgcaccaagtgcatctgccaagtgaggacgatgctcactcattctccaaggtcctgtgacagcaaatgatggcagatgtgaggaggcccagaaaccaaaagtactatacagatgtgaggtgctattttgttgtttcttgtgatttgcccaaaggggtaaagcatttggcttaacacaggcttcctgccaggaagaattagttaactgacaggtgacttaaacaaacaggggcgacccttggggccagggcgaaagggtcatagggctttttctgtgctcgcttcagctgccccggccaagcagaagcccctgccgaagccagacggagctttgtcaactggttcagagggaagtggggagcccagtgccggcgcccatggccactgggacctcaggcttgcagaggaaggtggatgtcagttgcctgactcttcagcagataggggaggcggtaatgaagggaggaggagggaagagaagggagagcaggagagaggaggaaaatgagagggaaaaaaaagaggagaccaacaaaagctggaagcagcagatgggaggaaggagtgatggagaaggagggcaactgtctctccctggtagaatcgggagttccctgggggaaggacaggtcttccattcagactgggtctctttgagagcaggttttatgtcccccctatccatgtacagggtctgtattaggcctttctttgtggggctaatacaggaatacctgagactgagtaatttataaagaaaacaggaacccggccaacatggtgaaaccctgtctctactaaaaaataaataaaaatcgaccaggcacagtggtatgtccctgcagtctcagctccttgggaggctgaggcacaagaatctcttgaacctgaaaggaggaagttgcagtgagccaagaccgagccactgtgctccagcctgggccacagagtgagactctgtgtcagggaaacagaaaaaaaaaagaaagaaagaaagaaagaaaagaggtttattttggctcacagttctgcagactgtacagaaatcatggtgccagcatctgcttctaatgagggcctcagggagcttccaatcatggtggaaggtgaaggcgagccagcgtgtcacatgcaagagtgggagcaagaaagagaggggggaggccccacactcttaaacacccaggcctgtgagaacttagagtgagaactcactcatcaccaaggggatggcaccaagcaattcatgagggatccgcccccatgacccaaacatctcccaccatgccctacctccaacattgggaatcctgtttcaacgtcagatttggaagggatacacattgaaaccatatcaggctcccccaggacgggggtggaatctctcccatcagactgtgggccctaccaggcaaggactacatcagccacctcatacagggactccccaagatggggaaacatgcttgtcccacagccaagaccctccaaggttcatgacctgccaatgggtcctgacacagcccagggcctacacctctgcctgtctgactcccctgcttctcctctcctctccccctgcctcagggttcacggacaccttcaacatggacaccaggaagccccgggtcatccctggctccaggaccgccttctttggctacacagtgcagcagcacgacatcagtggcaataagtggtgagtgagagcggccgcccacacccagccctgtaccattccacacccagccccctccatcctgcccctgtgccctgtggctgccccactggccctcacatggagactgacgtttccagtgacttgactctgtcccagcaggtcagagactgcacaggctctgctcctgactatgaaagcttgaatgttcaatttctcaagccctgtatcttctcatctgtgaaatgggaatgaacgagccctccttctctgggttatgtgacagtgggggtagcaggcacctggggaccaattgttagcccctggtcatgtctacctggagagctgctgggggtgtctctgagagggtgggtgtgagtgtgctctctagctgaaacccaggcagcgatggggcaaaggggagggagagccagaccaagtggagggagagggctggaaagatccccaagagccctccagagcaggggcaatcaggaggaagaaaggattcacctccaattttaaaaataactttatttcaacatattttatcatctaactcactcatttcaagtatccaagtcaatgatttttttttaaatgtaccatgttgtgaggccatcaccacaaatcagttttagaatatttttatcaccccagtaagatctctcgccacatttacggttagtcatcctcctccccacttggtttttagctggcagaaggctatccttcctgggatggaaagggccaggactctgcatggcccttttagaagcccttgcatagtcaagagaccacatgaacactcgtgatcaatgttctacgctgccctcttcccactctggcccctgtctaccctccccaacctctcccccttcttgtgctccccgcacccccttacttgtgttcaatgctccagccacatggcacaatcgcagcattgctgtttccccagatcttcttcaaacatgctcttcccttctgtgacaccctctcctgacttctctgctcaccccaccaccatctggctaattctctcgtattctttttgatttttgtaaagaaatatcttacttattatctttctaccgaggtataacatacatacaacaaagtataggcattttgaatgtgcaacttaacgaacttccatgatatacacctatgtaatcacctcccagagatatatccaccatttccagcttcccagaaggtggtgcccactcacccccgccccagccagtgcccctccagggacccactatgctgactcctatctccataggttagttttgaacttcatagaggagaaatcatgcaataggtgctcatttgtatctgacctctcactcaacattacgcctgtgaggtttaacctgttgttaagtgaaccatacttcatgcttccattgatgagcagtattccattgtattaatctacaacaatgtatttcagtttagtgtttattttactgtatttggattgtttccattttgggctatttcaaataacgctgctattggcattcatgtacgtgtcttttgatgggcatatgtattcacttgtattgggtttttactccgggatagaattgctgagttaaagggtagttatgtttaactttttagtaggacctgccaggcatttgtttcaaagtggtttaccaatttaaactctctctagtaaaacaagagccttctggttgtgacatgtcttcactaattcatgacattatcagtcattttaattttagtcattctagttgtgtgtggtggtatctcatggtgggtttaatttgcatttctctatttactaatgatgttgaccaacttttcataaatttaatggccatttttgtatccccttttgtgaaatgctgtatcaggtcttttgcccattgtaaagattgtgttgtgtgtctttttcttactgattaaaggccttttatatatataaaatatataaataaatatatataatattataatatttattatataatatataatattataatatttattatataatatataatattataatatttattatataatatataatattatatttattatataatatataatataatatttattatataatatataatattataatatttattatataatatataatataatatttattatataatatataatattataatatttattatataatatataatatttattatataatatataatatttattatataatatataatataatatttattatataatatataatatatttattatataatatataatattataatatttattatataatatatattatatattataatatataatatataaaatatatatattctgtatatattatatatattatatatatatattctgtatacacttcctttgtgacatagaagcattgcaaatatctgttcccagtctatggcttgccttttcattctctaaatggtatcttttgataaacagaagtccttaactttaataaagtctaatttatcaatattttttatggttagtgctttttgtgtgtcccatttaagaaatcttcacctctccccatatcatgaagatattcttctctgttttcttctagaagtttgatgtttttgctttgtcatttaggtcaatgattcatcccaagttaatgtttgtgtaaggtgtgagataaaggtcagaggtttttgttttctttttctcatatggatggccagttgatctggcacaatttgttaaagactattttccccattgaattctagtgacatctttgttgaaaatcgggtgaccatagatatatgggcctatttcttgactctattttattccatttgtctatttatctaaacttgagcaaacaaaaagctgctttggttactgcagctttaaaataagtctcgaagtcaggtagtgtgaattctctatatttggttttctcttcttttttatttcaacttttattttagattcagggagtacatgtgcagatttgttacatgggtatattgcattgtgtggaggtttggggtacaagtgatcccgtcacccaggtagtgagctacccaataggtagtttttcaactcttgttctctccttccctccctccccactctagtggtcctcaatgtctatagttcccatctttatgtccatgtgtacccagtgtttcgctcccacttataatagtgagaacacaccatattaggttttatgtttctgtgttaatttgcttagaataatggcatccatgttgctgcaaaggacatgatttctttctttttcatggttgtgtagtattccgtggtgtatatgaaccacagtttctttatccaatccaccattaatgggcacctaggttgattccatgtctttgctattgtgaatagtgctgtgataaaacatacaagtgcatgtgtttgtggtaaatgatttatcttcctttgggtaatatacccagtaattgggattgctgggtcaaatagtaattctatttttagttctctgagaaatctccaaactctgaactaattaccattcccaccaacagtgtataagcatttccttttctctacagccttgccaacaactgttactctggagcattttaataatagccattctgactggtgtgagatgatagctcactgtggctttcatttgcatttctctgatggttagtgatgtggagtatttttccatgtttcttggcggcttgtatgtcttcttttaagaagtgtctgttcatgtcctttgccctctttttaatggggttgtttttctttggcaagattgttttagctatgatagatcctttatgtttccatataaatttttaagtcagcttgtcaattttcctccaacaaaatttgctgagatttttattggagttatactgaatttatacgttcaattttatggataaatttaggggaaaatgaaatcttaataacattttttctaatccactaacatgtatatcctaccatttattcagtttttaaaaatttctctcaataatgctttgaaatattcagtgtaagttttacatctcttattgcattaataaaatataaaatatttatattttatactattaaaaataaactattcttatttcattttatactattcatttcattttatactatgaatatagttatatttacagttaatataaattatatcataataaatatatatttaatgtaaatatattttcatatttgcatttatgctattagaaataaaatatttttatttcattttatactattcattttataccataaaaatatttatacttatatttatattatatttaatataaatcatattataataaatatgttaaagtctcccattattaatgtgtgggagtctaagtctctttgtaggtcactcaggacttcctttatgaatctgggtgctcctgtattgggtgcatatatatttaggatagttagctcttattgttgaattgatccctttaccatcatgtaatggccttctttgtctcttttgatctttgttggtttaaagtctgttttatcagagactaggattgcaacccctgcctttttctgttttccatttgcttggtagatcttcctccatccttttattttgagcctatgtgtgtctctgcacgtgagatgggtttcctgaatacagcacactgatgggtcttgactctatccaatttgccagtctgtgtcttttaattggagcatttagtccatttacatttaaagttaatattgttatgtgtgaatttgatcctgtcattatgatgttagctggttcttttgctggttagttgatgcagtttcttcctagtcttgatggtctttacattttggcatgattttgcagcggctggtaccggttgttcctttccatgtttagtgcttccttcaggagctcttttagggcaggcctggtggtgacaaaatctctcagcatttgcttgtctgtaaagtattttatttctccttcgcttatgaagcttagtttggctggatatgaaattctgggttgaagattcttttctttaagaatgttataataaatagaataatatttatataataatatataatattattattaataattttatattattttaaatatattttaaatataatattttaaatataatattttaaatataatattttaaatataatattttaaatataatattttaaatataatattttaaatataatattttaaatattttataatatatattttaaaatattttaaatatatattaaatataatattttaaatataatattttaaatattttataatattttaaatataatattttaaatattttataatattttaaatataatattttaaatattttataatattttaaatatattttaaaatattttattttaaaatattttataatatttttaaaatattaataattttatattttattaatttattattatattaatatttatatataataaataatatataatatattatataataaataatatataatatattatataataaataatatataatatattatataataaataatatataatatattatataataaataatataatattattttaaaatttttaatttaatatttttataatattttataaaatataatataatacataatatataatatataatatattatataatatataatatataatatattatataatatataaaatttaaaatattaaataataattaatatataataatttattatataataaataatttatatattatataataataatatattatatattatatattatataataaataatttatatattatatattatataataaataatttatatattatataataagtaatatatattatatattatataataaataatatataatatattatttattatataataaataatatataatatattatatattatataataaataatatataataaatcatattgtaataaatatgttatatttaatataaatatatttgtgtttatattttatactattacatattatatatttatattttatactattacaaatgaaatacttatttcatttttcaatcttttttactagtacataaaaatacaattgatttttgtatatttacaatacatccagcaactttactaaagtcatttattatttctaataactcccttttggattcctttggattttctacatatacaatcagatcatttgaaataattacagttttgtttattattttccaattttcctacctttatttatttttctaattgcactggctaagatcttcagtgcaaggtcaaaaagaagtggtgatactgaacattcttttcttatttctgctatgatagtgaaattttccaatatttcataattaaataagatgttaactctagtttattcatttatttattgtagataactccagattaaagaagtttttttctattcatagctttctaaggttggtttttttaaaaattatgaacaggtgctgaattttatcagatgatttttctgcaacacctgacataaggttctccttcattctgttaatatggttaattacattgattgattgattgattgattgattgattggattgatattttctttaactattaaaccaacttgcattcctgggataaacctcatttggtcaccacgtattctcccatgtatatattctcaggaattttgtttctgttggggtatttgtatctgttttgtttcatgagatatattgacctgtaaattttctttttggaaatacccttatcaagtttttgtatcacagttattcagagctcataaaatgtgctaagaaatgttttcatttttttctattctctggtagaacataagatctgtattattgcttctttaaatgtttaggataatccactagtacagcatctagggttgtttcgtgggaagatttctcattatagattcaacttcttttttattgttattattattatactttaagttctagggtacatgtgcacaacgtgcagttttgatatataggtatacatgtgccatgttggtttgctgcacccattgactcgtcatttacattaggtatttctcctgttatccctcccccagccccccaccccccaacaggccccagtgtgtgatattccccgccctatgtccaagtgatctcattgtcttttcacatagtcccatatttcttggaggctttgtttgtctttactctttcttctctaaccttgtcttctcactttatttcatgaatttaatcttcaatcactgatacacttgatcgaatcagctactgaagctgcacatgcatcactaagttcttgtgccatggttttcagctccatcaggtcatttaaagtcttctctacactgtttattctagttagcctctcatctaaccttttttcaaggcttttagcttccttatgatgggtttgaacatgctcctttagctcggagaagtttgttattgccaaccttctgaagcctacttctgtcaactcgtcaaagtcattctccatccagctttgttccattgctggtgaggatctgcgatcctttggaggacaaaagtgctctgacttttagagttttcagcttttctgctctggtttctccccatctttgaggttttatctacctttggtctttgatgttggtgacctacagatggggttttggtgtagatgtcctttttgttgatgtggatgctattcctttctgtttgttagttttccttctaatagttgggtccctcagctgcaggtctgttggagtttgcaggaggtccactccagaccctgtttgcctggatatcaccagtggaggctcagttggatatgcagaaatcacccgtcttctgcatcgatcatgctgggagctgcagactggagctgttcctattcggccatcttggaatggatctcaacttcttaaagataatggattattcagatttgctactccttcttgtgttaattttagtaacttgggtttttcaagtaatttgtacatttcattcaaattttatccacaaatattcatattagcctcctattatcttttcaatgtctataagatctatatatcctctttttcatttctctttttggtaatttgtgttgtccctcttattttttatcagtcttgctatgggcatattaattttattaatgtgttctaggatcaactatgggctttactgattttctctattgaatccctgatttctcattcattggtttctattctcattttaattatttcttccatttttttatttaatttatctttttctagcttcttacttaaattgttgattttctgaccctttttcttttctaaaatatacatataaggctatatatttcctctaacattgctttagctgcatcctacaaattttgatgttttcattatcattcaggttaaaataatttctaattctcatcatgatttcttccttggaccgtgggttatttagaaatgtgttttttaatttccaaatatttggagattttctagttgtctttctattatatttctaattcaattccatggtggtcaagagagctgctgtataatttaaaatcttagttgtttgttggcaatattttaaattactgattcaatctcactgcttgttattggtctgttcaaaattactgtttcttactgattcaagctaggatggttgtatgcttccaagaatttatgtgtttcctctagattttctagtttgtttgcatagatgttcatagtagtcttgaatggtctcttataccactgtggtgtcagtcgtaatatctccattttcatttctaacacagctttacaatctatttgcaattagtattttaccactttctaagtaacacaataactttacgacagtttgattccagtcccctgtcctgtcctttgtgttatttttgtcatatattttacctttgcacatgttataaattccacaagacattattgttattgttgctttaagttgttaatatttatgtctacttatccacatagctaccctttctggtgttcttcgtctcttttatataattctgtgctctcatttgagataattttctttcagccaaagaactctacttagtatttcttgtggtataagtctgctaacaagagttctttcagccttgggagttgggttttctgtttgtttttgttcgtttgtctgaaaagatcttaatctcaccttaatttttgaagtatttcttatctagtttttcttttagcactttaaaatgtcattccattgtctattggctttacagtttctgttgagatgtcaaccatcagttttatcattcttttgaatgtaatatgtcattttcttgtggttgctttcttatttgcctttaatgtcagcagtttgactatgatgtatctaaatgtagttttgttgtatttgttctgcatagggtttccaaagcttcttgaatctgcattgatacttttaattagatttggaaaattctctaccttcatttttaaaaatatagcttttgtcccatttcttctctccttttctttctaaacttgaattgtgtgtatgttaggccttctcgccatatttctcatatttctgttcagttttttattccatttttctcttgctgtgctacaatttagatatcctctattcatctgtcttcagggtcactaatccagctttctgctgtatccattgtgcagctaaacccattcgatatactctttattacagatattttattttgctcctgaatgtccactggattctttttttatagattctaattctgtcacaataatctgtcttgatcccaattgtccatcttttgttctattttctttaacacattaattataattattttgaagtcctggctggttaactccaatatctggatcatctctggtctgcttctggtgactattttatctcatggttatccattttttcctgattatttactcattttgtaaatattgtgaatattgtggatgttacagttttgcccttattcctaggatgtggtctttactcttagagcatagattttctggggtctcaaatgaaatcccagagtattcattaaggtctctcctttctgactgggtatgaaccccaacaccttcctcccagaataggaggcaacctctaaaatctctgctcccattggctgttttctgatagattttccagtgtatcatactatgcatacacagcttaggagtcagccaagaacctgagggaaactttcaacagagcttttgagactcttttcctgttgttctctcctttctggtatgctgcccttcccaaatcctagtcatctttgcagccccaactccaatccctatttcctccatccagcaagacttctactctctgcatccatttccctgtgcttcagcaaagaaaatgccctcagaggaaaagctggggtgaacagggtttcagcttctgtatttcccttcttacaagtattgagctctgccttgattgctgtccagtgcctgaaaatagttgttttagatattttgtgctgtttacatagttgtttatggctagaattgaaagccctctttcatattctttttatcaacttagatatcacttcctctgagaaactttctctgactatcccttcccatcactacataagctgcccccatagaattctgtgtttctcttttcatagcacttatcaaattgaatagtaattgcctgtatcattatcttacttcctgaaatcagcggtataattcctggtgtttagtaggtgctcaaagaacttactttgacagactgaattaaggatttgagcctctttcaaccagcccagacataagatgcatgacatccatattgtttacatggtatgaaaggttaaaaattaagttgaactgacttttccaagacagaatttattttgaccaatatttgtttattaggcatctgttaatgaattttactagactcggcaaaatattggtatgagtaaaacgtggtttcactctcaaataagtcacagaccagttagggaggcaacattaatacccttgaaataatttaaaaccaatgcaagtcaaatatgacctggtattaattacatgcatctttgaggctactttctccatgaaggctttctgaatccttttcctagcctaaaatgaccttaccctccccaagccttttctgtgataacacatatcacttcccactttttgttggagtcactgaggcccatggcccatctcccctgttggacaccagcttcatctccctgcagcccaagagcagccaacacagcatcatcttcacagcagaaacccagccagactctgaaaggagaaatcactgtgcctggggtctctggaaatgctccatggaagagggcagttgaacatgatcttggaggttgggcatagaagagcagaaagatatgacagaaccaactcctggtagcttttgcttatctgagtgcagcctggagcattgtgggagagaaatggtgccccaggtgggcagggtcccacccattgcagccactggacctgagcatgttactgccacagccgagctgagagaaacagagagggtggccttggggaccccgagagctgagccccctccagaatggacaggagcacactgggcctttctagaatctctgttcccacttgtgtggatcccaccacaaatcctacttggctttcccctccctgcttcctcttctggccccatcttctctgtcgtatgggcagcattccaagaatttgattcagacctaggaccctatgggtgttgatcctagaaaggagaggttgatgccagtgtcatttaggagacattggctgactattaagcatgaccccagtgggatgtattgattcagctctgtgccagggtgaacctcaaaggaaggacaggagcaaaggtttgaagtgcgaagcctctgccacgtggaagaagaaccttgggagaacctctgccaaccttcccgaacctctatttgcccatgtgtaaaataggaatgagcatacctgtcccagggagctaggcaggatcaaagaatacccaaaacacgattatattttgtaatcagtaaaacaggaaacgaggattgagtcactgcaggccactgctgacttgattgagaggctccctctgacccaggctcttcctgcctctgtggtatggacctggcttccgacacctcaggcagagcttgcgtgccttggtctgcatctcctggggctgtgggggaggccaggaagctgcatgtttgaaagagtttcccaggggactctagcagggagactgtaaccccccaaggatccgctgtttccactgagcatgtaagacagattccagtgagaaagaacatcactccccagccccggcccccaaatccaggtcccagcattgcccccagggaagaatccaccgctgactcccacctcaggcaccagtgagatatgccccgtttaccagccgtaagcctccttgaacgtcaagggcccgcagtaaacagttggaggataagagggcagacctggtggggcagtcactttattttcttaacatttctccttcttcccacctcactcacaactcagagctcaaactcagcaaagctgaccatacaccaacgcttcagacatcctgaacagttttccacatcccctggttctagcaacaataacaacactcgcagacacacaaaaaggaaagagaaaacaaattcctcttgggctgagtgttctctgcccctgctttttaagcccttgtgtattttcagagaaatttaatccacatgactatcgcatttacattgaaattattaattccgtgggttttaagaccatttgatgtcccagcagctccaatgcagggcttgcagagggcctctctgagcctttggtcccctgaagcaggaagcctcctgatgctgagaaaaaacagagctgggcctcacaagtatcccatttttcactgaagctctcacccctggagaggagagaagagaagcctcagctctcagcaaggcagaacgtttctcctcctctccatgagggcgccagggagcagaagactgccagtccccagtgagctccaaaaggggactctctagggacatggtgagctttaagatcaagagaccatggtgaattccctgggtacaggtgtacagacaggagcaacttgtaggggaagtagatttgtccccattttacaggcaaagcaactgagactccaaatgatgacataattaataagtgtcagaggtagaggcaagactggagcccagatctctctagtccctctgcctcagggcaggagcctggtgagccccaaggggacacagaacagaagcagcctctgccccagggctgccatgctcctccccagacacgctgctggccccatgagagcgaggctgtggtgtccacagggcccagcactaagtgtatttgcataagtgggttggtgggagatcaagtgctgcccaacctggaacagaaggcgtatgttcacagaaccccgatctcagatgaatcccaaaggagggacacacaaaaaggatctcaggtgttcatgggagagagagttaatttccaacagcatgaggctgtgggggtggagggaattgagagcggattgtgaaggaggaggcttccaggtggataggattccaatgttcagagtacacatgggtgagaggagtacagcagatggaggggacagcatgggaaagagtacagagatggaggggacagcatgggaaagagtacagagatggaaaagaagaaactgtgtttagagaaaggacgccatcccatgtggctggaggagaaggtacaaaaagcagagaagtaaggccaaaagctgggagagtgatgatcctaccatggagttcctaaatagcagagtgaagagactgtacttgggaggcaatagggagccactggaggttttagagcaggagagtggctcaccagagttataattttggtgatcaatttggctaccatgtggaggatggaatcgagggaggagaccctggaggtgaggagtcaagtgggaaggctgtagaagtctaggtgagcaaagaggatgctcaagctaaggggtgggggcttgagaaaggggcatgctttatgagcagcagtaattcattcattcattccattaatacttcttgagtacctgtaatgggttctggaaactcaatggtgaatagaattgcaaggtctctgctctgatggagtttttcttctggaggggcaaaaagtatgattagtttgtccatcatctgtcagatagttatctgtgccatggaaaaacattaagcagggtaagtgggcttgggaacagtggttgaattgagggctcaactttatacaggctgtctaggatgccgccatgacaggatgatagtcattagagacatgagggaaaggaagaatctgagagaatcatggttatctgagaaggaattccaggcagaaggaatgacaagtgcaaatggcaagtgaagtaggagcatgcttgagatgttcaaggaacagcaagtgtggctggagtagagtgagctagggcaagagcagaaggaggcaagttcagagatgcaagaggctgcaggatgattgaggacatatcttgctgactaggaagattgtggtatcctttacacaaaagcaaaatccagcaacagggtgcaggctttggaagttcaggtgagctgagctttggactcattggtttggaggatccaagggccatccaggtgcaggggagggggccttcagtttggcagggaaattagggctgagacccacatgtgcatcaggagagctccattcagcagggagaaggaagcggggcttgggatgaacgacagactgcagaacgtccataggtatgaggaggaaggagaaagagaaggcggagagagaagggtcagaggaggtgctgtgtccgggggcagaagaggagaggattgtgaggaagacgaaggtgggtgcagcatcgtaaggacttccagctctaggagggaaagcagcagccaggagtgcctctcctagaagcagctgaaggggccgggctgggcagctcacagcactgggcagcctctaccaggattggagcccagcggatgtaagggaatgtttataatatacattaacacacacagaaaatctccagtctctgcaaggctttactgtcatgtgtgtcatgtgtaaagagtctggaatgaactactgtccagcaatgactctcaaaccttagcgtgcatccctggaacgcttgctaaatcggattgctggaacccacctccagagtttctgattcagtaggtctgagtgaggcctgggaatgtgcttttctagaacttcccaggtggtgctggtgctgctggtctgggaagcacactctgagaaccacacacttagcggttgccattcccagtgtcttaagctggttacagcaggcagaggcagaatcaccgtgtagatgcctccatctgtggggccagggagagcccagagacagcggagatggggctggaggtgaagtggggaggacagaaggtgctatttttgaggcgatctgctcacacttcattcttgtaatgcacccagaggccccttccctctctccctcttatcctttcccctaccttcttctacttttccatccctgttccttcactttgccagatttctcaccttactttctcatcttttctcctcattctcctccctttccccctcatcccctcctcccccatcccttctcgttcttccttcccctctttactccctcgcctgagtctctgatagacatgggtgagatagggggtgagggggcggccaaggcgaagggaggctgccctgtcccacctctccctgcttctctcagcagctgccagtgtctttagtctcatcagcctgtcttgtacccacgagaggagggaaggataaagagccccatccaggctcccagcacccacctgcagcagtgggcctgcagactcccaaggctgggcaaggagagtgtgcacagagaagggtacaagagcagccagagggagggtccctggaccaggagaaaaaggagaaaggggatcctggtggagcaggagagaaaggaagttgggagatgggctgccccctgcagaactgaccggagcctcggtttcctgaatcctggggtgtcctaatgggaaatagaagcttctcttgggaaaaagggagcattttaagcctcactctcatcgccctcagccatggagggacagacatggtggcctgactccccagagtcacaaagggtcctgggcagccttcccgcctctttgaaggatcctctgggattattttgcagcaacttaactctgcactgtgtggccagacatggaaagggctgtggaattgggtgtcctgaggatggactgcgaggcagtagggagggagacccagcagcttgcctggcttagaagcaaatcatccaccatggccaagtgcagatcctgccaacacccaccatcaccactaccactaccacccccaaagcttggcatgacacagcagatgggcagccatggcccctgaagtggaccagggctggaatggacctacctggcataggttgatcaggttaatacccatctctccttggggacctctctatagatacagtgtcttctacttgtggagactccaggcagaggggagagccccataacctgaagacagggccaccattcccatgatcttcagaagaccccaattctcagagatgatggtgggctggggagggacagaatggctggagacaggcccaggaggcgcaggtggaccactcaggcctgtgggtggggttggcctttagggctgctccgtcagctgcagctcctccccaggcctgggaggggtctgagaaatcatttgccccagcctcatgattttacagatgggggcactgaggcccagaggtagaaagagaccagaccaaggtcacacagcaagtcagtttgagggccgggactgaaacctagtctcccagcccccagcccagagttgcttccatttctgcagcatttccaccgggaataacaagcacttaggcgaaaactacccaagggtcagttcacccaccatcgcagatctcatgtctcaagactttgtagatgatatttacccaaactaaattctagttgggctaaggcatccatccttttacagtgggtttaggtactgaccttcccagataacaaatttgcattttcactagggtcttccatgtctaaaaccagaggccaactatggtggaatttgggttgactgcaaaggcaatccctgaagagtaaatccacaaaaccagccgtggagcctaggcccaagagtgttgccctctggcactgccacttcctcctctcccaacccagaggtttcccagctcccattgcagtcctttcccacaggcatagagtgctgtctcggggcacacacaggccttctgcctcagcagaggcagcaaaggcatgtccgagtagctcctcactacagggagaatctaggcttcgaaatcacagaactgagctcccttcccagcttggctactttccaagcaatggaaactcaagcacatcacatccactttctggatcacagtttcttcatctgtaaaatgggtatggtgatgtgaatcccaaagggttcttatgaggaagaaataggagatggtgtttaagtgtctaccatggggcagaggctgaatgagtgagttccctacactggcctatgccctggagaaagggtatggtgtccagggacaggttttgaggaaagggcctctggggcttgttgtttgagcagaaagatgcatcttacacaagtctgccctttttcatcagtgacagtgcaggctgccaggcctggggcagccttggttgttgctgtggaagcctttctgagcaacatcctttgctcttttcctggcctgggcccccagaacaggctcccaacaccacagcacataaacgctctccgctattttctcttggaacaaataaaatccggcatcatgactcattctggttaaaggataagtcactacagaagcgaagcccaggataggatgaaccacccagtgcacgagagatagagggagagatagagagggagagaggaaaaactgtattcgtggggaaacgttggcccagggccccaggccaagccacccagcagaccttggcaggcacacacagacaagaagaaaatgagctgcagagggctgggagagtggaaatccagacattcgtcctcactggcaggagctggggcatcttcaggccctcaaatgcacaaagcagcagtgagaatgaccaaggagagcacagcagccccagaaccaagagcgaagtctggggcactgtggatttaggatgtggcctgcagacagctcctaaggttccttgcatctcttgggtgattttttttcctcttctctccttgctttttcattctgtctcctttttttttttttttaatgccaaaccacacaagaaagtcccagaaattgaagagatgtcagtgagggtccaggaaacttctgacacacacacaaactggtcaaccagagatggagctaatctcagctccaccctctaaggcctctaaggccagtcctcagggccatagaacgtccttagtgctgaactcggaaaggcaggagttcagccattgcatgcttttagaggtaagacgcacaatctcggtagtgaaaatattgaaaagaaagtctccttgttactaacttccaagaaagaaaataaatttaacgtgggcagttcaggaaagccagaggggtttgccaactcagcatctttgccacccgtctcttcccactcccccaccagcctccccctacagcagcctgtgggctccccacaacctcctttccatttctgcagccaacaccatttgttctgcgatgccaacatccttcctaagtccagtgaaggagaggaaatgggagctttccacatgaggtggagaataaagaaatgttgaaattccctgtatcttgagagtggctttctataacttcataggtttgaattttcaaggctggtactgtttttaattgctccttggcactttatgtgcaatgatcataactgacactagggggtgcaagatagccctccaatggctcctctagtcaaccattgaggcttcctgtagatatcactcagggtagcatgtgcttccattcagttaggctataaaatgtgaaaaacagaatttcttattgaaaaccacaaggtgcaatgtgcatgttttaaggttatatacaattagaaaaacaaatgaaggtgccataaatgccttttctcactaattttaactataattaatcactatctaacccttgttttctgcaggcttggataaaatacctctttctaactttctctgactccttcatgaggaatcaagggctccttgggatttctctttttttttttttcttttttttgaggcagagcctcgctctgtcgaccaggctggagtgcggtggcatgatctcggctcactgtaagctctgcctcccgagttcacgccattctcctccctcagcctcccgactagctgggactacaggtgcccgccaccacgcccggctaatcttttgtatttttagtagaggtggagtttcactgtgttagccaggatggtctcaatctcctgaccttgtgatccgcctgcctcggcctccaaaagtgctgagattacaggcgtgagccaccacgcctggctgctccttgggatttcaaactctttcaaatagcttttctttttcagtgccttctcttccaagcaaccacaaaactcagacacataaccaatagcaagatgcttgttatcaacctgaggccatcttgacaaggtttctgtcatcttctgttgaattcctgctttccctcttgaatcttttcttcctggtttatctgtgatgagtcaccttgagacaataatgtagacagacatggaaagagagttgtagaaaaagccaatcaagaaaaatggaaactggaatgggaaaaggaaagaagaaagatgagatggaaaataaaatgccaacaagagagaagagagggaagggaggctgtgaacccccaagggtagggcttgcctttattcatcttggcctcttcaggggttggcataggcccacagatggtgaagaagaaagggagggagagaatggttccagacgtctggatgtgacccaaggtaaatcttggggaagcccaaagctggatgtccttgtgttaaagggtctggagaccatggcccctggatgggagaagttgagatttcttattttttttaattttccttgcaaagtttggaagggccccgctaaagtgaactcaggcaggagaccaggtgagtggtggctggtggcccggcccagctccgggatggctcaccctgtgacagcagatcctctctgcaatttctcttctgccactttccaactgccgagccaatgattttataacccaggaggaggacatttccaaaaatgtaatgacacacttcaccctccaatgaagctagcccacagcctttttgtttctttatggcttcttgaaataagaataagtctataagaatgactatttgtcacaacacaaagggagaggagaaaagtaaatctgagctttgaaccagacagaaaagacttcgaagcagtccatgtaaacaatgattccctaatgcaacccaaggccggcttctgtgtcctctgcgctcctgcactccatccacctcccagaggtggggcgaggcctgggtaggagagtgaggccgaagagctgccccttaactagctgggtgacttcgcctctctgtgctgtagtttcctcagcttcaaaattggaatgtagctgggtgcggtggctcacgtctataatcccagcactttgggaggccaaggtgggcaaatcacctgaggtcagaagttcaagaccagcctggccaacatggcaaaaccccatctctactaaaaatacaaaatttagttgggcatggcagtgagcgcctataatcccagctactcgggaggctgaggcaggagaatcgcttgagcccgggaggtggaggttgcagtgagccaagatgatgccactgcacttcagcctgggcaacagagcaagactctgtctcaaaaaaaaaaaaaattggaatgctgtctctgcctcaggattgagaagattaggtcaaagtcagggatacctgtagcgcaatccctggtacctaataaactccccccagaatattcattcatgcatccatttatttgtttattcatataaagtgctttgaatggagaggcacacatgtcccactgtttatttcttggttgggcatcctgtcctctattcccgtattatctgttttccatcatcttaaagcctggtgatcacctgataaaataatccaggggttcccaaagctggccacaaaacagaatcacctgtgaaaggtcaaaaagaatacagatatctcagtcaagtccaagaattacaaagacagaccctctagaggtggtgcctggtaatccctattttcaaaatccccaggtgagtctaatgcccagccaggtgctggaatcactgacttaattttttctaagaggtctgtgagttcccatggatccataggttaactccgttccaggcttacactgagagtggccctcagtgcctgaatccaaagagggatgaccaatggcaagaagttaagaaccccagaaagcaggtaggggcaacctgactgggtgacaatgctgtgcttgtcagtcatgtaggcatccaaccgtctgtctgtacttaggaccactttaagtagagttctctggacaagtgaggcaagaagggagaggacttggaaagtcagaagggaggaacagggatgaacctgttgaggatgactctgccacaagctccatgaaggcagggaattgtctgtccctccagatcccacctcaggcccagccttcatcatggaaggcagcatagaaataatgcacatgagcgccggcaccatgcgggaccctccctgtgagccccagccctttttcacctgagtgacacctattcattatgcaagcctctgtccaggagttgccccctccaggaaggctccccagacagcagagcaagaacccttcctctgtgccctgccacacctggagacccctcttgcggcatgttctccacactaaattcatcgggtataagtctccctgccctcactgggctaggggttaggctgtgcttcattcatctttatgttcacagagcccagcacatagcaagtgctcattaattatttctttgaacagaatgtgtccaagtccctcattttacagatggggaaactgaggctcagagatggcaggtgactcaccgtgggtcacttagcccatctggggataggttagagatagccatgaacatgtcaacaggcccacgaacaagaaaagagtatctgtcctttcacctccaggccatctcctttttctgcgttacccaaatccctgtggctggtagacacagctggaagaatgagggtaccagttgtgcctcagcctctacctgaccacgtgatttggggccaatcctgacattctctgggccttgctttcttccccagtctaatgggaatatcttccttgctggaccacctgcctggccatggtttgctggagacagttgggtgtgtacacctcactggccacatttaaagagtcaccatcctatttatgagccaaagcaagcacaccagcccagatcagagagcaggaaatgcttaggcccctttccttcctaccatgcaatggctgagaagctgtcagacctacacataccagaaattaaagctgtacattctgctgagaaacatctgtccaaactattgctgtgtttatgtttcatttttggaggagaaagctgctataaagtggaaagaaaaaaacctctgagcatgacttggaaaaataagcaagggtttgtcaggcatcttgcaaagagatgggagaggggttacattgcatgtccagcctctctgcggggagaacagaccacagccaccttcctgagagagctgggccaagggctcaccaaggctggttgtccacctgcagatgggacccagaagagttcggcccagctgtgctgccagttacaccccaagaagcaaagtgaagatgcagcttgtctttgcaaaatgagcagcttcctctatctgtctattcatgtgttcactcaacaaacagtgattgagccttgactgtgtgcaaggtatttgaccagcgctggggggagatttgaagatggatcagggtctctctctctctgctatctacaggcaaattatctagaggagataaaagacacaaacaataaaggtatagacaaagcttcataggaattgaaggagctttcagctaagagatcaaggaaggcttcctggaggaagaggcactgaagggtggatggaatggggatagactgagagtttgggatgaggagactgctcatgcagaggtgggaaggagagagtgcaggcaatgttgagaaacggatagacgagcagccgcgtgtgactggcactggggtgtgagatggggaggggtgctgaagattgacactcgaatgtcagacactgtaaatggcacaagttggctacttttattccgcatagtcagtggctgaggttctcattttccctccagatgggttgagaacttcctttgcagtcaccttccctcactcttccctcttctcttctaagaacttctgcaacttaggaaggaagcactgtttggatgtcagctgaggtggacctaaaagttgtcaagtgcaaaccagagacccaaatgttgattatgaagttgacgtttgtgatgatacttgtcaacaggtgtgtgcccaagctgaaaggggccgcctctatgtccagccatcagggtagcctgtaggctttgtatctaccgacttcatgactacccatagctacttatgtgtggaggccttttatttattagtattgataaaagatatgcaatagaaatttatttatttatttattttggagacaggatctctctctgtcacccaggctacagtgcagtggcatgatcatagcttactgcagccttgacctcctggactcaagtgaccctcttgcctcagcctcttgagtagctgggactacaggcacatgccaccatacctggataattttttatttttttatagatggggtcttgctatgttgcccaggctgctcttgaactcctggtctcaattgatgctcctgcctcaccttccctagtagctgggattatagacatgtgccaccatgcccagcttcaagaaaaattgttcaaagcacctgaacgtctatcagtagaaaaagggatgaaactatttatttcagtatccctgaacaggagaacggtataacactgtgcagccactataaagaatgaggcagaactatattatctatctataccaggcccacctctaacatctgaggggcctgaggcaagaaagtaaacagaggctctggcccacggcctgccatcttttcttcccaccgctggttctctctcaataattgggggacattacacatgtagacactccagcctgcacacccaagctctctctacagccctgcaaatggccactccttggctactaccatcagaagtatgcttctctatcagaaaggcaggtctagaggagaggcctgcacaggccctggactcaggcctaggctatttgggcaggagattccagcatcccagccacccagagtgggaggacagtggctccaggtgtcctgtccccttgacccctaggactcctcaccccataggaaggggcacagctagagaagggttggagtggaaccaagagcaggagccctagtcacacagtccaacgggggcattgatagatattaacacagaaatatgtccacatacaaaataattaaatggaaaaagcatgttacacaaccacatatgtagagtgattccagtttttaaattctggatgtcctctagattgtctgcatccctgctgctatagtagtttcctatagaaggctggattgagaaggggaaggagaaggctttcaagttttacttcgggccaggcgcagtggctcacgcctgtaatcccagcaccttgggaggctgaggagggcagatcacctgaggtcaggagtttgagaccagcctggccaaatggtgaaaccctgtctctactaataatacaaaaattagccaggcattgtggcgcatgcctgtaatcccagctactcgggaggctgaggcaggagaattgcttgaacccagcggggtggaggttgcagtgagctgagatcccaccactgcactccagccggggcaacagagcgatactctgtctcaaaaaaacaaaacaaaagtattagtttgcacagttctgcaacatgaacactagataacaaatgtgtattttacctttaatacacaaagaatcacagtttttaaataagtgaattttttgaaccaattaaaggattatttattacatattttcttatgaccgaaagaagtaaaacaaatttttcaaaaataaatagataaaatcaatctgggtgcgctagatggtcagagatggctgtggtcatgatccccagatacagtgaaagttcccagggtagaagtgctgctttacttggccagagggcctcctacctgcttccttagcagatccttcaaacagggcttcccatcctgcctgtacaccccagaggatctgcagattcctgggtcatgtcccacactggctgagtcagaaccttctggaggtggggttcaggaacctgcatttgtacctcccctggtgatcctgatgaccagcaagtgtggaaaccactgcccctcaaaaccctgaagggtgagcagaccaggtataatattcagtccctttgggtagatgagaacactgaggcccaaggcagttaatgaccttgccttcccctgccagagcttgctctattcatccagttgggtcaacccatgttggaagacaaaagcaagcagctggcagtcagtggtcccaagctgcagcctactgggtcacaggcatcccactaagccaggtgattcaccagctcatacaaaaactgcatttcaggatctactctgtgccagatgctgttctgggtgctgggatatttgtggctgcccacctgaccagcaagatcctagctcccttggggcttaaatcctatagggaaataaggacaatgaaaagttattcaaagaagccaacatcagacactacaaagtacttgaggaatacaaggcaagttggtgagagagggggtgacaggtcttcaggaaaggccgctttggggagctggccttgaagatgagccctaaatgatggctgagaagacccggctgtgcacacagtttatagcagcccaggtgaaaaaaaaaagagaggagaacaatgaggtgatctagagcctcagaaggcgtggtgaagagggtggattttgttggcatggatctggggctttgagcccagtgagagtcgccatgcctctgtttcccccatataaacactcctcatgcttctcaaacttaagcatgcatcagtgtctcctagagggcttgtgaaaacacagacgctgggccccacccccagtttcagcctctgttgatggtctggggtagggtccagggagaattctctttctcaagggagggtcagtcattttgttctgttctgcccttcgactgattggatgaggcccacccacattaggaagggtgatttgctttccttagcctacagatctaagtgttaatctcatgcaaaaaacaccctcacagaaacacccagaatgacgtttggccatatatctaggcaccccgtggcccagtcaagttgacacataaaattaatcatcatgtatatgtccctgtttaaaatgcacacaaaggtttccagtgtctgataggactttatggagggagagtaagggatgtgcaaacagaggggctctcgtttccctagcccccacgaggccaggcctcaccagatgtgtgagccaaggtgaaccacaagcccctgcagtcagtccaggaagacctgcaggtgccaacttctccccttgggcaggtcctgggccagattctccatctacacccaacccccagccagggcagccccggggtccccactgggcaggcatttggacttgctgctctcagcgcttccccagacccatcttgaacccattagccaccaaactcacaggggctggaggagattccattttccatggagagagagggagagaaaggcctcactaaaggaataatctctcctttgttccctcgagctctcggctcctccagtgaaacccctccctgatgcccctatctgatttcagaaaaggaaaatggagccaggagaaaaaagagacaaagggaccatgtgggtttaagggagcgggggctgtgttgagagaaaggaacaggtgaggaagggaatggggtgagagaggagagaggtgagaggctcctgtggggagaggccctgctggccctagagaggacaggcctcactcctctctgagcactgagccttccacttcttcacaatgaaaaaaagagcacaggacgaggagtcctggctgtgaaactgatcagtgtctctctgcaggctcatcatacttacattctgagcctcagacacaaactgctctgccagccccaaagctgtcctggagatcaaaatcaagtgcaattaaattgcattgaaagtgattcattcaaatgaaaaggataaccaatgataattggatttcccgggatgtgaggttgaggccttgcagagggaggctgtgaggcccatcagggaggggattgaacccacattcttcccttcctgggcagtccatgccagcctctggtctcaggatctcctgcagaggcaagctcatccttggaggttccttcttccttcccctagcatccagtgagctcaattcatggccttggctcatttcatctgctggggagctaagctgctcctgcctgcctcaacagacacagcctgtaaaagcctgactgggcctagagccccagcccttgcctctaggctttctgccctccatggcttgggggaagcaccaccctaggagtcaggacaccgtgtactagtccagctctgccactgcctgtctgaggcctcagacacagcacttctctccctggccttggatcccacatttgaggctggcccaaggaacctgcatgtttcctcccagctctgatgtctcgaggcctgttcccaggtaaccagaaacatctggaatgcagggttccctgtctaagcagctgttatatgtgggatgcacacaggacaaaagggtttctgttgccacaaggctaggccaggggaaagttttatgcattcagttaaacaacaagagagaaataatatacatggtgctggtgattccacccaccacttactcagtaagtccaggccccaggtggagcatgagctaggggatatgaatctgcttctccctcattggtcttggttgccatgtttctcttatagcataataacatatggaatttctaagagtaattttaactatgtgcacttttttgccttgtacactctaaacattaggatgttttaagttataagtacctaaaaactcacagacttactatgcagtaaaaggtagtcattgagcctatgtctgaaaagcccagtggtagttaggctgcaggtacagtttgatccaggggttcaaagcatcagcaggacttcagctccttctcttcatgcttctctcagctctcccactgtcaatgcatcagctcataaccctcatcatcacaaggtggctgccaacagttccaggccttgcattcactcactacagcatccagagaaaagagaccaccctgctacctgcatcccaagcacaagtcttgagattcacttgattggggagatttaagtctttgtcccaccctgactcaatcactgcagctgggggataaactctcctaacctgagctatgtgctccatccctgcaactgggaatagagtcagaatccctggatcctcaaacagaaatgagtactgttgggaaggaggaaatggaaaccagggaagcagtcaacattgactttagcatggaagctgggtcactccattgaactcctatgcatggaaagtactcgatttctcaacaaccctctttccaaggattgaattcaggggcttctcttaggcctgaggcaaagccaaaagcccccacagttgctcctgctgcagactgtcacacagaaggttaggttggtcactgggcacctctttgccgagtgccttcaggaccaccctactctggtgcagtagggcagtccaggacatcttagacctcaaggaatcatgacactacaacattggccacaccaggcagcagggattacaagccagtttatgtgagaaaggccagggtaatcaccgacggcttcctggagcaggtgggaatttatgctggattttaaagggatgatctccagggtggggtacacacaccacagggactatgctggactgtatactgcagtacagaaataaaataaatgtgagttctatttaggtttatattttatctgaaaaaaatagaattactaacatttaatatacagtttattaaaattggacagtttatgctggtataatttacatatacacttacacataattaggggtacatatcatcttttttcttacaggagattgaattttaaaagtttagagaccaaaactgcctggaagaatggagctgaggataagcagaattcaggatgagtccccaaagagccttgttggagagggtgtgaggtagagtcaggtgggagggcactggagccaggggccctttgtcttagtctgggtcctgcagggagccaaggagcccagcagagggcttccagagtgccatgtccggccttccagagtgcagtctccacagggaccatcctctcttggcaaggcccttcttagaggttggtcaacagggaaagggtcctacagggctgtggctggaatgtctgttgcccattttcccatccaccgaagccctgctccctgcgcctccgcaggaagaatgctgggagcccgcagccagtgactcacagcacacagccaatggaaagggccggatgctcgccacgacctttggggtttgctgtgccgtctggtgcccacgccaggaggtatagggtatcaagcccccgagaggcgtagcaggccctgaggctgcagaaggctgtataagcctgaggctgcagggggtggcaggggctgccagaccccaggcaatttggctggtctcagtggtgacgtgaacattttccctgcgcttcggcagttatcctctcaaactgggactgaatcatgtcctccaaacctcaagcccaacaggcacacgtaatgcccagactcaagaatggagagaagggctgacccaggccctctcttcatggcaaagaaacatttggggcaatgcagaggaagctgtcccaggagaactccagtcccagccccgcagcaaaccaactgtggggctgggtcagctcccctcttggggcctcagtttctgcagctatattatggcgacagtaagccctgccctcctacctcatgaagtactatggactcccagagaaatgaggtctgggagagtggagatgggacccagggagtggcccttgttctttgaaaaggacaaaaccggtctcattgcaaatttgaggtcacagtgacttagtgaatttactaccagattgtcccatctcagccactgccaggacacgtgacttttcggaagccaccagtctttgcgcatagcttgcctagatatggccccttctgtttctcggtgcctttctttctttttcttttccccgagatagagtctcgctctgtcacccaggccggagtacagtggcatgatctcggctcactgcaacctcctcctcccagattcaagtaattctcctgcctcagcctcccaagtaactgggattacagatgcccaccaccacgcccagctacttttttttgtattttttagtacagacgggggtttcaccatgttggccaggctggtcttgaactcctgacttcaggtgatccacctacctcagcctcccaaagtactgggattacaggcatgagccactgcacccagctggccgtggcttttctaatctagaacatgctgcgcctgattctcccagaggcaccctgagaggtgctcctccatctggcaacagtgcccgggaggaacgtgtccctcaggaagacttggtcacgtgtcaggttaaccttgaaaactggagcagccccagagaagtaagcttagagcccagggttctcttactgacctttttctttctttctctcactttctctctctctctcaagaatggagcagccttgaccacacaatcacttgcagaattaagtagccaaaaatcacctcgtctagacaaacagatgttatgggtccaattaatttctgccggtcaaaaataggcgggcttaataaggggatatatatagaatctgccatcatctggctccccaggggagaaacctcagctcttatttcatagacgcttaatttcaaacagagttctataactcccacttcagacctggctttccttcctgacagcgccaaggtggaccggggcagggagagcaatggaccacaagaagccacttaagtgccatgcagcccgagcctcccggccacctcctcccaaccatctaactccgctggcatgtggtggcttcttctttgggccatgtcaccaggcagtgggaagctgctggaagagcaaggtctaaagagctccagaaagtccaacctgtccctgtgccccagatcccaccatcatctgttctccatccctcgggatcgaaagcctttcggggctcttgtgggctgtggtgtcccctcccacacacagtaccgctgtccctgggaagggttaccgttcttagccactgttagtatgtggcctgagcagagagccagaccggcacccaaggcctagagggccccaggtgtgccagagtcacgtgccacagacccagtgggcaggtcagaatcctgggacactctgggcccccgtgatggggctgctctctggtgggtgagagatgaggcgtagagggccctggagagcactaaggacaggacctggggaccctccagtctgaggtagaactctccccagcatcagtgggggtgagtccacagccgcacctccagggtcgcaggcttttcctccagggcacggccaccggggcttggccgggccaggaaggagtggctgctcacttttccctaggtacatgtaagtaagtaagccaggtgtgttagttccttacggccgccataacagatgatcacaacctgcgtggcttaaaacaacagaaacgcattccctcagagtcctgaaggacacgagcctgaaaggaagcagcaccaggtccgcactccctccgcaggctctgggggagaatccttccttggttcttccagcttctggtggtcccgggcgctccttggcttggggcagcatctcctaactctgcctctgtcttctcgtgtctctcttctccccatgtctctcctctgtgtttcctcttcaggacacttgccattgaatttagggtccacccagataatccaggatgatctcaacccaagaaccttaacttagttacatctgcaaagacactttttccaaagaaggttgcaaaggcattggctcaaggcaggagccccagctgcatggcagcttccgcccactggctgccttgtccaccctgacccactctggggcaccagctttaaggcttccctgtaagatgaagaatgagggccctttcaggtaatgacagatggtcaagactctgtggctccagaaacatcattcctttgtcagaatgacttccattaccactctctcgtcatttgacaaactcatattcatcccttaagacccagctcaaacatcgccccctcctctaccagggatttgcctccatcccatttgttgcagagcccatgtggtcttcatctctgtacctaggcaagggcctagaatgggccacaggtcccatgactttatgctgaaagcccagcatccctccctcagggagacagtggtcccagcctgagggtctgcatgtggtcacacctccagggttccctcccaccctccccacccaacttcacctccacactgcccaccaggctccatcctctgccaggaaagagtacctcccccaatgtctttgctcatcttctcttccttcccaggctggtcgtgggcgccccactggaaaccaatggctaccagaagacgggagacgtgtacaagtgtccagtgatccacgggaactgcaccaaactcaacctgggtaacgtgggctggtggtctcttcacaatgaggccagcggttgtctaacacaaggcaggctctgatgcacgcccatgtccatggtcacactgactccttcctgctactccatgagatgacccagctgatatcactgcccccactttacacatgaggaagctgaggccagggagaggaggcaacttttccacagtcacacagcttgccaggggctcaccaggaatcaacccaggccctagctgtcccaggccattcctctttctgactcagccactgcccttcaactcaaagttttctctcccaggagaaaaaaaaaaaaaaaaggacttcctgtctttttcctgattttgaaataataacaacaatagctaacattcagatatcttcgataatgttcaccatgtgtgaggcacatttggactcatttaatcctcacaacacccatatgggatttaaccatttaacagataggaaatgacagcatacagaggtgaggggacctgcccggggtcactcagctcacaaggagcagggcttggcgtccagttcatgcaggctatggcctccctttaaccaccatgcagcactgcccttcggaaatgcaagcttttcctcgccaaagagctttcaggcatattctggaacagggagatgctgtgaacagcccccagcctccgaagccctcctaaaatctactcgtgtgtgtttgcatgcatgtgtgtatctgcttatgtgtgtgcaaatgtgtatccactaagcacacacaccagtccactaaagtgctcccacttgtcctaaaggtcagacagcagctgggtcattgcttgctctgctctcagaagggagaaaaagttccattttggctgacaagctgcaattctaggctttgccctggaggactggacttccctagggccaggaccctgggcctccctccttcgaggagcggggtctccaccccagagcagtggggtgggtctccctgggagatgggggatgggaagggcagcagggtctcactgggcgggaatggcagaggttcaagagataagctgatggatgaaaaggtcagcatccaaaagaaagcccaaagaactccccagggcagccagctgtctgtcacatggtcccggaggctcccgctgtccacatctgcatcagcaccatgggtgggaagttcaaaacccagcatagccggggcccaaacttcagtgaggaaatcgtctaagggaagagggtgcctggttggtggcatatggttccaggtcatcagcaccctgagaacacaggcttctgaaactggccaacctggagtccccttccagctgtacaaattctttgctgtgtgtccatgcggagttcacatcctctctctgagcctcagtttactcgtgtgtaaagcaaggaggctggactcgacaacccttaggatccattccaggtctaatctgtttccgaacctttaatgcgcacctagagtgtaccaaacactgtactatttattggggatatggtggggaacaagaggccaaggaaggggacagtaatcgggtaggcaaattaagaagcaggatagttttaggcagggatcaatgctgtgcaataaaccaggtgctgtaataagagtggctagggggtgatggaagtggagagggatttctaccatagaaggtgatcagggaaggcttctctgagcaggtagtttttgagaaggttacaggtgggggcggagcactccagacaaaggaggagcaagtgcaaacgccctaaggtaggaacaagtctgccctgttggagaagataaagaaaggccatgtggttgggacagaggcaatgaggttggggtgtggtggaagagtgggcagtcttctcagggcttcagccaccaagagaagctcctggtccaggcagggacgtggattcgtgaaccaatctttttttttctctgttgcaatgtggaccccatttctctccagagggaggaggagacataaagccatgagaccctggaaagcatttctgagctggggcacaagcctaggaggcagtgggtagcaaagtgagttgggatggaggaaaattactcttcatttgaggtgtggttctctctctcccactgagaagaaaatgcatggcagaaagaacatctgtcagttttgccccacagtggaaaatgcaaggctgggaaacctgagtcctgggttttcctacggccgttccaggcactgggcagcacgatgccaggaatgttctttcctttttctccagggaaggctaagtgggtgtcagccattcacacctctgtgggaaagactctaccactggcactgtccttccaacacctggataaagtcagggttttcaatgaggggcaggggctgggggaggtgatgtgattctcaaagccagggcctgtgtagggagatatctgggcccgggaccctcacccagacctgctgaggaaggcgtgagtctctcccgctcacagaggggttgggcaaagacttgaacctgagtctgtctaactccaacacagggatttttcctcccctgcccctctgtctcagccagctgcacagtttcactacaaacatcagtcccaggggagagggaggaaggagaggggcagggtggtgaggtctgcgttccttaaataaacggagggcagaattctagccagaagggggcgagggttacccagcccagtggagcatggagccgcccctctagttcccactgccaccgtgatgccatcagatgggagaaaacacagaactcgggatgaaacgtcacacggtctgggctaaagatcttgctctttaatttcccagcaggtaaccttgtggcagtcactaaccctctctacacctcaatgttctcatctgtaaaatggaaatgatgacccctgggtctcccaggaccgtgaggggtcctgaaagggcaggtgtgcgcggtgctttgtagatgataaggcatctcagaaacaccggggctttactgttattttctctccagcttgtttgggcagacaaaagagaaatcgagcccagtcattcttagcacagccaagaagggcagatttcaaaaggagccttgcttcaaactgaggaaaaccaaaaaggaaaaaacaacaaacacagctgcccctaccctccagtccacaaaacagtctgtgtctgacaagctgggctctgccagcggcccacccccagactcctgcaccagctggccttcctgacctgtgtgccctgggagccaggccgactcttcacacttccagtcaccgacacagtgcaatgcaacccattcttgctcaaggcctccttagaaattattcctcccattgctcgaacctgggagttggagattgcagtgagccacgatggtgccactccactctagcctgggtgacacagtgagaccctgcctcaaaaaaaagaaaagaaaagggaggggagggaagggaaaattaaaaaaaaagaaaagagaaaagaaaagaaattactccttccccaggcagggaagccacccagagctgtccacactgcatattagggcttgcacactctagctccccagcctctcccactccctcttcctgtacacgtgcacacacacacacacacacacacacaccccaacacacttctggggaattcagactcacttcctttccttcggtggcctccaggatgatctggtaaaaccttaagcgatgcaatttttttatgattctaatctgccgcagagctgaccctctccctattcccagcaggctgataacccagctcctaagcacctctcttggcagcctccttcagaatggcattcctgggcaaggcctggcagctctggaaggctctcgttgagttggctctgttacccatgagaggaaactctcagctgtcacatgttgattgttcagatgagcagagaagtgggcacagaaagagttgggcacaggactggttaagtgtggatgggggtcaacttggaagaaagcgtagcggggatactgcacaaaggaagccagcccaggtgggatgccatggcatgcttgggggcacacggggaagtggggctccagtcggatggctggaggaggaaaagctgtgggctaggagatagaaggctcggtgagtgctcactgtgtgaccttgggcaggttgtttggcctctctgagactcggttttctcatctcacaggcagttgtgaggatgtcctgagagtacgtctggggaaggcctttgtaaaccctgagagccagaggtccccagggtcagggagaatcggggaggcacctcgggtgaccagaccagcagcaggctctgggcagagggcgggcaggagggggctgcaagctgaacttctcccccaaccccaggaagggtcaccctgtccaacgtgtccgagcggaaagacaacatgcgcctcggccttagtctcgccaccaaccccaaggacaacagcttcctggtaagagccacctgccactgcttggggtcaggagaggcaggggtgggggtggggaggggtggagcgtctccttacacaccctcatgtccatcctgtacacccactctcccccactccaaccaccaagctgcctggccctgtgcattccaggaagcagctcccccgccagctccctgcttatgccattccgggtggcagggccctgggtgttttggcagggacagtccaggcagaagaaacaattgagcccttttgtgtgcatatcccgaaggagggaggaacagccagaaaggggacaagaataaatgtagatagccaacaagtctggtgggggactgtccctttccttggggagctagttgtctgggctggaggtcaaatctctgctctaggcttgaaaaaagaagcaggctgcaccacacacccaaagaagacttggaagggatgccataaatgagtaaacacagactaccacagccgagggaagggctacagagtgacaagccgtctcaactatccaggattagatgaagaaggctggaggaggtttctgttttgtttttaaagaagagacaggccttcgcaaggaagaaaagggcatgtctgggttgaggtggtagaaacattcattcatttaaacaatgatgtttctgagcacttaccatagtatgtgctaagcccagtgctgggcaccgggattcagcaatgaatagagaccctgtcctgctggagcttacactgtggtggaaagagaggcgacaagcaaacgagtaatgtctaataggactttgggggacagacagcagcaggctctgcttacaggtctctgttctgtgcccaggtgagcacatatggactctgcacatggtagtgagtgtgggcggcacaatggattggcactgcctgctccttgccaccaccttggagtgagctgcgttgagtatgggcgatgcttggggttcaaacaggatccttctgagactgatggttcctagaaacagttgcaggagaggacttcagagaaaatttaccccagaaagcccagtacaaattactgcccatttttagatggggtgcttgtgtcagtctttgttctggtctatttctgctgacaaatgagacatctggggcatgaatcacaagacaaattagataagacaaataagacataaagataagacgatgactgggatgcaaggggacttgagtgcatagtggccctgccagggaaagtcatgaggtgccttgatgtatattcagcccacagccctttattagccataaccagaggcaaagcaggacccctggccctatccacacacatatccgtcaggggctttgtctctactcccttttccctctcaggctccttatcacatttcttcttcacaaggtggtatgaaggtctgagaggaatggtgtgatatattctctggggcctctgtgagtaggttaatccttggtttatagatagtcacctgttcattgattcactcatctgtccattcccctctcaacaattcattcctccattcatctatccaaccacccatgcattcatctacccatctgtctatacatcgatccaccatcaatctcccatgtaatcatccatctttccatttattccttcctgcatccatccatcaacctccatcatctatcattcatccacccatcaattcatcatccatccatccatcaaccatccatcatccatctgtcattcatccacttattcatccatcatccattcatccatcatccattcatccatcatccatccacccattcatccatcaaccatctatcatccatccattatcattcatccacccattcatacatggatcatctatccatccatcatccatccactaattcatccatcatctatccagccatcattcattcacccattcattcatcatccattcatccatcatctgtccactatccatcatccatccattatccattcatctatctgtccatccattcacatctatccatcatccttccatccatcttccatccatttatccatccatccattcatcatccatctatacatcattcatccatccatctatacatcattcatccatccatctaccacccacttatccatccatctatcatctgtctatccatccacttatccatccatccatctatccattctttattcccctctgtcccctgccacttccaaacattatgtacagcagcttcaacaaagtacacagataaaacataacctttaagatctgagcttaaaaagaaagtaattaaagaaagggatcggaagtagaataattactcccctaaaccaaaggaaattacagcacaaaatttagctctgggtttcctgatagcaggataacaatggaagcatggagctgagctttcatttttaatgacaatgactctgagaagaacccttcactcagtccttcaatggggactgacatcagtgtttttggtagaacatttcacagaaagaatacagacattcttatcttcccctgccccagtatgagccatggcatgtttttgggacccagtcctagaagtttgcccagtaaggcccttcaggcgacctctcagacagaggagttattctagtgacccttgaagtgttcacacccgtgggtgaaaaggcttccccagatcccgtatggtgggtgggtgagtggggtgggcaggtagggtgaagaagtatcatattcctaaatgatgagatggagaacagggccttgaaaaaacaatgaaagagactccaagatcagtttttctccattagacctgaaaccaaaggaactagtacacattgcagcaagagagagttcagttagacccaaagaagatccctcaccccctcacccctcagatagaagtctgtcttgggtcgtggaggatgggagtgggcctcaggccattggacctcgatcctctctgaggtcccctcactgactggggatctgcactgccctccccaggcctgcagccccctctggtctcatgagtgtgggagctcctactacaccacagggatgtgttcaagagtcaactccaacttcaggttctccaagaccgtggccccagctctccaaagtaagtggcttcaaatctgcaacctcaagctgagcagtggacagtccagagagacttgggccctgagcacaacaacctgtggctagaaagcagtatttggactctagcactgtcctgccccagctctccggatgacctggaatgtatcactccactctctgggcctctgtgggagtcataatcctggcctccctctcccaagtgtgatggtggagagcaaatgagctaaggtttcaaagacaatcccagcctcaagggaggctcactgcagaaaccctgggtatataggaggttacctggcaagcacatgcagcagacaagctgtgcactgcacaattctgggggaattgttcacttagacatatgaatggcgccccctgatgttgtgcaatgcagtagccttgtagatgaaggaacagggagaacagaaatctccttggtagtagttccaccaaatcagtgctcctggacagcagggagttctgtccagctcgtccagagcctcatggaacgtaaaacctcttgctcattgcccacctgcgaagaaaacctggggaattactgctcagaccctgcctcccacaagcccagacttcttggctctgagcctcactatttcctctgcactaaataccatcacccaagcagctgctgcccgttttatggagggttcgggaattggcacctctggcttgcctgcagccgccctccagacaacaaggccgagtcagatggggctggggaagggaggaggaggaagcatcagtccagcaggggcagaaaggtcgtctttctgggggataatgagacatggattctattcacacaaaatgacagaggaaatggcagagccagggcacaggaggaggcctgaggtcagggtacgtgaggggcccaccggggaatgtcaccacccctagagctagtccctccaggcctagatgtgaccatcctatggtccctgaacctcatgtggtggaggcctcctcacctggctgaccagcagcattgctctgaagcttaccaaatgcagattccagggcaccccatgtgggtcctaattcagtaggagtatgtgcaagtgtgtgtgtgtgcatgcgtgcgtgtgagtgtgtgtgtttttaagctccccaagggagtgttcagccatgtttaggaaccgtagccctcaaaccagtttgttcccaaggtatcttagaaagaaaaatgtgaaattgtaagaaagaaatcaacaataataaatgcattataataataaagctggcttaaaaataaaaataaaaataacctgttaaaagattatgaactcctccaaatcaaggaatttctgtcttggtcacccccactgctgcctgcaccatgcagagctccagcacatagcaggtgctcagtccacatgtgtggagccgaactaaaccagaaaaggacaaatgtatgaggctctgccaggccaggagtgtcaggtcatcacatgctgtacacagtatgcaggtgggacaagaagtggcggagcactcaagttgcccaaatgcttctaaaatgctctactaaacacaaagcctgcaacaggcgtcccaactcaaagccacccccaccttcctctgtctgctcagcactgacttcaacatagtgcctcttcgaaatgcaagaattactggaacagttaacacacaaaaggttcatgcagcattgttataaagtagattttataacagcataaaaagtcaccaataaaaatgagcaatgcccagacgcagagtgtatgcattatttcaaagtaactccaactgttgacaaacagaaataaattacttagattttaaaagaggagggtttttttaatatttgttatggccaatattttcttaattttctttgttgattttcattattccttttaatttagttttttttttatttgtttgttttgttttgtttgtttttgaggcagagtctcactctgtcacccaggctggagtgtagtggcccgatcttggctcactgcaacctctgcctcctgggttcaagcaattctcatgcttcagcctcccgagtagctgggattacaggtgtgcatcacgactcctggctaatttttgtatttttagtagagacggggtttcgccatgttggcaaggctggtctcgaactcctgatctcaggtgatctacccacttcggactcccaaagtgctgggattatgggtgtgagccatgactcccagcctaatttagtattaatattacaaaagcataaagaaacctttatattcagaggcagagataatggcacgagagcttgacctgatgatatcagtaccatattaactcagtggtttccttaaaaaataaataaataaataaaaagtgaaaccatgatcagttcagatttattgagcatttgctttgtgctcagccctttagaagcatcttctcattaattactctaggcaactctttactattgttgtgcctcttttacagaagagaaaactgaggctgagaggttttgtgactgaccctaggtcacatagctagggagtgccaaagccaggagtcagtgtgatgccacatcccacatttctagccacgacatcatatctccctcctaaaaacagaaatccattcatttgggctgaaagtggtaaatgccagcctgctcattacagcaaaacaaacaataccaaggtactgatttgagcagtgctggctgcctcggaagcgttggccgattggtagtggtcagtctctgattaggaatagaagtgatcaggcttaatttaagctttgttcaaacagccagcagagtggtagaacacagccaggaattcctgggctcactcacattgcccaaataaatgtccaacccaaggacagtttcccagcccagggaattacacatatggagcagagtcattcatttgtcctttgaacaattgtccagagaatcagagactcgcagacactgctccttgggtagccataactgtgtccccactttccagggtgccagacctacatggacatcgtcattgtcctggatggctccaacagcatctacccctgggtggaggttcagcacttcctcatcaacatcctgaaaaagttttacattggcccagggcagatccaggtgagcatctcttgggctctttccacttctgaacagggccacccaaacccatggcaggtgctgccttaggtctaagagagatctttgcatgcacgaaggaggtgtaggtaagagggcagaggtagtagggccagccagcactggggcactgcagctcaggacactcctctctggtgtagcacatcaaatgacattttgggggaagcctcacttcacgggtcagacacaagacaccacctgtgaagacttagacaagctaaaaagtgacaaggaaggtgggaatggttgagtggaatctagagccctgtcgagtggggcacaggggagaattagacatacaggtcatggagggaagatggtaggagaggtaagggctgctaggctcatatatctgaaacgctgcctggctaacgcggaggtagattcattcccttttattctgcctgagtgaggactaatgactagaagttattagatggcagatttcaagtcaatctaagaaattatttgtaacgattagggctgttaaaaagggagtggactttctcatgaagtaatgagttccccatcaccagaagatcatcttttagggtatcatgggtgaaagtccagcattagaagggcacgtgtgccaaataaaccctgtgggctcctccaacaggaacgtttcatggttctattcctactataggtcttgaagctttttgtttattttgatgctattaatattgtcattattttatcatccatggggataaaagaacctcttacaagttttaaggaacctcagttttggagtttggtaaacactgtgaccttccacccacactattcataattttttggacttagactgattctctgctctgcttttgttttcctaagaaagaagcataattgttgggcctttctttcaatcacgaagtctccattctctatatgcaccccttcttgtgccaccaagctgtccattcattcctagaactttgcagaactcacttccctttggctgtggttactttcttggaaaggtcctcagccctcctccctcctgtattatcacacagagacaactcccggggatcctcactctcaaattctaaggttcatgggttcatggggtcaaaatgttctgttgccctctcctctcccttgcaggttggagttgtgcagtatggcgaagatgtggtgcatgagtttcacctcaacgactacaggtctgtaaaagatgtggtggaagctgccagccacattgagcagagaggaggaacagagacccggacggcatttggcattgaatttgcacggtaaaaaaaaagtagaacaaaaaaaatttttttagatctcagatgctattgtagttatctattgccttgtaacacactaccacaaaatttagtaccttgagacaataatttcttaattcctcaaaattctggagtttgactgggctcagctggtcggttttctcttgggtcctctcaggtagttgcagtctggtgtcaccttgggctgttgtcatctgaaggttctcacgtggctgtcagttgttgttggctgttggctgagagctcaggtgggactggtgacctgagcacccacacgtagccatgtggcttgatttccttgtggcatggcaacaggagttttagagacagcgtcccaagagtgagcatcccaagaggcccaggcaggacctgggagactgcctataacctagtctcgaagtcccagaatatgacttctgccacattctattggttgggcaagtgactgagcccaggccagattcaaggggaagggaatttggttctgcccttgatggatgaacagcgaggtcattttgcagaagagcatttagaatggggaatattgttgcagccaactttgaaaaatagcttctgccacagacactctataagaagtaggttctgtgaggatggggtcttcttatggagtgttagtcatcaatggagtggaaagaatgcagtcaaatctgacacctgagactgtatagtagtgaggctgattccttaaaaatcacaccagaactcggccaggagtggtggctctcacctgtaatcctagcactttgggaggccaaggtgggcagattgcctgagctcaggagttcgagaccagcctgggcaacacggtgaaaccccgtctctactaaaatacaaaaaaaaaacaaattagccgggcatggcggcatgcgcttgtagtcccagctacttgggaggctgaggcaggagaattgcttgaatccaggatgcagaggttgcaatgagccaagatggtgccactgcactccagcctggtgaacagagcaagactccgtctcaaaaaaataaaataaaataaaatcacaccagaactcactcatccagataaatgttatccctagatgttgtctatgcagaaggctacatgcttattccagtaatgttgttgctcaaaacattgtgctcaccccccactgaaattagccagttttaaaggcaatccccagatctcttgagccgaggcctaaactcataagatgactgtgtcaaaggcatttagattttaaatgtctaagtgttacacctataaatatgaattctgctgcatttgttgagaccacagacctggtaccttataatcccaccttaggtagggttagttgacgtgttttttaaaaaaaaaatccacaaagtaagagctatttaggccaggtgcggtggctcagacctgtaatcccagcagtttgggaggctgaggtgggaggattgcttgagcccataagtttgagaccagcctgggcagaagcatgagacctcatctctacaaaaaatacaaaaattagccaggcatggtggtacatgcttgtagtcccaactattcaggaggatgaggtgggaggatcacttgagcccaggaggcagaggctgcggtgagccaagatcacaccactgcactccacctaggcaacagagccagaccctgtctcaaaaaaaaaagaaaaaaagaaaaaaagaactatttagtagtattgtgaattcgtaggctcaaaagattaagacttttccaacctcataactctttataattaagtcattgctcaactagcgtgtttctgtttgctgataaaacttgctcaagcttttcctaaatgagcatttctccatgtgaaggtggctgtcttactcatcctcataaggaatgggccatttttctgtttttgttttgccttcttcggggtgagacccgagactcccagcaggcccttgtgaaatggcttgggtaagggaggcagcccataaccaccagctctcactttctcagtgtgaagctaactgactcatacagggataaagcccactgtttggacctcactttacaacccaccaacccctgctcagttatccgtgtgtgactcaccaggtagtttgaaccatcagtgactcatgagcaccgctgaggttgcaatcttcacctcaaattctgatcttcccaaacttccaaattcaagtcccaaactacagctggtgccttttaaggtgaaaggttttctgtcctcactcagtttattcttaatgcatgttttttcctatgcacctatgaaagggcaaagatccaggccatgaacatgagggcttataaagatgtcggtaatctgtgggtcctggccactgatgggagggctgtgacaagtgttcaccctaaccctaactcggtgaggatgagagagggaggggcccccatggagtggccaaggagaactgccaggaggaggcggcactggacctgtcctgggaagaccctgggattccaacaaaaagaggtgaacagaagacgtgccacacaagacattccaccctgagaacagcagaggagagggaaagtcaaggaacatttgcattcagagatgtgctccttttgaccacagcaaggggttcatgttggtgggaagtgagccatgtaaagatggtgggagtgatgatgttgtagttaaaaccagcatgggtggccactgcagattcttgagtacaggagtgtaatcatcagatatgcacgttaaaaaaaatgagcctggcagctatgtacagcagggaagtggagagggcccctgaacaatgtggtgtgattctacctttgtccacataacactttattgagcctctactatgtgcctcacactattttaggcaccaaggctagatcagtgaacaaaataggtacaaataccgtgccatcgtgagctgacattctagagagaggggcagacaataaataaataaataaataacagcatactagaaagagatgaaagctatggggagaatggagtgtggtagcgggagtggagcaggtgcagagggcaggtacagaatcagcatgcacagggtggtggggaaaggcttccctgacggatgacctttgattggagatttgaaaggaggtgagggagttgttggcaagcagatggctgggagggaacagctcagagaaaggcttggtgtgcctgaggccttccagaccattgaagagtccagtgtgggtgggggtgagtgagcaggaccagaggctaagagaggaaacgggccagatttcagagggcctagtgagctgttgtcagaatctgggctttccctgagagaaataggaacctgtgcaggttttgagcagaaaggagctgtgacggggcctaaatctccatgggccactctggtttctaggcccatggagcctgttatgagtataaagctcttgctgctctcaaggaatgtataatctaatttacaaaggaacaaatccaagtccctttacccagtgcagaatccgaatttaaaatctgatgattcatgctgatattcgcacgattacagattcatatgacattcacactattccactctatggaaatatgatcctgacatttttcttgggtccatatataataaaacctgttttgctcctgccatgcttttttgcagggtgttttattcctgggcctggcccttccatgcagtcatggaagcatctagaatccccttggaaagaatagcagagttctcctgctactgggttgcgcttgagctcgaaacctgctctcgtcatgtggcacgtgcctctgcaggtttcagtccacagcacatactaaaattagtgggttttttaaggcaacatatccagcatatcggagaattgctaagagaatggtggatgttttttctctttgctggtagtttgaagatgttctaaactaatgtattccagcttttgtaaattcctcaactcctaaattgtatgcatcagttcctcagcgtgctgcgtaagaagagatacctctgataccaaagccgtgtggctctttaacctgtcactacagagcttaaatctgtggcctgtcctgccttgctgtgggtcagacccatgaggaataacctcagagtctaagactaacatttatttttagatccttattggcagactataacttctgggccagactcctcggtgagaccatgtctatacccctcagaacctcatggtctaaaggagggccggccacagggacaccaaaagccagtggtgatttgggagccagtttttcatgctttgtagcccaatggcctgttacaagagcctctctgccaattgacggtcgaggtgccagccctgctgtctcctgggctggattgcctgataggtgggctgagctcatgctctgggcactgaaaacaaaataaaaagtgagaaagagaaatatttgtcatggaatttgatatttaatgtttcccaaaatagaatcaaagtagtccttgtgaggaagtcagagctctgtcaggcctcatcgcacgcattttatgggttagtgttgtctggatgctgagtcaccctggcacatcctgttttcagtactaaagaaagtgagtctcaactctggatgctcaccagaaccttataaaatactgatgccagcccggcacggtggctcacagctgtaatcccagcactttgggaggcagaggcgggcagatcacttgaggccaggagttcgagaccagactggccaacatggcaaaaccccgtctctattaaaaatacaaaaattaaccaagcgtggtggcagagctctctaatcccagctacttaggagactgaggcacgagaatcgcttgaacccgggaggaagaggttgcagtgagctgagattgtgccaccgcactccagcctgggcaacagagggagactctgtctcaattaaaaaaaaaaaaaaaactaatatccaggccaccaccccagagattccaatttcaggggtctggctgaggcctggacatcaatggtgtttgtttgtttgtttgtttggttgtttgtttgtttgttttgagacagtctcactctgtcgcccaggctggagtgcaatggtgcgatcttggctcactgcaacctccgcctcccgggttcaagcaattctcctgcctcagcctcccgagtagttgggattacaggcgcatgccaacacacccggctaatttttgtatttttagtagaggcagggtttcgacatgttagtcaggctagtctcgaactcccaacctcagttgatctgcccgccttcggctcccacagtgctaggactacaggcgtgagccaccgtgccaggccaacagtttttaaagcctccctccgagagatgtcagtgagcagctggggttgtgaaccactgacttaatgcctctaaaggttgccacttgcccctgaactcccctcccaggtccacctcatccctttggcctgtccaaaacagcaaggtcaggactccaaaggggcttttcaacatttcatttaaaaacaacagatctaagaaccctctgagcagctggtgaaagagtagctctggccatctcaatccagctacttctttggtttgaggtcctggcacctgttgggttgcccaaggaggacttggtcctggtttctgtggctgcccctctgcaggagcgtcaggggctgccccaatcccacttacctttcatgaccctgcccctgtgcttggcttccagctcagaggctttccagaagggtggaaggaaaggagccaagaaggtgatgattgtcatcacagatggggagtcccacgacagcccagacctggagaaggtgatccagcaaagcgaaagagacaacgtaacaagatatgcggtggccgtaagtcctggcccgcccaagggctgctgatggcctctgagaggctttaccatcaaatccctggggactccaagggactagttccaggcagtatcacaagtgtccaggccctcaaaaaagcctcccatttcatcttctgaacaacaagttgaggatctttctgcactgctctggcctatccacaaaagctacgggttgtgtttccccccatccattgccagggagggtctggaacctcagaaaactagaatacacctccaaacctcccagctcccagaccctaacttagcacaagggctttatcttgcccctaaaagagagtccattccaaatgcaaatggcattgcgaggaactctcatggctaccggccctggctccagcccaccctggggtccccagggtctaggccgtgtggtgtatgggaaagtctgtgctatgttctggtttgtggttcctgcccctgttccctggcaggtcctgggctactacaaccgcagggggatcaatccagaaacttttctaaatgaaatcaaatacatcgccagtgaccctgatgacaagcacttcttcaatgtcactgatgaggctgccttgaaggacattgtcgatgccctgggggacagaatcttcagcctggaaggtaagcaatgcatgctaagaggggatccactctctcctgggcttatgtcaggtaaaccccgtagagcacaaaccaatcccacaaaacgaaatggcttaacaagagtcttccgtaataataaatgccaggccaggcatggtgactcacgcctgtaaccccagcactttgggaggccaaggtgagcgaattgcttcagttcaggagttcaagaccagtttggtcagcaaggcaaaacctcgtctctttaaaaaaaaaattacaaaaattagctaggtgtggtggtacatgcctgtagtcctagctacttaggaagctgaggtgggaggatcgcttgagcctgggaggttgaggttgcagtgagctgatatcatgccactgcactccagccggggcaacagagccagaccctgtccccaaaaataaataaatcataaatgccaacaattgagtattactccgtgccggacgtgaggctgtgcgttttatgaacaatgctgaaaggttgctttgctaatgttctcatttttatcgctgggaaaactgaaactcaacggagttgagtgacctgccaaagttctcacagcttgggagcatggtgggctttgaactagggttgccaaatttcgcaaaaataagatacagtgggtgtggcaggcttaggttaaaacttatttgttctctgaaattcagttttaattgggcatcctatattgcatcaggcaaccctagcttgtgcctagcagagtctgactccgtattctgaaacccttaatccctatatgccaactgcttccactccaccaaaagcattttttattttgggcagagtccttcagattgcctctctccttgtgatttaagctccatttctgatttgcataaatttcatttccaccataaattgctacagtgggcccttccaatatcgggctttgggcatatgggaggattataaaaggaaatagaaggcagtataaagcctgagaagtctgcagtgcattggaaatgacaagccacagacacacgaagagactaaaatggccctcgtaaacaagggcagatgaatataaagtctgaacgtgagctttgacacccactccagaactcaaatatccaaatctgtatttctcctcaaaatggtcgccttgagtgatgagaacattcgatccaatgatgtgttcagggagtccctctgtggggagaggctttcagcactcatgggatttcttacgcaaatctgcagtggtgacagacctccctctgagggtggatttgatgtttgagttccatccaaagacatctggaaccaaagctagtgaataaaaggaatgaacaaagtgggaaattccatttctggccaaaaacgtacactatttctgtgcacttttgcttactttccctccagttttagcagtctcatagtatacatgccctgtaatataagttgtcccgagcccttttcagaagtaagtgggctaccagtaacaacccacatgggcacctggaaggtgtgtggtgccccccactgcacagggtgctggggagggctgaggaggctggcacactactggcctcagcttcagagccccccctcgaaagagagccccacctcctgacgatgcccccaggaagcaggagctgtgggttgggcagcagatctgtctggcgctaagggattgggcatggagctgacatctctctgtcactctgttgcaggcaccaacaagaacgagacctcctttgggctggagatgtcacagacgggcttttcctcgcacgtggtggaggtatgtggtggaggtacgggcacagagcccagcctctgtctctcgagggcatgctcttcccctttctagctctctggatctgtcatccaccttcacagatgggttggctcttctcctcactttctctctttcttggggtctctctgcctcccatcttctgtgggctggaagaggggagtcgaggtcttccacctatttatgttgtcttaagccaccagacaatgagtaaacacccaggtgatccttcccacaaataacgtacaatctgtaggacagcagagaaatagccacagttcatttgctctttagaagcgaatggactacagacaataatcccataatttcacctgtgaggcgcggggtgtgccttcccattcagtccacagagccttgtgcaaaatctagggcaggtggcaaagccaatggcacgtgctttggatagctccagtgcccaaggcggcctgcacatgccaggccccatgtcaatgttgggagggtatccagatgttccagctgtgctctggcaggtgactcataggccccccccactgtgtgggtgctgcatcagattgcagaggtcctggggtggggctggcccacagagggaggggtgtggtgtcacaagcaacatgtgacatctggggctctgcatcactcccccgctgtgtgcttcacctggtgctggttcataaggaggggctggagcctcccaggactgcaagggggacagaagagtcgatgtctgtgaatatgcttaatgtactgtaaagtcctgcccaggattgtcatgtgggaaaacgtaccgactgcatctgtcagtatcgatacgtgctcctgtgggtgtgctttgcacagacaggtgtcccaggtgcatgtgtgtgcaagtgtgtgtgtgtgtgtgtgtgtgtatgtgtgttctgcctgggctggcaccatgagagtgtacttattcctcctaatttaccagagaaggcccattagtgcatcctagttatatgtcactgtcatcctgttgccctctcctaactcctctgtgaggtggatagggcaggactccttgttcctagtttacacataaagaattcaaggcatgagaaggttaagtgacctgctggagtaaaattcttcagaaaaaatattagtctcgtgctctttcctctacaccaagcagctgctccgtgagagggaatctccgggggtctgagtcagaacttccaaactggaggggagggggacatgtgcgtgacatgcagccggcagatggacggaaatgccactcacactcagacttttctgagctgcatctggacagtttcatgcccactgtcttgaataacagcaagatgtaaatatagctgccctatcctaataacagccctgttacatgtgcacagcggtttaaacttctccaggaaattcctgcacctcatttcacaccagaacagccctacaaggttggcaggtgatgatagttatcccattttaggtggttggatcagccactcttttcagtgccttctctgtgctgggtcctgagcctgatgccaggagaatcagaggcgggagccctgccctcaaggagctcagagtctgagggtaaagagcccagcacagcgaggtgagagcatccattcatgtgggggccagcagagtcatgtgctctggcaggaccagccctggtctccagactctgacgtcagagctgattagaaaacgcaacaaggaaatgcaatttaattaaatctacatgcatttgtcaagtgccactaaagtgctgaaaggacccggaaatgattcttgccaccaggagtcaacttgtaaacaatcctgaacggcagttcttagctttgagagtaggatgaaagaaactatagatgccttctaggtaaaagtgtacaatacctggaggcccccctcatccgaagatcccctgtgaagaccccctgctcaatgcaggggatagggggagacatgcacatgtctaatgttaaccaaagcaacgtgatcaaggtagtatagaaggaagggcctccactaaaagaaggggtggtcagggaaagatccggagagggcttggcactcgagctgcccctaaaggacacggatttcagcagtcctgggtggcagtaagcaggagaacagagagcattatggacacacactgggtgacatcctggcacagctcagaggtcagccctggtgttggggacagaagagaaaatgaatgtcccaatgtttcctttgtccattcacagccattttttgagtatcttcatgtgtgtcagactctgtaccaggtacattaaagaaacatttcagctgacagccattcatagcctagctggggagaaagactcttaaataatcagctcactgtcctgcttctaaaatcatgatctgtgtctgcctaggaatcggggaatctaaaaagaggaggacattaaaatgggcttcagggactcagggaagcttgagctgagccttgaaaatggctccagcagttcagtgttgagcaaggtgagtccttgcaggatcaacaggttccccagcttccagagtgaggagacccaggagctcacagcctcagcacaagacttcggtcacgtcaaggtcatgactgccatgtgcagccccttccacatatgctcaacttctctgttccccaggcagagggatgcagcttgcctctcccatataccctagttcttccatcaccccgacacagggacctagcttgactcttcctcataccctagttcttccatcacccctgatattttcatctaatttgactttaagagagacaacgatcgcatttgaatctgagactctttagtattaaaaacaaaaacaaaaacaaaaacctttcaaatgcacaggaatggtgcaagcatgatgggctggctggctctgtgaccgggcactgggggctattttagagcacagacgtctttcagtgccaggccgctgatgccatcatgaatggccacagccatcctgtccccaggagtccaactcctcagctctcagggtcagttaggcctctctggggatcagggctattgggtccagcctttccactttgccctgagcatgtctgtctcccaggcaagcccccaggcttcctccctgccagaagcgccacagatggtctcaaacagctgctgcctgaagagatactgaaggagcctgaggggcttccccgggcctgtttagttctggtagaaggagagatccctagtagaatgttctcagatggcagaagaaaggcccggctcctccttgcttggtttgctgccgtcttaatgagcaaggaaatcagtctttgaattagcaagggtaaaaacaacaggagagagaagggaccagagcccagggtacaggggagaccccaagacatcacctggacacccacagagtccagggccccaaaacattacattccaggctgaaggcaaaacgtctgagccattgggaaaacccgggtagctggaaaccctagtcttgatttgcagaaaggggaaagaaaatattccaaaaattatcatcaggaaggctagctgtggatccctggtcagactttagaatacatttttaagctaatgcttccattagcatttggaaatgaacgcaaaggtcactaagagccagagtggcttccattagtgctggctgtctgctgaggtagtgaactacctgtcaagctgggtaatcaagcaggagctgcaacaatctgccagaaagttgggagaagggattcacacctccagagggggactagactctaagactctgtaatcccatgggccttgaggggaagatgcagagggagaaagaggactacaaagaattgatgggcatgggtgacggtgtgcagagggctcagctggagggatttcgcatccgccttcctacactggaatcctaaatctgccctaactccaaaagtttacagaaggaagcagttttatcagggtagatcttgtctacgcagaaaccttggtgactcacccaaggtgggaagagatcctttttctcttgtacctaaaggtgaggtcacttaccctgcacgtgatgacctaacaggaccagtgctcagttctgttatgaagcaggtcaagttcagctgagccctgtgtgggagggtcctctgcagcaccatcacccatgcgcatcaattatttgtagtcctctttctccctccgcttcttcccctcaaggcccatgggattaccgagtcttcgagtctagtccccctctggaggtataaacatcccagatgagctaccccagccaccctcctgcctcttcagcctgtgcccatcccacaggccctcctgggattgaggtctagacaatgaagggtattggctattcgctaaggttcttagtggctgaagctttagaggtgtaatcttccctaagggtttcgcatttgaactggttttgcgtatctgattcaacaaaaaatgagagaagctgatggataatggtgaattgaggagttgacctgtggaagctgtaaacccctcctgtgcccccctagacctaaacaatagactccttcacctgccaggctgggcgggcagtcaagatggtctcctggccctctccccaggggtccaggacacagcagctgaggtcctctgccacgctggtcccaagggtttgcgagttgtctcctggtggcaggaatcatttctggttcattcgggtcctcctaagcctggccccatatcctcaggctgtgccctagtgcccactcctgggtctctttcccagggcctctgacaggaggcaaccaactctgatggggaatgagcagtcagtgtagcacgcccaggtccccgcggccccttctgctcaccccagctgccggattccagcaccgcacatggtgagggcccctcctccacagaaaggcagaggggctgtttctgggcctttcctgcccacaccccatttaagcctcctggccattcatcccttcctcaggtccacttcaagcttgttgaaacaagccttctaagactccaagccattagtgaaaaagcataatccaccctctaaatggtgtatgtgccttagaaggggctcctgggaacagagcctcacccctctacagccactctgacgtggactctcgggagtttggcgggggaggacagcctcggtgtcctctaggggtctcccatcacaccagcccacagcaccaccagcgactacctccacctggctccatcgtcttgcctcacaaaagccaaaaagagctagaaggaagaattactggcacctggtatcctaattccgtgactactgggcaagagggaagcactgtctggcatgtgggctcagaaaaatcatttgacctgtctgagcttgtcttagtagatgtctgaagaatatttgtgaaatcgaatcaaggcttggaactggaagtgttcgttttgagacttactaataaatcaagtaagattttcttaaaagcctttcctaaccctactatgtactcaccccctcttctcagttgttcacctgctcctgggactgccaaaataaccggtccctgactccatcagagcacttctcacatgctaccgcaatgacgaacgtgactgtgacacctgattcttcgactcccgaccactggggagatgcttacagatggattcatgaacgagaagagctaccatgtaccaagtactcactggctgccaagtgccctgctaagaattaaaaatgctgattttcacaacagaactattttacagctgaggaactcaaggttcagagagagagagagagagagagagagagagagagagagagagaagaacttgcccagggtcacacagctagaagctctgagctggaagtggaactcagaagcctctgactccagaactccttcctgctctcaccaccacgccagggatcctccacctctgtcctagtgacatcttgggctggataactctgccgtaagggaccatctggtgcattgtaggatggttagcagcatctctggcctcgactcactagacaccagtagcacccccaccactacccccagctgtaacaagcaaatatcacctagggcacaaacctgccccggctgagcagcactgccctagaccatgctgccttcactgccggggctgtggtccaaccctggcttgggacatggactggccggaacacagggctttgagagatatggtcacacaccctgggagcacgcagctcagctgggaaggcaagactgcctcagaggccaggtcagagggcagctgagagctgagttggcagggtctggtggagggagctacacacactgcaggtgctagggctacaacgtcctttgggaaggcacagcgtggcctcagaccttctgacagctgccaagcctgagacctcatgtctacacagaacgccaggaaaatcagcttgtggggaaggtcccctcgtgcaaggccacccaggcacaccctggtaatatctggtgggagcccaggtggccccacataggaaaggaggctataaaacaggaagccagtgcgaggcctgcagagcgggggacacagctcttcccgggaatgcccactgtttgtttgccagctgggcccacgtgcctgacttcccctattaaggatttggtcccttctctttttttgccccacccttctagatttttctaaactcaaaatgtctgggcttccccagctgggaagagattgtgacatactaaggcttgcttcagtggccttaacctgtctactcctcacagtgtccccatcctcagaagactctccctggccacaacaaattcactctcaggaaagggcctcccactgcaggcccaagactgcagctgctgtcagggttaaaatgggatgaggtgggagactgtaagcgatcgcctggccaagtgttgccaaatccagaagtcatgacggaattccccaagctcccatagggagaatcagtgtgaggggtctccccggctgaatcccacgcccctgggccaagccagcccttctcagtacatcacaggggctccctgtcatctgcagagccagaaattcatcttcaaaggcctgtccatgaagcacagaagccaggtctgcagttacaaacttggactcaacaggcagagagagggaggaaagcaaggaagaaagtcagaccccaaatactgcgcccctccctcaggagggttcaggtggaaaatggaaagctggacccacagcaggctttggggaaacagatagatgttttcttctctgccctacttacctctctggtcaaagccccagccctgcctctgacttgctgtgtgaccttgggcaagtcccttccccctctgaacctcaacggctcatttgtcaagtgcaaataatgaacatctgtccttctgatttcacagggcctctgggcccaaatgggcagccagatgagaaagtactccacaaagaatagagcacaccccacgtgcaggaatgttggtggtgactttgtggacagcgaatatatgagttcctggctcctgtcgtggcccgaacaaactgtcagagcctcctaggctgaggctcgagcacagagtagcaggaagaaggctaattagaaagtacaacgtgaaacataaccaagcacattgactctcccaagaccagcttatttatagctgtaaaaacattctgtctgaacagtcagttctacctctggagggttaggatttgttaaccctttgataagatcagcttgactctgtaaagcggtgggaatctcaagctcacccaggcagccaggcagccgggctcagggaaggctccgtgggagagagtggtgatttaccagcctgtgttttgaaagcccaaagctgggatccagacagtctgcccccacccctgtaatcaccaaggtaacccagaaggcagcccttccctgtttccaccaccttccttgggcccgtcatcgtccctggtcattttccttcctcttccaagtgctggctgtttgtctgcctgtacccagtaggtatgtcgattgctgaagcaggggatcggggatacaggagagagagggtgagtggacccagtcttcaagaaagggccatggggtcagtaacctggaaactttccctcaaggagccagagtttcctgtcttcctgcccaagcattgcagcttccccttgtcctgcaactggtgggtagaacaagaccttccaagccctgagaaacaagcagaagcaccagtgccttgggtgctggctgtcatggaggtggccctggcttatctgtccagcctcatgtcaaggctctctgcccctcttgcttggtgctccagccccatcaaacagcgttcagttccttatgaacaaaggttccgtgctctctccagcctcagagcctttgcacaaactgttcctggcccttttctccagctcttctttctctctggctctacccatctttcaggtacacgggtaaacatgacatcctcgaagacttttcctgacccccatctcaatctagattcagcctcactgtggttttccctgattgcgttgatcacagtttgcaactgcatgtttgttgagtattttttttttttttgtatcttcaagctctgttgctggtggttgggggcggggatacgggggacaatatccctggcaccaaacaaatgcctggcacaaaggagacctcagtgaatgtttgctgaagaaaccaaggagtaggatttacgtgcagggaagcaactcagacactgcaaagaaatattaaagaagggcaagtgcaaggggccctttccctccttcaatacatgtcagaaggagtggacagtggcgagacggtccctaaagggttttgaagcccaaggagggatggaggtttggccctggatttagagtttgtttctagaacattcctttttccctaaattcctgtccttgggatcaatttgacccattttgtgccaaggatggaatggggcaagaaagtctccttggcttattcaaaagccaagagccccagccagaagttaggttgctaaataatgcacccaggagaaggtgcccgaggtggctggtggaggcgtcactggtcataggacctgatgtggctcctggcaactggcccatgaggacaggtgctgatgtgtgtcccctccccaatgccaggatggggttctgctgggagccgtcggtgcctatgactggaatggagctgtgctaaaggagacgagtgccgggaaggtcattcctctccgcgagtcctacctgaaagagttccccgaggagctcaagaaccatggtgcatacctgggtaagagcgcagagtgaggggaggctggcgggtcgtgggccgggagggcacccaggggctgcacaacccccagcccacacacgagtgaggggcctgctgtgtatattctgggctgattcaagcacccaactctgaagagcatccccgggggcatttcctctccaccctggtatccaccgcgcccagcaccatgcccagcgtataacaggctctccataaataggtagaataaaggacaagcagttccccactcccttcaatgtgtttcatttggtgcttctagactctgggtcagctgttgttgtgccttaaagcttttggggctgcctagggctccagtacactgagcctgcctcccaaaggcaaaacgcaagtcgagtggaacctgcattcatttttatttcttaatgttcataatcaaggcagaagtcgctgcccatgaagcactttggaagtggatatctagatagaagcacaaatcattgatggtgaaggtcccagcagcgaggccttagcctgctggccaaagtcaccttccagctctgcaggagcagtcacctggccatccccaggcatgtcccattcgccatggcttgttcctttctaaaggaagggccagaggggagggcggcaaggggggtgatgttcagggtccccactgtctctgggtctttcagaatttctgaaccaaatccactgtctgtgaagttactcctcattgaggcctcctcggaccccactcctccatggacttggggccacccagagtggacagcgaatctgtccatgcgtccatctttctgatgcttcatcccatcccaacctttgttcctcagctcgttagccaataccctgcctatgactctgcccaccctgtggttaccctgttttctatccccaaccatgggaccctcagctgacaaaagggcaaaatgctggaatcaggactgtgctagaaaattcagaaatgtagatccctagaagtttcccaacagcacctggccctagggcctgcgttccatttaattcgcaaggtgttaaacctgaattgcatagcacctgcagttgatgccatcagagtgccatgttaagtgccgtggtaagcaggacacagcgcctgccctcaagctgcttctgggccagtgggagacacagacatgtgcgcagataattataacacaattgaggtaggagctcagataaaagcacaaataaaggagagaaagattggagtccttgccttggcaaatgctcaaacactgggaaagatgctggaagaacaaaggctagcaaccctttaactagaaactagaatgactcgtgttttattgtgtttcctcccaagtgtacagccctgtgctggaagtgaggaaaccaaagaaggggtgcaaggtgcaggtgcctcgaggcattaaacagcaaggcagatcacatcagggtgtcccagggcccatgaggttaattccaagtgagtcagagaaacgatgtggttggccatggtccagcgagctggtacactcgggacctactgtgtaggagctggagcctacaccaggtctccaccgcaggggccatttcaaataagccaagaagggccaagaaaaggaggaacatgtgggaaataccaggttatttcaggacccaagaagtagatgagtgtggctggagcagggggcagaagtgggaacatggaggagagggaaggttgggatagactgtagcaggaggcctcgaatgccagattaagacgtttgagctttttcatgttggcaacagggagctgaacatatctgagtgagagctcagcaggatgaatatccccctggcccagcaaagccaccctgcttcccctcccagaagaccctgatagggtagagcttggctgatggacactcatgaggcccagctgtcatgccttagccacagtcactgccttgggtgggggtcttgagggagtgccttttctcctcctcctcctccgtctaggagtcatccagtgagagcagtgtctgggttctctgctggggcagagatgcctgctggaagattcctcctgtgtttcaagggagaggagccctacaggggaaggagaccaggaggccagctcccagcctccactgggggtgcagtataaatttcgggccatggtcctaccctttcatcaggccttcagggaggctggcccagcctcagaatggcccttcctgctggccagagagttgcctgggtaccaaaggtgctgcccacagacagctggaaggcaggaagctctgtgaactttgaatgctgacccatgcctgcccagaggacacttggacctcaaactgcatctcagtgcccctccttccaagcaggcccagaagcccaagaccaactgagaacatttacagtagtgccactgagggctcagctcagaagaaacctttgccctacaccacaaggctaagcccacccacccatatatttatgattgctctaaatacatggccatgttagccaccccttgtgaggtcttggtattatggacctgtcaagcctcatttcccaaagtacagcctcaagagtgaaaactgttgtgtctggaaccagagcagttcacccccaggcactgagtcagctcatctgtacaccctatagccactctagaagcagccaatgagacccaagtgacagtgttacacacacagatacgcagatgcacacgcatatatgtgcacacacacactcacacacgtgcattgcaggggacatctgttccccagaaacagcccaggaactgtcaacaaagtccaacactcatctaaaatctgggatccaagattatctggcagaaagtggaattctaggatgccatcggctttccacacctgctggagcccactttcaggagagttgcctgaagttgctgcacatttgcttcctgggtactgggtgggcgacttgagattcacagtgatcaggcacagccataccgggagcggggattggcagcctttccaaaagagcccctggggttccttttctttctctttggcatgctgtatgtatggggctgacaagagcctaggagcttccacctttgagtctgcaaagctttggggctgcaagaatccctgagaccccatgtaaatatctgaagcagaccaactccttccacatttacggctcacactctagtcctcagtgagccacttagcaggcgtttgtggtaataaagagaaccctggttagtctccaagagtgaagattggtggggaaccaaaacaaagtctccccagtattaactgaagtgaggctagagtctgccctactccccattgccctctgctgtgctcatgagcaggtgaaggagggatgtgtgcatttcaagttagtcttttagcagtcccacctggcttcctttattttctccagcaggggctggggtgcagtgagttctccctaccctccaaacccccttcctgggtcctgcctcttccaggcctccccagctgcccctaggaattatggccctgcgtgattgaatctgctcagctagccctgaacctaccccatcactggcccatcctctggcactgccaagccatgcaccgggccaagcaacgcctgctgaggacacggtgccaaagatcagcctgtttcctcctgtggcagggtacacagtcacatcggtcgtgtcctccaggcaggggcgggtgtacgtggccggagccccccggttcaaccacacgggcaaggtcatcctgttcaccatgcacaacaaccggagcctcaccatccaccaggctatgcggggccagcaggtaatggagggggagcctggggccgggatggagggaagagggggcagatcagacaaatgggagggcagtaaatacaggcatgcctggaccactgggtgccccaaagggcagtcatgttcctccagccaccttcatgctgccaggagtggcaggagtgcgcatccacctacagaaggccccatgggccctccaggatgccagctgcttcccttttcctggaatggaagcaatgaggaatgggaaggctgccaatgccattgccccacagggaggtggttggcaaccagactgtgctgccaagagtcctgtggtggacaatgatgaatgcaaattggaaagctataagagtcattggtggtgaaaacagggctccaatcccaagtcacttccagcacaggggaaaactgggctcctgggaagcaaggtggctttcccagggttctatggcaaattcatgactgggtcaagccaagaaccctcttggtggggctgcctgcatcatgccacctcctgaccccaaataaccccaaaatcaggcctgggctcctcctaaccagcagcatctgtgccctctctaggccagagctgagtgctgtccaggcccttccatgttgtccccagctccctgccggctctcctgagcctgggaacagtcctgtctcctgagtctctgactgcccttggctggtcactgtgagaatccgctcctcaccgagtctaacctaaatccctctcactgcagagcgccaccctcctgccattcctcctcctgtctcttgggtgcaggccatcccaggcagctcagctctcaccctccaccctgcctgcccacactcacccagggccagctcttttgggaatcgagggctagaccttgagagctggagggaatttgctgatgaatttatgacatttttcctgcccagttccgcctccaacatccgaaggagaaaccacagtgctgaaggcagctaaattaagtgaattccaaatcgcggtgacccacatagctgaggccacatatttagacaaatttctcccgccccctccctcacttgctgtctgtccgcttcttagttactttatgtaggcacatctcttccctctcccacccatgtgtattatttccctttcctctcttctaaattttttatccttctcctcagttaaaagcttttcatccttgagaatagatttctcctgaaaacacgctaagccagagatggacggggtaggcagaatcatgagccagggtgtcagacagaccccagttccaaccagcttggcagtgaccaggtgaccggccttctgaccttgggcaagcaattctctgagttttggttccttcccttgaaaatgaggatgactctctctcctagcagcatggggctcacatgagctaacccaaggctataaaccatcccacacagggcttgtccacgaacagggcgccttcccctttcctaagctacccagtgatccaataagcattaattaggtaccttctgtgtgccaggcaaagtaccctggccaagagggaacacagcaggctcaatgcctgccctcatgaggctcccagcagagggagtgggggctggtgggaggagtatggagctgaaggcacatggaaaaggggcagggagcagagtggagaaggtcaaggatagcttctaacaggaagtgacacatcagctgagacttgagggatggcaggggatggtctggggaggacgcaggggcggggagtgcatgcaagagaaaagcttgtgcagagggaagcctggaagccagccaaggcctggggcctttggagaagagaaataactcagtttggcaggacccgggagcactgcagtgggagcaggagcttgtggggacagaggctggggagggaggctggtccagcacggtcctgctagagagtttagatactatcccaaaagcaagaggtggagtggtgttagaggccacgccagctgccatgggggtgggctgaaggggccagcctgaggctggaaggccctttagaaggcgcctcacctagggacgaagcaggggggagcagttggtgaattggcacccaccacgtagcacttgctggcaggtttacgggtgggagaggtggagggtggagtcagggtttctgggtttctgatgagggggtggatgttgccctcactgaagtggggagcactgtaccccaaacagaaggggaacacagcaagtgctcagacactgaaagaaatcataattcaccatccacgatgctaatgccagaatgatttataacatcaaaaattaaaaacagtggcttacacctgtaatcccagcactttgagaggctgaggtgggaggatcactgaagcgtaggagttccagaccagcctgggcaacatagtgagaccccatctctacaaataattttttaaaacagccaggagcggtggtaagtgcctgtggtcccagctactcaggaggctgagatgggaggatcacttgaacccaggagtttgaggctacagtgagccaagattgcaccattgcactccagtctgggtgatggagcaaaaccttgcctcaaaaaaaaaaagctaaccgtccagcaataactgattaaacacattatgatacatgcataatttggagcactgtggaatgaccagtgattatgttgtagatgaaaatataatacatcatagaaaaatgttcatgatgtattgttttatttaaaaatcagtatataaactatatttgccttattaccccaatttgtaaaaataaaagcatatatacacacacctacaaataggcaacatgcctcaggggaaaaaaactagaataaaatccactaaaacgttcgtggtagttatgtttggatgtcttcttcatacttttaaatagtctcctgattttttgccattatatcactttacacacaagataaatggccaccaacaaaattaacagaaagaaagaagagtggcgaggggataatgacagaaggaaaagagggaaggggagaagggcaaactgaaaacagacaagtccactctgagggacaggagagagaggtagcgcgtgagaagggaggatccatttgttcaccaaaaattctgagtcaaaggatgaccttggcttccctctgcccgcgaggcgagggctctgggttgtgcgagctgggcagccagcccactcctctctcccatcacgtgccgcagataggctcttactttgggagtgaaatcacctcggtggacatcgacggcgacggcgtgactgatgtcctgctggtgggcgcacccatgtacttcaacgagggccgtgagcgaggcaaggtgtacgtctatgagctgagacaggtacagctgggcaggggctgggcagcttctcaggtgcccccaacctctgctttgacttgggtagccacgacggaaatgcgttactagcgaggccagtgctggagccaggcctggggagaatcagagcctcctctgtggctgggttcatatagccagagacggggttctggggaatggagtggtgagaggatgccggagcagcctgcagagggaattatgagcctgaggacttttgccaaaccctccccagcctttttctgcccctggttttgcagaacctgtttgtttataacggaacgctaaaggattcacacagttaccagaatgcccgatttgggtcctccattgcctcagttcgagacctcaaccaggattcctacaatgacgtggtggtgggagcccccctggaggacaaccacgcaggagccatctacatcttccacggcttccgaggcagcatcctgaagacacctaagcaggtcaggcttccctggggaagcggatggagcaaatggggctgcaggagtcccaggagtcccaggagcttctgtgcctcatctggttcaggattttcttccaggccctctcacagaaacggatgccaatctgtcctggccatgcttccccaagtggaaattttgaaaagggcacattttaccttcaggaccctcccatcaccccctttggcactctctccctgcttaccctcatcctcccccaacaacaaacaacaagaagtccctggcacctgaccctcactccccccgagacgcgcacacatgcagttgcctaccagtagagcatcccttctgggctcactcttctctggaaatgcttcatgctagaaaccatgcccacctcaaaaccaacccgtctcgggtcccgtcccctgaggatcattcttttgcccacacggtttatcagtaaaatagcctaaaaaatagaccagcgtgagagatggggatgggtcgcctccaagtaacatgtatttacacttaatggggaactcttttaagacacgatattttaatccaaaagaatgacttgaatggtaggaatttcaggtgccatgataggccaagagaggagattgctttgggttggggaagcttcttggtggtttcacacaggctccctattgttcctgattgttcctgctgctcggggacgcccgcccccacactcacagtgtgcatgccctccccctctcttcccgcgccctgcagagaatcacagcctcagagctggctaccggcctccagtattttggctgcagcatccacgggcaattggacctcaatgaggatgggctcatcgacctggcagtgggagcccttggcaacgctgtgattctgtggttggttcccccgctgttcccacctcctgggctctcctgaaagtcacaatgaatccaggggttttaaagataggcttcaggatctttgtctcttgtctttaactgccctcagctagacccaccctgttcttatcccatcttgcttacacatttccttttggtggaatcagtgtaaattcaatataaattgaagtcctgtccaaaagcccccgctcttagaatttgtcctaaaagttatggctactcaagcatgtcttccacttcagcttttcaagctataacactcgcaggggcaagttgagcgtgtttttaccatctggaaggacctttccttctcccctggcgtggaggaatgtttatctagtacagagatttctttcctccaaagcgctctgacttcttgcttcctttcttcagggcctcattttcatgcttcctaaacacccatttattttaccgtatgtttgctgctttttgagccaaaaaaaaaaaaagaccttgagtattttttcatatatgttgatgagatatttttcatcataaatataataacataaagaacatttataaaacaaggaaaaaaaaatcactcagcctgccatcaccttaacaatgccactattaatgctgtggtatatctcctcccagtctttttcccttgcctgtaattttatataaatgcaatcatatttgcctacaactttaaaaaggcattgaacagaaatatataacttcacagggagaataaaggaaaagacaggctcctgttcacaagaatactacaacccaagggggaaatgtcttcctccaggttccctagaaaacagcctgaggcaaaagcctctgtgaatgctttgggagtgggagcaatcctagaagcagaagtgaagccggaagagagcaccgatgccgagcgagccagcctgtcctcaccacgcgtgctgctctttgctcagtgtctcagcatttccagtgtggcgtaaaacagcccattgtaggggaagaaggggcagcagcagacttgtggctccctcagatccctcatttgtcatggccagagcatctgctgcccaacagtcccggtggtgccccagccctctaggcagcactgggaagccagggcctgtgcgtgtgcagcccagctagtgtacaggagcagggtctgtctcttcgaaggtctgtgctgcatgtgggggctcttaggtccttgttggtggtggtggtggtggcagcaacagcagcctgggcttgcaaggtgtgtaaaggtgtccactgtgttggttccagccaagaaagcatggcagatgaccaaggcccggggaggaggtacacagaacctagcaggtctttaaagtaacatataaacttctctacaggaagcaagatacacatgtgcacacacacccctcaagagaatcggtctcacagaaatgattggatcaagctctagcttttgaagtctacacctatgtgctacctaaatactgatgaaattgcgggcgagagccctctgggaagactatggtcaagccccatagttctcaaacatgactgcccattaggatcaccaggggagcttttaaaatgtcattgcccaggctttacccacaccaattaagcagaattctgtggagggacctgggcagcagtaattttttttaaactccccaagtgattccaatgggaagtcaagtttgagaacttcagatgtaacccactatgttgacacagcactctacactgtcaaaggacattctcacctcctctgatcctcacaatcccccattgcaaagatcatgtgacctgccaaggtccaatgaggagcccgtggagccaagactcaaatccactctttcacgctacagtgcagaggtgctgttcacctttatgctaagaagaacagagtattggcacagatcatcatgttgaagctatgaaacctctaagccactctacttctatttctttttatatacattcatggttgggagaggcaataggtttccgttcctaattacatttgacttaggccggtataagggtaaatttgtatttccttggttacctggatggggtagtgtgggggttagatggatgctggctgcacgttggaatcacctggggtgctttaacgcctcgctcttcgaagtgtggtccatggaacgttcacatcacctgggatcttgttagaaatgcaaaatcagtgccaagctattggatcaaaatctgcattttaacatgatccccagggggcgtgcacacatatgaaaatttcagaggcactgctttaaaacctgctaaggtctgattctgatgtggttttgcctagggtgtagctgaggcaccaggatttttttaagctcttcagatgactcacatgtgcatccagggtggggaaccactgctataaaagatgatgagggagcaaagggaagtcagcatgatccacagcgagcacagcccctcggggaaagtgctgaggggctgcatggaggggccatgaggtggctgagcccctttcgccccgtgctcgctcttgccagtcctttgacatccgaagccccctccatcctccacctcgccccctccatcctccacctcaccccctccagtggctttgcagatcccactcgcatctggttcttgtctttccccatggtcacagcagggcagcctgagcccctgccccaccccagctcactggcccttctcctccaggtcccgcccagtggttcagatcaatgccagcctccactttgagccatccaagatcaacatcttccacagagactgcaagcgcagtggcagggatgccacctgcctggccgccttcctctgcttcacgcccatcttcctggcaccccatttccaaacaacaactgttggtaaagcaggcccctcctttctccccacccccagactccagtctccccctgcaccttgctctatttcaaagcctgggcttttcccaaaatgggtgctaagtgccaggtcgcccaagagccaccttggatgactactggatcccatttgatgctctcattccaaagggcaaagaggggatgtcatgccagggtgagagtggcagtgagcaggggtgatcatgacagggaggacaggagaagaaggaaacagtctgggcgtagagtttggatcagagcacaggactgatgccagtggagaaaagtggggtgtggaagcccagaagtctgcctggatgcagacccaggagtcctacagggggggtgctggaaaccaggaggccaggtcaatgagaccccagcagcagggagccccgctcagaagtgggtgtgagtccacagcagggcagtttccttctgagggtccatcacttccagctaagtctggagtcagacacctactcatgacagccctggccccaggtggtctcaggaagtgagctgcgggttccaggactgtctgtgctggcacaggaaacagggactcagggagtctctcagccaaggagcaggaccagacaaagaagagaccaaagggaagatgaggacaaaggtgggcctgggggctgtgcccctctctttcaacttctgtccctgagaggagacagatatgagagccagcagcaacctgcgggcgtgctggagaacaggagaagggactgagcctttccgggaattggcaaaacctaactgaaggggaggaggcagcagggtttatgccccagaatagagtcagagatttgaggatccggcaggaaggggctggccagccctccttggtgtgagaggaagtacccagcaaaggctctgaccagccctgagggggatcccagagcccagggaaagacagggaaggtggagggagaggcggagggggttgttgactgcagcaagggctcaacatgacaccaccctggccccacatcctgtctcccctcctcatctgcggtgttcactttccctccacttcttccttctgctctttctccaccctcttcctcccccttttctttggttccttcctttaccttcctcatgcaatcacttgctctccatgtgggagtttctcacccacactggggctcgtgagaggaaaggaacagctctcccctggccagcctggggggcttcctggaggaggcagacagtcttggatgggcatgtggctccacctttgtggtcttgccctctcccctcctgcaggcatcagatacaacgccaccatggatgagaggcggtatacaccgagggcccacctggacgagggcggggaccgattcaccaacagagccgtactgctctcctccggccaggagctctgtgagcggatcaacttccatgtcctggtaagctggcagccccaccagcagagcccaagctcctataggaaggagcatctgccgtgggagaggcagagagtctgcctggctggttctaagcccccagcagacctcaggaagccagccagggacagtgtaccctgaccttggccactccacattcccacctcatgccccagagacacgctacataccacctcactagacatccttccaaaacctcttctcctgccactctcagatgccgaagggaggaaggtgggctcagtaggtccagcagagagaactaggagcagctggtggggggcacagccccaaagggagggataagcaggcagcagctaacaattaaaggccaggtccaggagacagtggcatgtacaaaacaggaggtgagacagagaggggcgccagtgatgtcacaagtagggtagtggcctggtgccccattttatagctaaggaagagaatgagaggtttacttccatccagagataccaaatacccagctcacagctccagccccagagatgcaagcagggtcactcagagccctcctggtcccagtagttcaatggccagagttcagagatgtgagcaggtctgagaaggtgcatccctgttaaggggccccctgagacgcatccacaccagcagcatcttcatcctccccacaaacttggaaattcacttgttctgactcagaaactctggggctggggctggggctggcgccagcaccctgtgttttaacaagctcccaggggactctggtgccagctcaggtttgacagccactgcctttatataatcagggattgcaggttccaaggggaaatttttaggctgctctaagcaacccctttacttaccatctatgctcagaaccaacctgagcgcccctgtcttgctcacgagtttgttcattcaccaattccacatgctgaagcccttatcacagtgctagggccatgctgggaggctccaggcctattccttgcttgggaaggaagagtgacacacagtcatatggttcaaatgctacatgagcagcaggcgtaactggtctgaagagagtggtgggtggggtgggatacaggcgggcactgccaggcttcccagaggccgaggtacccgggcaatgggagtctggccccgaaggatgtgcaggagcttggcaaaacagccaggcagctaggttggcatgagctgagcttggagctcctttcacagaagcacactcttcccaccaacagacccgctagaaacctccatccacctgcagactcaccctgagggcacagggcagctgccctgccatctaaggaaggtggaagttctatctcagcatccacggtcctggctcataaaatgacgttctctcctccctcaccgctgccctcatctccaccccccaggacactgctgactacgtgaagccagtgaccttctcagtcgagtattccctggaggaccctgaccatggccccatgctggacgacggctggcccaccactctcagagtctcggtacatctcggtacagggcacgcacctcgggcatgaaccccacccccacctccacctcaaccccaaagcccagagcctgagtgtgccgggtacagaggacaccatccctcatctcaccttcccacctcctgtcctggcaaacccacagtgtggctccttcctgcctctctcggggcctgtgctgagtgttagcagatcaattccttaagggcaaggcccaggccttctcctgttcaagtttccccgtatccccagcacaggggagcacagggtgagcaccggagaaatacaaagaaccactggatgagaagggatcggagatcttaatcacccacctccctcctttacagatgaggacaatggagaccagagagtgactcttagagcctggggttctgcttgttaggtgactaactgattcacagagctcctaagtattgcaaaaagaagtgttttaactgactgacagcggtcctaagcattccaaaaagaagcggccccatccctcagccacattttctaatccctggctctggggcatccaaaatgtttgacatctaacattcaaatgctccctgcagccgcaactccatgtaaatcccactcaaggaaaatgtcaggcagtgatcaattctgctgctgtgctgcaagagcaggcaaaagttataaaatggaatagctaatgcctgaaccttgaggatttgggaaacaacttttaagcacaccacggtgctcttaagccattctgtgaggtccagtctctgagcaacgtctgtgtgagtgacagagtccagccaggaagcagtttcagaattattcaagttcttacctgcatttcttcaacaccaggaaaggaccgtacagtccacagcaatgcccctgaaaacctccccttctctcattcacacccatcatcccccacagcccctccacacccctctccccaggcctcccacagtcccctgccaaacctccgtcctcacacctcccctctttctcctaagtctgagctcctgggctggcaaagctggattcatcgttagtgagccgggagaaggggaaagctgggcgcactaagtcatttttgtcctctcgcagtaattacaaagtcactatggcaaatgaatgagtacgtggcactcaccccacaagcatgctgaagcccacagtgcagattaacacacagggtaatccctgctctgacaccgacgatctccgtgcaaggtggtaatgagcagcacaggtcaggtgggaggcagtatgcacttggaggacgtacaatcaagcaatcagatgataggtcagagggccttcctggaggagggagcctttggccagactttaaaggctaggcaggattcagacatgcagagacagggaggatgggcttttattccgggagagctgacagcatcaccaaggcagggaaataggaaaggcaggatgcagcttcaggtaaacccctttctcaccttataaagaaaaggtgagaaacagagctgaaaactttgtagagcagctaagtttctaaaactctgatttatctggatttctagcccccagcaagtgagacacattcttcccatcattctacaaagtcttactttgcctctactaaatgcccagcgctgttctaataccataatatctggcctgttggggaagtgagccatcccatattattgagtgtaacagttgcttattacattaaattatttattttaatcagccagatagaaattcttctgaaggtcattatatagttctcaaacttcttaaacagtatgctgagtgggagctggctgttttttctttgagacttgaactcaccaggatgaactttggtgctagaatgccgtaaagcccctatcctgaactaagttcctttcccaaacggctccacggtgacccctggatatggcttcgctggctaccattgcagtcggcaggtccaccttgcggtggggagctgaggggcgagatgggtagatcaatgcctaaagcaagagcgtgtggatctgactgagggccagagagctctccttcgagaaaagttaatgaatttaagatacacatgactttgtgacacctgtttcctctcccctggtttgggctgtgttgtcggtagtgacagttactgcccctcagctccaggcttgaatatccatctgcctgctgaggtcctcgccctgggtgggccacaggcacttcaaactcaacatgccgcacactgaacttctcacttaacccctactttctttttttttttttttgaaatggtatctccctctgtcacccaggttggagtgtagtggcacgatcttggcccactgcagcctctgcctgagttcaagcaattctcctgcctcagcctcccgagtagctgggactgcagccactgcgcccagctaatttttgtattttttagcagagacaaagtttcaccatgttggcctggttgttcttgaactcctgacctcagttgatccacctgtctcagcctcccagagtgctaggattacaggtgtgagccaccacgcccagccaacccctgcttttattaccaaatgccatgattatccttctagacacctaaaaaagaaactcagctgacaccctggacccctttctccctcagccccgacaacctccaggttcctattgatcccgcctctggggtcactaacctatttcctcctctcatgcccactaccacaccgacaccagcgtcatctcttgcccgaatgttgtggcagcctcctcaatggtctccctgcctcgagcctccatcttctcactccattctcccacagcagccagggcagccttcagcatgcaggtctgtcaggacattccctgcctgaggcattcggcgactcctaccagttgcaaggaatgaccccaaggccctgtaaacacaggcccctgaccatctcttcctctctcccacccctgtgtctcttaccacagcaacactgacccacctatcatttcccagactcaccgtcccgctcctgccccagggcccctgcatcaggccgtccttcctcctggacttcaccacctccatcccggtccacacagctaccttgaccgtccttcagaactctgatcccctgtcacttcctcgaaggcttccctgacttcctacaggccaaaacagctgtttctcctctctgcctcttctattcctcatgcacatttcttttcggtttttttgcacattttacactagtgatttgttcatacaccaatcttccccttgagctgagggcagaagctgcatctttcttgttttgtatccccagtaccaaagcccttgcccacacacagtagatgatcaataaatgttgaccagaaccgctctgctgggtgagtgggggtgggggttctgtgccatcagctcagttatgaactggaggggagccaggaggagctgagctttgagcatcgttttaaagagggaagcatctatggaaaagcacaagacagagcagtgtggtgtctggggacagtgcaggaaagccagcccatgtctagtgtggtggagacagagctggtgtacattgagggcgaggggctgcgggtccctacccagctgcccacacctggctctccctggcccaggtgcccttctggaacggctgcaatgaggatgagcactgtgtccctgaccttgtgttggatgcccggagtgacctgcccacggccatgtgagttggctccttccacccccaccctcgccccttccccttcactgccagaggctctggggctcctggggccctggattatttcctggacatcctcctcacaggcagcatggatcaaacattgcacttggagcctgcgttctagcccaggctctgccaccaactcctgcataacctcaggaaagtctcttctgtaatatgaaactactagtctaatctaatttcaaattttgttaaaaaaaaaaaaaaaaagaaaccctttcttcggagcccacattacaaaatagatgaaaggtagagacaggagtctctggagttctgggtgcttgtccttcagcccccagatgaggtgacctctaggcccgctggctgaacaccttgggctttccaatccttctgatggaaagatgccagggacaccagccgagggtgagcaggggacctacaatcccctggaagagacaaacgaacatacaagggaaaataatgaacaatatcatattcttaatttatgtaacatattttccaataatttatgctcaactttgatccaactatgagatgatttagatagaaaacatatataccatgacatagataataaagagaaatagcacattcaaaacttgtagaaggataatggagcacatattctaaccagctaggctaaaataaggattatctctacattagtgctgagcttcctagcagccaaggccaaaagggaaacatgatgtgcggagtggtgatgcgtgagtggtgaggtcaaataagagctctgggttcagcggagggtatgatctctatggtggggacaccaagggcctttgaaataggaagtggtcttgaagggtgagctctttccagccctgccatccatttccactctcctcccagtggctattcccatgagcagaggccagtcaagtgcccagacccacctttttgccccaaccctggggctcctctctacccctgctttcctcattccatctgcccagtctctggtggtctcttgttctcagggagtactgccagagggtgctgaggaagcctgcgcaggactgctccgcatacacgctgtccttcgacaccacagtcttcatcatagagagcacacgccagcgagtggcggtggaggccacactggagaacaggggcgagaacgcctacagcacggtcctaaatatctcgcagtcagcaaacctgcagtttgccagcttgatccagaaggtaagacctcagcgacctgcccagactgcctctgcctggcacagaggaaaaggaaggccaggtgggctcctggctacatgttggaatcacaagaaagctggatgcagtggctcatgcctgtaatcctagcactttgggaggctgaggtgggaggatcacttgagcccaggagtttgaggccagcctgggcaacatagtgagaccccatctctacaaaaatatataaagtaattaaataaaaaaaaaaatcacaggagagctttaaaaagcctgcccccagactcctcctctggagatcctaactgatttgctctggggttgggcctggcatcgggaggcttttaaagctccctcagtgacttcagtgtgcagccagggctgagaaccaccggcactaggggagtctgagccctttgggaacacagggaggaatacccttcagcccgactcctgggccctggttaggggcacacacaccacgcatgtgccaccagccatccacacgttctaccaacagtgcaccctgcaggcttgctcggaaggtccttctgacaagaatcagaaccggttcttccccaggttaaaacttctgatcactcccagctgctgtcagaacaaactccaggctcctcattgtggcattcaaggcccatctcacccacctcctgccacttctcctctaactgtgccacgggccaccttgttcccagcacgccctgctggttcccaccatggcccccacctgggactcctctctcctctgcccaacaggctcctgctcccacttggtgaccatccacatattgcctactcacggcgtccagcgctgtgctagcacttggcatgcatttaacccttgcagcaacctcagacatagcagtagtggtggtagtggtggtggtggtgtccccattttacagaggaggaaactgaggcatagggaggggttaaggcctgcccaggaccacacagctggtgagccgcagagcggaattcccaccccacagctggcgcctgagcctgcgctatgtgacaaagcatagtcctcagccctgctctctggggtatctttcccaaagctctccaaggccacaggcggccctccagcccgcatagcatctggtacagcccttcatgtgctctgaagaaacatcagtctccaagtgctggcctcttgaaacccttgactcccaggtggcaagagccctgtcttagccatgtctgtgtccagagctgggcacatagaaggccctcaagacaagtttgttgagtaaactcagacatcaatgtcatgtgtgggtgttgcgggggtcctagggccctcagacacagcctctgtcctcgaggatctcagtgtcaatgtggaacccagtgtgccaggcaagacaggtgccaggccagtctgtcctctccaccccagaaccactgcccagcacccctccccaagtgccccccccttgcttgccacacacacaggagcagttcctatagccaggaggggaagctgagtggagggaggccaccccaggaaagcgaggagctgcctactcgggtacccccttcctcctcagtgggctcccccatcctcaaacagacctcaaggcctatctgcagccacagttccttctgtcaggcccaggcctgggccccaatcccactccctctccactgcccagagtgacagcccaggctgatgatgaagagcccacctgatggtctctcgaagtcccctcctgtccagggacttgtgtctgtctggatttcaggtatacggagggaatcaagccccacaccagcatccgccttcccctgcttccctggcccagacttcacaaggccagtctcatgcttgctcctaatcctggggagggaatcatggagatagtttctgtggctcagaagagcttttggaaatgagtggaggtaaagagaagtgggagacatgttctgtgaagtgctgtgtccccacacatagcaggtggggtgcagagttagcctggagcctacctccttcacaggtgccaccacccatccccaacccaggaaacgctcatggctgtgaggtcagcattcctctcctctctctccccaacatccagccaaggggaactctagtagagaaagcacccctctcagccaaatgcagatgtgttagtctgatcacacactttttgcacacacatgcaaaaacacagcagcctacatatttgtcctgggaaatgcacatgctctgtgtacatgcagcaggtacatgcacacacatgcactgacacgcagacacacacagagtctccacagacacatgctcacatccacacgggtgcatgcatgcccagagacatacacagccatgtgcccaggtaatgcccaacagtgcagagaacacagcagggacaaataatcatcataactgtagctgccacatacgagtgatgacaataggcagggcatgggataggcgctgcatttatgtgcatcgcgtcatgtaatcctcataacaactagatgaggtagttactgtcatccccatttaacaggtgagcaaaatgagacgcatacatgagcccccgccatcctccccaccgcctctgagtgtgtcccgccccgtgtcatgccaagtaccaggaaccaagacacaccctggcctctggggcctctggggtctcagacatcagaagggctgtggtccaggctttcatatgggtatcaggggctgaggcggcccctgcagagtggggtgcaggctgggggtgagggagcctcgagacctggtcccaggccccacctaactgctgccatgatgtctgccacccacctccaggaggactcagacggtagcattgagtgtgtgaacgaggagaggaggctccagaagcaagtctgcaacgtcagctatcccttcttccgggccaaggccaaggttgagactggggacaatgtgggggagggtcagggtgggcactgggaggcacaggtagtttggggagggcggcaagagcaacaagagtgaacacagaagaccagggagggatgggaggcctgaggtggcttttatttgtcttttctcccacaaaattacattcaagtgaccaaatgagccagccatccccatgctagcagcccatcctttaactcagagagaattcctaccactcccagccactagtctgccacctgcccttagccagtcccactgttctgcagcctcacaagtttttcaaatttctggcctctgccactgtgctgtgtatgaggagggatggggagagaaactaccatttcgtgagtacctaccacccaactgtgcttaaaagctcatgtgaatagagggtgggtatgtgaagggagaagcaaagtagctgggaaagggagggagacgccagattgcagggagtgtttggacatcagccctgggcagcaggcagccatagaaggttctggagtaggagacctaattgaggccaagctgcgtggacttgggaatcagagaggagctgtggcaggagccagtaggcggcagcagtgctcccaggagcagggtctgcacagctggggaaagagaaagaaatgggagtggggatgagggctccttagcaaagcacctccctggtgagatataagtcaaaggtgtggtttctgggttgaggcaccgacaaacccaggagctctggagtggggatggagcaggacatagcccaggcttccccacccacgcccagccactcctgcagagaaggggccgctgaggtctcctgggaaacctcgtgagggtgagaccagggagcgcatcaggggtctgtgcaaagcctcagtaatgcccccaggtggggcagggaggaggcgaggagggtcgcatgtttccccaccgcggggcgaagggcaaggggagtatcagggcccaggtcagcagtgtggcagaagcgctgccagacaaggggcggatgccttgttggcctgctgggtggccactggccctcatccctctctgggccatctcctccctgccacacacaaagaagaggtggacaaggcagtcctaccaaacgtttctggcccccacatcctgtggtgcatggcgatggccatcggcccttcctgccatcaaggacccctaccctaaaaaccctgcagacagagtctggagctggacttgctgctttctggttgccttttgctaaaaacaaaagaagaggaagagggaggggggctggctcagccccgagaaaccccattgtgggagctgttgtctttggctgtgtccccacagcagccctgaagctcagctcatgttctgtagcacctggtcctccctttcccagcctgttcccagccagcagctccccaacccccagcaagctccctctccccaagccagcagggggctgtggggagtgggctgtggggagtgggcggggctggtcccagcaatgcccagacatgcgactgcttccttgcaggtggctttccgtcttgattttgagttcagcaaatccatcttcctacaccacctggagatcgagctcgctgcaggcaggtcagggccgtgcctgctccttctccccaaagcttgctattccggggcccagctctctggctgctagcaactgctcctcccgacactgagtccgctgccccacgccctgtcccccactgccccaaccttgagtggaggcagtggggtggggaggtgggccggcatccgttgcaggtgtgggccaacctgctgccccctgtgttgccaccactcttcattctttggatgataaataataatgtcagccctttacttttagacagccctgtatacagcagtaattcacaaaccctatggttataaagcattgtacaggcaaaaatctcagtcctcacagaggccccttaagatcatcaaagcaggggttattccacacaccatcttccaagttaagaaaagagaggctcagagagggtgagtgaatttcccagggacacacagcagtaaattgtgcagctggaagctgaacactactcgtcctattccccatccagggctcttcctgtcctagtcacctctctcccctttttctatttttaagaggccttttcttactctatgtgggtcttcctgtctatctgtctgtctgtctcccaggcctctcagaggtagcttgctatgtgttgaccccatgaatcactttgtgtcagtagtaaatacacttctcttttttgcagaattacctctgtgtggggaaggacagagggattgtgtccactctggagccttataaatggcaaaaatccttagctaagaaataaataccccaggcaaaccgaacactaacattccagcacacacacgtgcaggtcagaggtcacataagcgctggggactcatacccgacacgtgctcgcgtcccagctacagttaaatgaattgtgcatcctggtagaattctcacacaccacgtggcaaacttggcaaggcctcccttgctctctgccctgctctaagaaagcccagtcccgtcttcacaggagaaatgagcgcgcttgcagagcagtgtctctggcacagctgtggggggtgtctgagaattaggtgtgtgtaggagggggctctggaggcacatctgtgtgtgttgggtctcccttttctaaccaaacccctatcctggggtaaggcttccaaagggaatcaaactcagtctatataacaagcaagaactgtacatttttatgtctaaaatgatttgccccggtagttcatggtgctcagatataaagggaggcacactggacagaacccccccggaagatgtctctgaatttcactcccagccttcttgtggcagcagagtgcccctggccgccctgtaggagctgcccccggtcagtccagggataaatgaatgactctactgtgaattcctcaccatccctcctccgtgggcacagcctttgccacaggtgtcatctcccacagcccctgagtccagcaggcagcaggattggcccgcctgacagacggggcatctgggtgagggaggcaaacaggctggggtccagtccgtgccaggccaggcacaggcctcccaggtccagcccagagccctcccctgactccacctaaaggggcagcaggtagagctagtgtcatccatccctgcttctggcccttcctctcctaggagatgcctcaggttccctgtctggcctgtctggtgcccatcagccccagataagccagtgtgctccttccacagtctgcctcagacccttcccgctgcctgtgctggctgagccccttcctgaccttgccgcctggctctccttgcagtgacagtaatgagcgggacagcaccaaggaagacaacgtggcccccttacgcttccacctcaaatacgaggctgacgtcctcttcaccaggtgggccgggctccgggggccccaggagagggaaggcatggggaatgggaggagggaggcctaagggggggcatcctctgatgggccctaatagggccagaccccagcactaagggactatggatggagccaagagtgtccctggtgggtcagagagtgcagcacccccatccaatgtggggaggggatatcaaattagaggaaggaggagacacaggcccggccctggggagctcccagcaggggcaagaagggagggtgggggcagtgggaggcgtccacccctggcataggcaacaagtggatgcatggtctgtagagaatttaaaaacagaaataatatctatcgtaagtcaatctgctttttgttatcatattatgccagcacatctaaacaatgtcagtgggaaaagactcttccccaaaggacagactgctcccacccccacccccttggcatgctactggcccccaatctgatggaggaaacagcccctgtcctctgagagctcatgggcagatggagaagtcagggcagaacagcagatgcggagaggaagctcaggccctcccacgccagccatccctagagggtggaagggagcacagtggcatggtcactccgaaaagtagctacactcctaggcagagacgctggggcagggatgagataactggctcttctgactcacgcccacccactcaggaggcagacattgctcacccatggcagcgctgattcctgcaaaggctcagaatccttccaacatgacactcactcccagccgacacaagcgggaacctgtttttcgtggcccgggggaggccggcacatgccctctccctctttcattcatctgtccatccagccagccctgactgagctcacgacagccctgtcctctgtctccgcaggagcagcagcctgagccactacgaggtcaagcccaacagctcgctggagagatacgatggtatcgggcctcccttcagctgcatcttcagggtgaggctggaggggagccgggtagagggggaaggacgggatctgagcacccccatcctggaggggaggaatgtggaatcatcgctagtgcccggagtccagcctcaaccctgccacccacccactgtgcgactttagtcaagtcacttctcctctctgggcctctcagtcttcttttgaaaaacaactggactgcagtgggggatgtatgggtgaagatagggtgtggttgcctaaaattcttaaattttttttaaacagtggtttaaacacactagggtttactctctcccataaaagaagcccagagttggcagcttcacaaagtcattcaggagtgggtcttctattccaccatcctcagcgtgaacttaccagcctccagttcacctcacagtacaagatggctgcagctccagccatcaccttctcattccaggcagcaggaaggaggaaggggagaagagcatgctccctccttattaagggacctccctggcagttccttactcttccagtgacctctctttatccagaatgttgtgactgagccataagggaggctgggaaatgtggccttttgtctcggttctgccactaaggaaagtgggagaatgagagttaggaggcaatttggcagcctctgctatagtgggccccgatagctccctcagccctgaacagctgtaagttcatcagcttctcttaggctgtgtgaaagctgagggcaagctgacagctggatactggacttcagacatgctgagccctgcatggcttgttcaagagaggcctagtaagctgcccagggtcacacagctcataggtggtggtgggcccaggattagattcctggtctttctggttccaaagccctgcttggaatcactgctgtcctggcactgaatgtggcactgctagaatgtgaacaatcatgcactccttatttagtaataaatagcgagtttaattaattaaattaattgttaattaatgattccctctcatgatgtattcattgctgtcaccatcttcacccctggcctcaacaaaatccccaccccaggcaagaagagttgaaaatgcaggtggcccctgctctccggcctcaggatccccactgacttgtcttcagcttccagccacccatcccctctcagggctttcttgcacttgtccatgcagtccccggccacaatttgacagagcttaggagcttccatggtgaaaacaccaggggtcttgagtgggcctttttcccaggcctgatgggggaattgccacccccaggggctggttggcccctgtggaccttgttttccacccccctcaactgactgtactgacacctccctgtctctggccacagatccagaacttgggcttgttccccatccacgggatgatgatgaagatcaccattcccatcgccaccaggagcggcaaccgcctactgaagctgagggacttcctcacggacgaggtggtgatggccttgggagccggctaggggaggggaccagaaggagacagacactccccctacgtgtgtccccaggttcccagaccccagctcccttctcccaggaccacggctagaggaggagaaaagaaacctctctgggatcctgcgtctgccagagctggttgtgaggctgtgtatgtgtgtgtgtgtccatgtcctttatgtaggcgaacacgtcctgtaacatctggggcaatagcactgagtaccggcccaccccagtggaggaagacttgcgtcgtgctccacagctggtgagtgtcccccagaccgagagccacagtggttggggttagaggcgtgccgccggtgctctgcgggccatttccctcccgacccaatagcttgccaataagagcttactgagcacctgtatgtacccagccccaaaccaagaaaaaaactgaaggaggaaaagacttcttggcctgtgtgagtcccccgtctcacagggagtgggacaaacacacagagtgagtgtctgagaagccaaggtcacagcctgtggtgtgccaggcaaacgagcagaaaggggtggggagagtggacttgcacctgggccaagcgggccagtaggatacagagaggcagagggaaggggaagaaaacagacgcagccagaacaccagaacacacacgtggcttgtattggagacatttggctgcgtcagctggggcctcctgccctagagatggaatgcagaccagcttcaatttccagagccctcccaaaacacctgctcatttccagtttgcattctcagggttgcctctgcctccagataccagtttctcaccctgcttccactgttcttcccccagacaacaatcttccctgttttagttttacttcccccagacaagtacctcccacaaagcacttactgagggtagtgggctttgccaaagatttaggctgggttggggttggggtgggcagcacggcagcaacactagtaactttcacctaataaattctaattgtttgaagatttgtttgggtttcccattaacgttagtttctccacttaatccttatattataaatgatcttgaggtattactctaactaagacctccagggcaatggtaaatagatatgatgatgacagaataatcaggattaccttaatcatgattacttaaaggaatttatttttattttgattgttaaatatgatcattgccctaggcttcacacatgaggggatttcaaaatcattaggcgtccaccttccagtcctgatttggctccttctaacttcttttggtttgctaatcttaaaaaaaatctttaaagggcaaccattattcctcagctaataatgtaaacaaaactgcattaggccgtgcacggtggctcatgcctgtaatcccagcactttgggaggccgaggcaggtggatcgtgaagtcaggagcttgaggtcaggagctcgagaccagcctggccagcatagtgaaacctcatctctactaaacatacaaaaatcagccgggtgtggtggtgggcgtctgtagtcccagcgactcgggctgggcaagagaatctcttgaacctgggaggcagacgttgcaatgagccaagttggcgccactgtactccagcctgggcaacagagcaagactctgtctcaaaaaaaaaaaaaaaaaaaaaaggactgtattgacatggttacattcccaggactcttagtcatttaagaatggactacatggttggtatcattgcttacaaaagtgtcttgaacttgatgggcttatgttgagaagtaaaatttaatttttaatttttaccttttaattccatttttccacaaactttttgaagtccctttgagaggagcgagcaggagcattgtcatggtggagaaggagtctctggtgacattttcccagccatttttctgctaaagctttgattaactttctcacaacactgtcataataaccagatgttctcattctttggccctccagaaagtcaacaagcaaaatgttctgagcattccgaaaaactgttaccataacctttgctcttgactgatctgtgtttgctttgactggaccacatccacctcttggtagccattgctttttttgtgctttgtcttcaggatggtactggcaaagccatcttttatccgttataattatttgaagaaatgcttcaggatcttgatgtcacttgtttaaaatttccattgaaagttctgctcttttctgcagctgatctgggtgcaacagattgggcacccgtcaagcggaaattttgctcaactttaatttttcaatcagaatgatgtaaactaagccaactgagctgtctatagtgttggctaatggttctgctgttaattgtcaggcttcttcagtgagggcctgaacaagattttttttttcctcacaaattgatatgaatgatctgctgctgcaagctccatcttcagtgtcctctaatcccttttcttttcttttcttttctttcttttcttttcttttcttttgagacagagtctggctcggtcacccagctggagtgcagtggcacgatctcggctcactgcgacctccgcctcccgggttcaagtgattctcctgcctcagcctcccaagtagttgggactacaggcgcgtgccaccacggctggctaattttttgtatttttttaatagagacggggtttcactgtgttagccaggatggtctcgatctcctgaccttgtgatccgcctgccttggcctcccaaagtgctgagattacaggcgtgagccaccatgcccagccctctagtccttcttaaaacaagttatccatttgcaaactgctgatttctttgtgatatcatccccatcaactttttataaagcatcagtgatttcactgttctttcactcaagtttcaccataaatttgatgtttgtttttgcttcaattttagcagaattcatgttgctcagataggggctcttttcaaactgatgtcttatctttcttagtgcctcaaactagatcctgttcacataggttacaacaagttaatacgagtttattttggggcaaaaaaagttttggaatccatgcataatttttccataatacacattttccatgaactttatgaagaccccttttatctgattcaggaagttccctgggagtttttatcatgaacagaagttggacttcctaaaatactttttctgcatctgttgcagcgatcatagaattttttatcttaatgtgtttatatggtgataggaaacatttatagattccctaatgttgaacaaaagttctgtccctggaatatatccaggccggtcacaatgtacagcttcaagtggagcatcagatataccatccttcatttgtccttcagtcatcccctggcagacgcaatgcacatgtcccccactcccaactttctctttgtcccctgtcctctgcccctgcccccaggagcagagccccagtcgttcaagcagtgttgctgccccctgctcccctagcccagcagctcagccctgagacccatcttctctttcagaatcacagcaactctgatgtcgtctccatcaactgcaatatacggctggtccccaaccaggaaatcaatttccatctactggggaacctgtggttgaggtccctaaaagcagtaagtagagcccctgggctgggctggaaggaagaagggaaagggggcggctgttgggatgtcttccacctggggctgcctggggaggggacgggaagaaaagcttccaagccagcttctgacgagccctctgattgcacagctcaagtacaaatccatgaaaatcatggtcaacgcagccttgcagaggcagttccacagccccttcatcttccgtgaggaggatcccagccgccaggtgagcccctgggagccctgcagaactgggcttaggccggacagcttgggaaagggttggccgtgctcctctatagagttttcctacaacccctggctgcatgtcccagcaggagagaatcaggcagacctgtgggctgttagggcagccgctgaaaagagggaaaaaagcaagacaaagcctcaggggcaacactagggaaggtccagaggtctggtgtgaactgaatttgtgaagaccaaaggatgggagatgcctcggtatcagcctctgttagttgcgtaaaagcagattgttacagattacactggcttcatccagggtccaggaaaggagtgagactctgtgagacccaacgagaagtgaggtcttaaagaaaagcccattcctggaagaagtggcaaaggaagaaaaaagaaaagaaataaatttgtaaaagaaagcaagcaagcaaagcccagtcctgtggaaatagacagggcagccgggcgtgggacgctgctgccctccactggccacaccccagaaatgccagcttgggctccaggcaaacattcctattacagaggcggagtaagctcccaacaccaccccagggagatgctggagagcaaagaggcggggtcaggaagcatcccttataaaacaatccaacaaaaaccaatcacagccagggcagggggatgccaggcagaggggtatcaggatccacctaaggagcttttttgtttgttcattcatttggcatttgttgggtgtgtctcctacggcttgggccccaaaggggaaacagagataaattaggcagacagggaaacagtgacaataaatgggtgagtgcagtctgggggtgagcacaggcccggaggggagcgattccgagcgagggacatccccggaaagctttctggagactgtttgaaccgaatcttgaaagatgctgcaatgttcccagcatccaagagagggaggtgtggtacaggcacccccgctcccccacacataccctgctcacacacacagagagagagagagagaacccttcttctcacattgatgcttgtcttttaggtgacttttccttcttccacccccactcaaccccccaaaaaattcctctatactctctggatgcctcactcccttttttttttttttgagacggagtcttgctctgtcacccaggctagagtgcgttggcaggatctcggctcactgccagctccacctcccaggttcatgccattctcctgcctcagcctcccgggtagcaggtattacaggcgcccgccactacgcctggctaattttttttttttttttttagtagagacagggtttcactgtgttagccaggatggtctcgatctcctgacctcatgatctgcccgcctcggcttcccaaagtgctgggattacaggcatgagccaccgtgcccggccatgcctcatttctcttttagaaatccagcaaccccaaaattaagcccctgtatgctgggctgtgtgctaggtgctggcgctggggaggcagagccaggtgcccgccttgagggacagaaagagcacacataagggccctgccatttgctggcccccagctgtgtgctgaacatggtgacagacctctcaacactgtgaggcactgtccccacccccatctctcaggtatgcacaccgaggcatgtgagatgaggcaggagggacagtgacttgcctcaagttgaacagtgagtcagtggccaaaggagggctctgtctgctgttgcaggtggtccattcactccacatggctctgtctgctgttgcaggtggtccattcactccacgtgttagctgagctcctgctacattcccggcacggctccaggttctgaggatagagcagggacaaaacagacaaagcccccactctcctacagctgacattccaggcaggcaataaacataaatataaacgttatcaactggtgataagggctacccagaaaaaggcacacatctaagggtggagtgccagggggtgctgttttatacaggggagttgggaaaagcctctccaataaagtgacatcagacagagaccatgaggaagacaggagtgtctcgtggctgcgtgagggaaacccttgcaggcagagggaatagcaatgcctacagcaggcacgccatggcatgcatgctggaggccaggtggctgaaagctggagtaaagcaagagggagcaggaggtgaggtcagcaagacaggtgggacccgagaggggagggccttgcaggccagggccaggactgcactttttactttgagcttgagcagagcagagcagagcataagcctgccttcctcgttagaaggatccctctagttgctatgctaagaacaaactgcagaggggaggcagtcgggcagcgctgtagtctccagaggagatgtgagggcactcaggcccaggaggtgggagtggtggccacattccaggtgtttccaaggtagaatggacagactttgctgctgggctccgtgtgggtgtgagagttagggtcagtgatggatacatggcttctggcctgagcagcgcggagggatagtgctgccatttgcttaggtgagaaagagctggaaagagcaggcttcgggggctggggtgttaagagcttggttaggggcctgttacagttgccaggcaggccaggagacagtcggtgtgagcctggaattcagcggagaatccaggcggacgacagaaatgtgagagcagtcggcgtgtagacggtgatagccacaggactgagggagctggcctgggcttactttctgaccttcacgccctggccacttttgcctttgggacaccttcctccataggaaaaaagtatttaaaattatggtttataaccatgttgatacaaagattaaaaaatgttatccaagctggattctattccattttttcctctaattttaaaagaaatgtaaacattttcatgggctcctaaaagtgttatgggccttggcaccatgactactgtgactcgtgggaaagtcagccctgagttcacccaggaagtgactctagaaaaagaagaggtgcaaggactgaaccgtgggagacactgacctttagaagtgcgggaggcgatgcggaggcagcaaagggagaaggagtagcccatgtggtgggaggaggatccagggagtggcgggggcctgaggccaaaggcagcaagtgtctcaaggaggcaggatcacttgggccactgaacccagtgtcggctgttcaggcagtggtcgtcctgaggccttggctggcctgtccacccatccctctggtatccccctgaggaagaggatgcagctcccccaccaggtgccagctgtctccaccctcctgcccctcccagactgccaccccagccccagaagagtaatgctgttggcccggcccccctccccttgcagatcgtgtttgagatctccaagcaagaggactggcaggtccccatctggatcattgtaggcagcaccctggggggcctcctactgctggccctgctggtcctggcactgtggaaggtgagggccctggcaggggagggaaggagcagcatcctggctggtgggcccaggctccagcccctggaacttcgtggccgctgccacgttctcctctccaggggagctggcaccccacccctcgccatagcagacacactggttagggccaacagacggcactcagactatggctctaacctgtttgtggatgcctttgagaacctgatgaaaactaaggttcctattattagagaaaaaaaaaaaaagcaagtacaaacaactgcacaaaatttctcccacaatgtcaagctgttaacaaacctcccgaagtccatctctgtctctgaagctctggttacaaacccctggtctcagcctcctcctgttacagatgaaggaggcccagagagggatgttggctggggctggtcacacagcaagatgggcactagtatgacttcttgcatgcagcccatggtctcatccactgtgttccagtccacagaggcagttctggaggagggggtgctcagaatgagctgggggtactcaaggaagccctgagggaggaatcccaaggaaaggtagtggagggaaagctggggcaggccttgcccaccctgtcctcctctgagacgtctccctttgcctcctcacagctcggcttctttagaagtgccaggcgcaggagggagcctggtctggaccccacccccaaagtgctggagtgaggctccagaggagactttgagttgatgggggccaggacaccagtccaggtagtgttgagacccaggcctgtggccccaccgagctggagcggagaggaagccagctggctttgcacttgacctcatctcccgagcaatggcgcctgctccctccagaatggaactcaagctggttttaagtggaactgccctactgggagactgggacacctttaacacagacccctagggatttaaagggacacccctacacacacccaggcccatgccaaggcctccctcaggctctgtggagggcatttgctgccccagctactaaggtgctaggaattcgtaatcatccccatcctccagagaaacccagggaggaagactgtaaatacgaacccaatctgcacactccaggcctctagttccagaaggatccaagacaaaacagatctgaattctgcccttttctctcacccatcccacccctccattggctcccaagtcacacccactcccttccccatagataggcccctggggctcccgaagaatgaacccaagagcaagggcttgatggtgacagctgcaagccagggatgaagaaagactctgagatgtggagactgatggccaggcaagtgggaccaggatactggacgctgtcctgagatgagaggtagccgggctctgcacccacgtgcattcacattgaccgcaactcacacattcccccaccagctgcagccccttgctctcagctgccaaccctcccgggtcacttttgttcccaggtacctcatgggaagcatgtggatgacacaatccctggggctgtgcattcccacgtcttcttgctgcagcctgcccctagacatggacgcaccggcctggctgcagctgggcagcaggggtaggggtagggagcctcccctccctgtatcaccccctccctacacacacacacacacacacacacacacacacacacacacacacacacacacacacacactgcctcccatccttccctcatgcccgccagtgcacagggaagggcttggccagcgctgttgaggggtcccctctggaatgcactgaataaagcacgtgcaaggactcccggagcctgtgcagccttggtggcaaatatctcatctgccggcccccaggacaagtggtatgaccagtgataatgccccaaggacaaggggcgtgcctggcgcccagtggagtaatttatgccttagtcttgttttgaggtagaaatgcaagggggacacatgaaaggcatcagtccccctgtgcatagtacgacctttactgtcgtatttttgaaaaattaaaaatacagtgtttaaaaacaaccaagcactgacatcccattctgtgggcagagcatatcacagtgagccatactcccctttgaaggagaggaagtagaatgagggagttccttgcttcctcccccctacctctacatgtcagaagggactcatccaccatttgctgcccacaacatgccctcctagtggctgcctggcctccgtgtgacgtctccagtggtggagcgctccctctcccaagatcacccttccatctatggccagtgtggacggttaggacctaaatgtttcactgtagcttctgcccttggttccagctcttccctctcacgcctcccagacttctccaggccggtttcattgttaaccgtcttacactctgacatcagccaaggcgtctccattctgttcttgtgccattcatgtcttggattcccagtaagtagaaccttggaaataatttgatcttgtttttgcataaatgaggacactcagaaccaggaagagccctaggctcccacagcaaaaccaaaactaaacccaggactgctatttcccaagccagattctgttattcgagcccagccttagaagggcttgatgtggagcaaaaggtgaaaatggtgaaactaaaatttgagtatcaaaacccattgccttctaatagaatcagaaggaaatgttgctaaatcatattccatttccgtcatcactcttatgaatggggtaacctggctaaatgagaattaatgaacccacactcataagttttcattgacttagcaccaagtcgtccatcaaatatcatcagatctgagaatgctcttatggatatctgatttttagaggctggcattcatatttttaaaaactgccacctgtgaccacactgcaggccaaacagaatgtacctgctggtcagatgcagcccagaggtcactgaattgcaacctctggactctcggtcagaggcaagcagcccttattccagaactccacagtccttcacacccttccccagacctacaccaagaccaactaagtggtcaaaaggtggacaaactgagagttgtatcaaggcccttagcctctcaatttgttatcaagtttccctttctgaatctatttaccctgaagtataaatacccaagatgagccttaagagtgcctggtagagcaaacaaagatgcatcttatagggagcaaagtctatgctaacgcagtgtttctcaatcctggctgcacctttgaaccacgggagctttaaaagtgaccactgcaagggccctacccactatggatcccaatttcattggttgggagaggggccaagtttgtttccaacttccccagatgactctaatggctgagagttgcaatcaacaggtaagtgaatatccaggctgtaagatgaagaaagagggggttgtgcccaagcccactgtgcctcataaagcagatgatctctgcagcgctgcgcttctcaaagagtggtcccaggactgcctcagtcagaccacagactcctaagttcctcctcagacttcatggatccaagctctgtgaggtaattctaagcacattaaacttgtagaacagccatctggatttaatattacataatagctataatattctgctattctctaatcttcaatgtcagtttcttaaactgtcaggcctgtctttagatgcccttcaactgtgctggggactatcttgatggcagccagcaaagaaaatcagcaaaaaccccagtggagtttctgggttttacttttgttaaggaaggtgatggtttcttgacatgacaggtatctaggtggaaagggcaaagtgctaatgcaaacacaatggagacactatggaatagctctgcctagggacatgtggaagagcttctaggagacagtgtggacctttccatccctagaggtcttcacaagataaattcctacctccgtcagtattcaaaaggttttagcatcaatactgtctgagaataagacattagacttgagtcagtcccctggcttcaatcccaggatgccaagcagcctctaatggagaccgctggcttaatcgtgctcctttcctggcataacaactcactgcacccatgcctcaccaccacgaagcagtctcctcaccacccaaatgtgccttgggtgacttaaatacagccattagtatgaatggtcccctgtttttattcaacaccacaccagtctttgcttttaccttcggctaatgtggttccagccttttatcctgcactccttcttataatttaaaaaaaaaaaaaactcccctactatctttatgttaatattaacatcaactaggttcttctcaaaggacagccaggcctaactggccacgttaaaatctgcacagtgcttttgtgtcactgtctattctattagtttcaacatcatgctaaaataggacagcatgttccaaaactgaaactgaaacaggaacggagccttgctgatttagcatgaggagggaattgtaagccttgcacctggacactaaaacttttcaataagatgtatgctaagccgtacctagcaaacttaccaggtccaaagtagagtacaagcagaaagttatttttaaaggatgggcactatccttgagggacttaccctttctaatcagctttgcatggtttgttttgagacagtgtctcactctgttgcccaggctagagtgcagcggcaccatcacagctcacggcagcctctgcctcccgggctcaagcaatcccacctcagtttcccaagtagctgggactacaggcacacaccacactcagctaattttagtattttttgtagagacagggtctcgccatgttgcccaggctggtctcaaactcctggattatctccctggccctgcattaaaaaagatgtgcaacaacttagtgatgtgtctgaaatgttttcagaaggtggcccaagtcagagtcaaaaaatttttttatttggaaaattagaggaaatacagaaaatcaaatttcaaatagatgcatctaaatggagaacaagcttatcaaggacagagtccatctttcttatttttatttttgagacagggtcttgctctgtcacccaggctagagtgcagcggcacaatcacagctccctgcagcctcgacctcctggacttcagtgatcctcccacctcagcctcttgagtagctgggactacagacatgcaccaccatgcccagctaattttttttttaattttgtgcagagagggggtctcactttgttgcccacactggtctctcttatttttgtatgcatatctgtggtgcagtgcctgaaatacagtaggtgttcaataagcgccaacatgcaagagtatcttgccattgattaaggcaaaagcaaaaccccagtccgcccctctgatggactgagcacaccaaatttctaaagcacaggcaaattagaaaatataattttgtctaaacttgccaacaagctaaggttttgtgaaccacctaaaatttgcctctctcatactgaaattttctaggtcaagtatctgaaggaatacactactgccagtattttctttggtgatctgtcatatacagcagacattacttgaaacaaagaaaaaaatgttttaaaacctgtctggatgatttccgcagtctcactaggttattgcagccagggagtgacctagcagagatctgaaggtgagcttccctagtactggcatctcacagtgaaagagcactgttcagtgggtcaagagacccagagcctactctcagttacgacacacatagtccttgtgtggcctttctgggcttgtgtcctgaactataaaatgagagggtggcactaaatgtttttttcagatctctatagaggctggaatggccacagagaatctaaatttgaaaacaaacatgtcctgagggtgtgctccaataccaccctttaatactctcctgagatgtgaaggctggaaatgagaatgccatattattgttacttgcaaacgattagtgtatctgggacatccaaaagaagtaactgaaaatttatttctttaaaaacaaaaaaaaccattacagtgcttttgtaaaaacattaatatttagaagtacgtagtggtaataaaaggaaaatagttgtaagaccttcattaaaaagaaaaacctaaaaaaaaaaacaaaacaaaactctggatacaggtgtatgatttacctaaccagacatagctttcttttggataaaaaaaaaaaaaaaaaaaaagctcagaagtgcagaactgtacagatgtccctaaatctattaattcaatgctaaacgaaataatctcttaacatgataaaattacaccaaacttcatctggaaaaataaacacgtaataatgaaaaaagttagccactcccacctccccacttaaaaaagacaaatgaagaaatactagtccaaggccaggtgtggtggctcacatctgtaatcccaacactttgagaggctgaggtgggaggactgcttgaacccaggagttcaagaccagcctaggcatcatggcaaaaccccatctctacaaaaaataccaaaataaaaagaattagctgggcatggtggcacatacctgtagtcccagctacttgggaggctgaggtgagaggatcacttgagcccggaagatcaaggcgacagtaagccatgatggcaccactgcactccagcctgggtgacagaatgaaaccctgtctcaaaaaacaaacaaacaaaaaccaaacaaattataggaaaatcaacattttaaaccaaagaagagaaggagaaagaagggaagggaagccataaaagtgtctttttcaaatagatcatgggggaaaaaaaaaaaaagtatgacttggaatagagacagccttacaagcaggatctaaaactcagaatccatttttttaaattgtgataaatttgactatagaaaaatgtaaactttggatacaaaagtaccatatttaaagtaaataagctacaactattacatgacagagaaaatgtcctcaaacttctaaggaacttctaacaagtagaaaaaaaacacacacaaccccaaagcaaacaccaatagtcaataaatatatgaaagtgttcaatgttactcataataaaggcatacaaatcaaacca
